United States Patent Application Publication US 2007/0072175 A1 - sequence listing, part 2

SEQ ID NO: 2662 - DNA, 3448 bp, Macaca Fascicularis
gtaattctctcaatggcagtatacttataaaactgaattttcaccagctacacacccttcccccgaaactccttatctgtaaaaagcttgtttggttacctgtcttcagtaaagattgtgcttgcatatttgctgtcattgcatattctgcttaattaagtcctgttgatattgcagtttctgtgtatttttacatcttagatgcaatctgagggactaggaaggccttttaaaaataaaacaattcagattgcagaggaagtgtaagtcatggacagttaattaaaggggaacatagaatgctatttagattttagttgatggtgccaatcttcagcgtaaagtcacaagtggagagaagtttagtaaggaaaaaatgttgggcttggaatgcattgtttagtcttcaaagcactttactttttgtgaaatatattttagacattcagcaaatattgaatacttactatatcaggcagtaaagatataagttcattcttaaaatgttcatgttcaagctaaatacaaaaaaaaaaataagttcttaaacagaaaactctttccctcatactttttaattaacaagacatataggagttgcattaatgggcatgcttatgattgatcatccagcagtgtcattagaaatacattttattcatgtgcaggaatcttttggttgtcatggggaaccttgaacacagaaaagagctttttattgataaggtaattcaacacacttgacaattagcttaatacggtttaataccatttgtgggagaagatgaatcagccaggctctttatgtcaagaatatgaagtttctctgactcaaccaacttaagatgagctacagagactgcagtgaaaagtgaaatatccaagtactccagcttatttcacacagtggaaccatgctgtcctctggcaccttgcaccttacccaacagtcatcaaccagatacaggctcctggctgcaaggaggatttgatgggaatgagtaaatgtgtcagcatagtccctcccttctaatggaaaagcaacctcaagagcaaatcctattaatgggtggatcagtatcgtctacttgtcaaaaacattccatgaattatgaatcaaaattttatttatggtggcattgcacacgttaagagattaggatttttgttagcataatttattagctggaaaagttgagaaggttctttggactcatttttgtaggtggaacctaagtgatctggatcattgcccaccagcgaaattgctgggcatggcggacaaagaaaatgttccttctaatgattttttatgagctgagtagctattgttcccagctgagtgctcttttcctctttttattgttgctgagcaaaagaatttataaaaagctctttcttttgtattaaaaaccctgctcaactgaaatgcaagttcattaagtaatgttcatttctcttcctgccataataaccctttcgctctctgttcgattcaacagtgtctagcagcactggtcaaaattttaagtctgaacagactatattacatagatgtagagaaatagatattcaatcttcagcattaaggcggagcttaatttcacatgagtagaatatgatcacttaggctagatgttggccataaatttcaaattagtatctcaacttagcggggggcaatcaacagtggcaaacttcaattatgacaggataaaaatcacatagagatagttcaatatggacatgtaaactataatgctaaatgccaataattagaataagttcattttaagaaaagcagtaatattagctaacatttgtttagtacctgtgccaaacattttgcctatgttaccttgattttcgtagctagcctaagaggtactattatgtatccccgttttacaggttaacaaacaggctcagaggagtttaggatcttttccaagattacatagccagtaagtaatgagactaagatccaaattcagactctgaaacatactctttatattatattgcacttgtcctaaaaatgtgggaatcagaatgaagggacttgtatgacttttggctcattctttgatgcacgtggcctggagttataaaggatccagtgtcattgtgcatcatgagcaaggagtacctaatctctttaattctttcctggaagcttatgacgtccatccaagtgcacatagcaaaagttctgttgtaaactttagcagagtgagtttctctgactcagagtgatgatggaggaagctttgatgagattttatctgaaatgttcatggacaagagctttcaaggagaacatccacagcaaggttccaaaaacagctcatgaaagtgaagcagcaagaccttgcatgagaaatgaagagagagctcaatgtattaaagatgaaaacaagaagaccgaatttattgaaaggagcagagaggcaatgaaaacaaggcaactgaaatgaggtgacttgcagcaattgaaagggaatttcagtacttttgtagaattttaaaaaaattgttttctgctgtttattttcaattttgaacagggttatttgttcatgccatacttatttgccaaattccaaaattctatctatatagttttacagttgtctggtggaatcaatggaactttggttaccagtcaaatgcatctttgagattgtccagttaattctctatttctggtagctgtaataaatgttgaaaaggtttctaactcctggagaaagtttctaactccttatgactccttatgactaatattcataacagacttgtgagttccttgaacacgatacacctgtattcaaaagagtgtattccaaagctaactcagtgatctttccatttatctattggattagcggtgtctttgctctttccttctgtaaatgtgaatagttaagggttgactgcagaagtgtttacactttggcttccatgcctctggaatgtttgtgctttggtggtgagatgtgagactatatttgtatagtctgcatctctcaggctgccccagaatgttgtatagtgcagtgccgaagaaagcagcaggtacacacagaaatggagccttccctggttaaccctgcttggatctgagttacactctgtttcttgacttcttgggacttaggtaatcagtttgccttatactgtatcccattttgtactcgcttacatactacattcttgtttgggctttcctttctttcttgtaagcaggtatttttttaaagccaatatgtgaaaatacggatacactacaattaaataaaatgctgttgtgtttgttttgctttaaaattgtaaaggataagcaataagatagttttatctacgtggttttcccagtgcagttaaaataaaacctaacctgccaaaattgaaaaaaaaaaaaaaaaaaaaaaaaaaaaaaaaaaaa

SEQ ID NO: 2663 - DNA, 2178 bp, Macaca Fascicularis
atattgcagaaccacatggactccaaatgtggacagatccaccagggcaagatccctgcctgtgtacataggtccagggactgcagaattcctggggtcctagcagtggctcctttaccctgcattcccgaaagccaggtcctggaactgcaggcagcaagtgacccagacctacatcacaaagttatgccctggatgccaacgacccttgatcagcagcaacagttcttaccaggtactgtcactcaacaccctaagctgctccgagtcttgtccgtggaagccattgagaaactggagacaactttacggcacaagtatctggccttcctgtcgggtctccctgctctgtattatgtggcgctctccagggccctggccccggcagtcactagccaatctgtcatcacagagatggtgcctgcgcctgtggaaatcccagcagagcctctgactcagatggtttcatttgaagaacagtgtataagccttgggccgtgccctcaaggcaacaatgagacttgtacagacgttgcaaaagaattccagtctgtagtgccggtaaaaggaacaacggagacgctgcctctagaaagccagacacaacctgctagcccccactcactccagacacatatcttgaccaaactaaacttccacctgagaaaaaaggccctagagatacaatggggaattcccattaaggcaagggagtccagggaacaaactgctgcagcaccagagaatatatccgcacagaagtctcttgaaaatctaaaccaccaaggggaggcattgctccaagaactgcccatcccaccagacactcttcctgcccctaatccagaatgggttcaccttaaggaacagctggccaatgacttgaaggcggtgcagcagaaccaaaagcaatctagttccaaagcagtaccccatggttctgcccactgggtctccaagatctcacaacccagtggggacatgacagagacccacatgctttgtgttcgggtggaggccagtgtgaacaagcccagcacggaggaaccctggggccctgagccccaaagccctgacaagagcaaggacccagcccatgtccccatgctagcaggaaagagagaggacccagaggaaaccaaagcagccagggaccatagagaaggggatgaggggtttgggtactcctcaaccagagaagaaagatgccctgctgaagaccagaggccagcagggatgcttccaaaccagacaccccgaggcttctggcgatggagccgtagctttcatctcgctgatccctgtcaacacagctcccagcatcaccctcagcttaagctcccacagctacctccacgattccctggggagaaagaatctgacaatgacctacaagacaatcaaaccgagctaaatgtcatccttgaatcagcgacaattcctgagaatgcccagactgtggtaccccgggcttcacagagtcagcctttcctgagccaaccaactcagtgtaagcccttgcagggccaaactttgcaaggccaggttttacatgggcaggtgatgccagcccatgcacaaaagaagcccagccttccagagtctagcttgagaaataaaattaaatcttttctgcagcgtattaaccccaagacaaaaggcaaagggcatgaggactccatgttctcagctgcaaaagtggccaaaaccagaaaagaaaatgttgtaaagagcctggctccagccaagagccctgtggggagaagtaagacagagaagccaacagggtactccaaggcccaatcttgtccttctgagaagctggtgggcccagccttcttggatggtccccagtctctagacaataagctctggctacactccagacaagctggctctgcctcagccccgggccacccccgccactgccctcgtcactgtcctcgagaggcttgtgccaccaaaccagggtacccaccctagctcctgaccctcatttgagatagaaacattggtctgctcaaggagaacacgcagagccatgaaaaagagtttataggctccccagctgctgcagccctccagaagaccagtattgtcatttccataaatgtgcaggtggggcagggtgccaccagaaatacactctatatttctcagcaaaaaaaaaaaaaaaaa

SEQ ID NO: 2664 - DNA, 2527 bp, Macaca Fascicularis
aagcctttaggtgatggaaagtttctttctcataagaatgaaatcttggaaattgctctggatcaaaaaggacttaccaatgatagaaaaattgctttcattgataaaaatagagatctctgtatcacttctgtgaaacgatttgggaaggaagaacaaattatcaagcttggaacaatggtgcatactttggcatggaatgatacatgtaatatcctttgtggacttcaagatactcgatttatagtgtggtattaccccaatacagtttatgtggacagagacattttgcctaaaacattatatgaaagggatgcaagtgaatttagtaaaaatccccgtattgtgagttttgttggaaatcaagtaactattagaagagctgatggctccctggttcacatcagcatatcaccatatcctgctattctccatgaatatgtaagcagttcaaaatgggaagatgctgtaagactttgtcgctttgttaaggagcaaaccatgtgggcttgtctagctgctatggcagttgctaatcgagatatgaccactgcagaaatagcctatgcagcaattggtgagattgataaggttcagtacatcaattctataaaaagtcttccatctaaagaatcaaaaatggcccacatactactttttagtgggaacatacaggaggctgaaatagtacttcttcaggctggccttgtttatcaagcaatccagatcaatattaatctctacaactgggaaagggcactggaattggctgtaaaatacaaaacacatgttgatacagttcttgcttaccgtcaaaagtttttggagacattcggtaaacaggaaactaataaacgatacttgcattatgcagaaggcctccaaatagattgggagaaaatcaaagccaagattgagatggaaattcaaaagaaagagagcaatcatcaagcagccaatccagcaagagtatgggtctaaagccctaaatgccatgcttatctttaagaagttttatcttttgaaataattctgattaaccaagggtaagcatgttttggttgctaaagaaaaaagcataatctttaaatgagtataagtacttgctgtgtatttaacgtaaaagtacattcagaaagatgaaacacaaagtaactgatgtatttctatcttttatattttttagtccaataattagcaaaatgttactatatacgtaagatatacctgtgtagtgttgattatatttcagttttttgcccattacttcatccctaaatcttcagcatgaacaaatattgatgttgataataaaacaatggactctttgaaatgtatgttaccattaatttctatttgacctctaaattgtaaagtgcctccaaaagtttatttatttatagaacaaaaatacatgaggatggatttgtacaaatgtataaaatgcagctatttatacaccaagttcatagcagcattactggaatagcaaaagatggaaacaactcaagtgtctatcatgaatggataaacaaatgtgctataatacatgcaatggaatattatttagccttaagaaggaatgaaattctgataaatgctacctcaggataaaccttgaaaacactatgctaagggaaagaagccagatacaaaaggtcaaataataagccacttttatgaggtgccggcaaaggcaagttcatagagacagaaaggagaatactggttaccagggactgcaggcaggaggaaatgggggggttattgtttaacgggtacatagtttctgtttgggatgaacaaattctggaaatggatagcgatgatggttgctcaacatcgtgaatgttaatgccactgaattgtacccataaaaatggttaaaattgtaaatttttttgtgtatattttatcataatttcaaaaatatatctagaatgggcaagtggtagtctcctcattcctctcttgatttgagaatggtcaggcaataggccctgaagtctgaatttgtgaaaatttccttgggtgataaacctgtttgattactgttaatttagtatatcccaaagttattaccacataatcttttaaacaataaaacaaacaccccttagaaagtcttctataaacccgtttctgaaaatggtacattatagggtgggtatagatgcatatatatgggattatgtatgttacatatatatacacacacaaagggatagagggattacctctcttaactcccattttaattactatgtctaggttttttaaataaaaatattttctttttaacatgtttcttttcttttccggaatgttggaatattctgttcttgatccaggtgaaatctgattgagtagtggactcataaggttggactgtttatatgtttcctaaattgttatatttcaatgagaagtttaaaatgtctaaaaataaaaaatggttaaaaggttttgtgttatgtatattttaccccaataaaggcaaaaaataaaaaaaaaaaaaaaaaaaaaa

SEQ ID NO: 2665 - DNA, 698 bp, Macaca Fascicularis
  misc_feature (1)...(698): n = A,T,C or G
gggctgaagnnnnaagcatccctttgcataaggccacatcttcctgtcattttccatcccattcctctcccatgtttactgggtctttcctcctgtagtattccccctttcgctgtctcagtccctccctttcccccaggatcttcctcatcaatactcagtctccctttcttactgaaaagaaagacttaacccagaagggccaacaagtccttgctgcctatacttcctccccagtttttactccttcactctggttcagttttctgtgctacagtggactatttccaagccgccacaatctctcagtgaccaaatatgatgatctatttgcagcctccattttgcttaatctctcccttcttgaaattgctctcttggtaggtggatcctgtttttcctccaaagaattccttttcctgttgtatactggttcccagatttttcacaggcctctttttttttcctctttttttatattgaaaaattccacgcatccagaaaaagttgaaaggctagcacaatgaatactcagatacgtactatccacttggattgaatagttaacattttgccagatttactgttctccccacacccaagcatgtgaacataaaatgacatttcacccctgagtatttccacatagatttcctgagaacaaagacattgttctacgcgattacaataagattatc

SEQ ID NO: 2666 - DNA, 762 bp, Macaca Fascicularis
  misc_feature (1)...(762): n = A,T,C or G
atgaagatagacagtgtgcacgaggagctccagatggaggtgatcgacctgcaatgcaacacggtcctgaagacgaaatacgacaaggtgggaataccagaattctacaagtacctctggggcagctacccgaaatacaagcaccactgcgcaaaggttctctccatgttcgggagcacctacatctgcgagcagctcttctccattatgaaactgagcaaaacaaaatactgctcccagttaaaggattcccagtgggactctgtactgcacatcgcaacgtgatagagagaaaactcctggcaggaccctatggtgnnnnnnnnnnnnnnnnnnnnnnnnnnnnnnagatgacaaaatgaattatttttttcttttttgnnnnnnnnnnnnnnnnnnnnnnnnnnnnnnnnnnnnnnnnnnnnnnnnnnnnnnnnnnnnnnnnnnnnnnnnnnnnnnnnnnnnnnnnnnnnnnnnnnnnnnnnnnnnnnnnnnnnnnnnnnnnnnnnnnnnnnnnnnnnnnnnnnnnnnnnnnnnnnnnnnnnnnnnnnnnnnnnnnnnnnnnnnnnnnnnnnnnnnnnnnnnnnnnnnnnnnnnnnnnnnnnnnnnnnnnnnnnnnnnnnnnnnnnnnnnnnnnnnnnnnnnnnntgtgcccagccgacaaaatgaattcttaaacttttttttttcagttttttttccactttgaatcagaaatataatctgcagtatcatacttgtttatatgacattgtatgcctc

SEQ ID NO: 2667 - DNA, 652 bp, Macaca Fascicularis
tccacatagaacacacttggcttcagtgctttgtggggattcatggaccacagagaagcttccacatatttataggcactggggagcagcaggaagtggtggtgagacactttgcaatcctccactgcagacttcacccagggggccagagcaggagagaatccctctgtggacagcacttgagaggaaagggcttgttcatgaccgtgtatggaggtcaccaacccaaccctgttcctgaagtttccagaaacagatggagaggtaagtccagctaggctggagcaccagcatcagtagtaggggcaggagcttgtgctaaacctggctggtgtgtcctagagaaacaggaagcacaggtgtcatctcgcaggacttttctcaaccaactaatttcttatggaaatgagacatttgtgattgattttaatttcctcttggggactgtgaaattaaaatggatgaaattttgtccaccaggagcctcagggatttaatatccaattctaaaacctgaacaggcccttttgttttgcaatttgtggaccaatccctggcttcattttatttggctttgctttcacttccccattttctgttattttctttttcttgtgctgttatgtacatctcttaaagctggtcaaattgt

SEQ ID NO: 2668 - DNA, 1548 bp, Macaca Fascicularis
gtgtgagtgtgcatgtagggcgtgtggggaggaatgtaggtgagtgcctgggtgcctgggcaggtgtgtctgcacagtgtgtgtggcatgtgcgtgaggaaccgcatgtgaatgtgcgcgtgttgcatgtgagcgtgtgcatgcccgtgcgtgtgcatatgtgtgtgagcattgtgtgcgtgatgggagccgtgggtgctgtgtggacagcccctctgcccctcccatgggctcccacatccagcatccacctgagagaggagggagtgccttcccattctgcagagtctgtgtgctgaggccccacagaggcaagtggaggagctgggatgtgaacctgggaccccagggtagggggctgcttggctgtggaccctacccctcaggagaacccagggtccacctctacaggactcattccaggggcggggcctcctcacccggggctcgatgagcggctgtctgtttcttggcttgagtgctgccgagtgctccctgctgctgcgcccaccctcccagggagacgcgagcccctagctccctgtgttggtgacccaccccgtccaccatcagcagctggctggtgtctctgggtggctgggcaccagcctcctggaggccacatgcctgggtccacatggagggtcccggtgggggcatcaccctgggtcccgcgagtgaggctggcaggtgacccgtcacactgtggcgaaggcaggttcccattgggggcgtcaaggccaggggatcgaggctctggaagctcaagggggctgtggccttggggcccagctgagtttccagctggcagccaggtccttgagggaaggggtttggacagaatccgaggccccctaagctgatgggcttccctgtctcccctgccagccctgacccactgaacaggggactctttccagcccggagagctccttgtctgtgtccccagcagaaggtggggtggctcctgcctcaccctctgcccagccctgatccaggccagagccatctagggccccagaaggaggggcaggaggcaggggtggttctggaacctgagggttggctccggttgggtctgtcctcggggctgcactgctggatcccaggaactggaacagccccacagccagggtgacggaaatgcttggctgcatgcagacacagacccaccccggactgggctgtccccggagcccagacacatcaccctgggaaggggcagctgggcctgaattgtgctgggcaggggctgggcgccctggttgtgggttctccagggtcccttagggggctgggcctctccccaggaaggaaggtgggaagtacaggcatgacccggggttcctgaggcgggtccgccaagttgcttctgagatgcctttgcttctctcctggctgtctgataatggatatctctgttctaattccactctggctaaactgaaagtgaagacccttaagcttacatgtgtctaccctcagagtcagaataaaaacaaaagcgcctgagtctccagcaggcatgaggaaaaaaaaaaaaaaaaa

SEQ ID NO: 2669 - DNA, 1122 bp, Macaca Fascicularis
acgcccgacgccagatcctaggtgtggagggcggcgacacggagttgtgaacagaaaatatcgaagtccactccaggaaagaggcctttcgtccggaaaatctgcatccagcaatatggtgttaattcagctctacagcccccaatctttacttcaaaggactactgaggacagaatgtatattaaagaaatgtagaaattcaggagccatgaaggagaagacagggggcttcgtgatgcatggagaacctctaataggaaaagcttcacaacagaaggaacgaaggatagttgaggagcagtgggatagtagcacgtccacattgtcctttgagaatgagaagtcattctggggcaccgctcttcccacgctccgggcccacacacacagctccactccatcaaaggagccccgctgcctgcccacccacccggggtgctttctggcttgcagtcctcttggcagacatgaggcaacgattgctcccgttcttcaccagccttctccttgtggctctgctgtttccaggattgtcccaagccagacatgttaaccactcagccaccgaggctctcagagaactccgggaaggagccactgggcaaggcacaaacgggtctcagctgctacgccacccagggaaacgggcccccataatacggcgcatcccctattacccagaagttgaatcagatttaagaattgtcgactgcaagagaagtgaaggcttctgtcaagaatactgtaattatctggaaacgcaagtcggctactgttcgaaaaagaaagacgcgtgctgtttacattaaaaccgatgtcgctggtatagaaacaaagctctgccacttaccggttctcctgggccacgttgtccaatcaggtgcaggttttttgcggaagtgcctgagcagcggggagcggaggtattgccacttgtgccagacagttcaagtattttattgtggcaaaataaaacacaaaaatgctacccgtgatcttaaagaagatgatatagcttgacacaaacagaattttcaaaatcacacaagttgtcaatttgtgctagtaaatgtggatataataaactttcattggaaagaattcaaaaaaaaaaaaaaaaa

SEQ ID NO: 2670 - DNA, 619 bp, Macaca Fascicularis
  misc_feature (1)...(619): n = A,T,C or G
tagcagctgcaaatatgnnnnagctattnnngatacactaaacttattgttgacaaatttcagcctctgtaatttttttttgtaattacctataggcttaaaagtcattcattgctcttctagtataattagtagttccgtgattgaaagtttattgtaattctactatcttcaaattagatacattttcaaaaggaaaaaataattttttagaaacatcttatattnnnnnnnnnnnnnnnnaaatccaagcagttaagctttctggatggtaacaaagtaccttctaaaagataagtgctatgacaccatgtatgaatgtaattctctcactaatttacctatgaatatttggtgtcctaatgctttggtttatataatctcaggggttgtctgcaaaccaaaactgacatattctgtggttagcttttatttcttttttttttttttcaacagaatgctttgctttggttctatttcttctttcttcttttgtcttatgtggaataactagtctccatgaacttcacttgaaagagcctgtgaaagttagatgagtctaaaaggtgctnnnttgacagtnngcacgcaaacctgggagnnatatnnntctnnntat

SEQ ID NO: 2671 - DNA, 515 bp, Macaca Fascicularis
  misc_feature (1)...(515): n = A,T,C or G
gcaacccggccaccttcatcatcaacccggccacattcatcagcaacccaaccacctcatcttggagaaggagaaggaactgcaagtcacttaggatttgtaatcttcctaaagttttcctttgaaaaaaggataatgggtggaattttcagagtgattacatacctcaacatttttattaacatataacagtgggaaagttcatcatccgtatactgcagtaacttaaacaacagataattattgcaagattagaattaagagatcttgtccttaaaagtataaattgtcctttgatttatagaaaataattgaattgggatttctacatatcattattatacctattttaaatttaatggcagccgggcatggtggtgnnnnnnnnnnnnnnnnnnnnnnnnnnnnnnnnnnnnnnnnnnnnnnnnnnnnnnnnnnnnnnngaggctgcaatgagctatgattgcaccgctgtattccagcctgagcaatagagtgagaccctgtatctttaa

SEQ ID NO: 2672 - DNA, 761 bp, Macaca Fascicularis
  misc_feature (1)...(761): n = A,T,C or G
gttttggaaatannnnnnngaaaagtccacttgtaccagtgacaaggagtcacttgtacagtgaccaagtacacataaaatactgattataaaaataatatggtgataaactagtcccttgtttgatannnnnnnnnnnnnnnnnnnnnnnnaattcacttttgaaaagttcttaatgaacagttttattcttattccataaacaactcttttaatacaatttccttggtatccaacttaaatcccagaattttgttccaccctgcttagttgtttgcttatgaaggtattcttgtttctaccaatattctaggcatgagaataccttattactgagttggaggttttgtatctctttctcctcctttatgcccattttcttacccacagtggcaaatgacaatgtgtctgttcaggtctgcccccaccactcatcccaggatgccactcgcatttttttcttgttacttgaccacgctgtacagtaacatccaagagcccgttctacagtgggtggttttggtctttttataactttttctcaannnnnnnnnnnnnnnnncctgttaaatgtatagcattgtaatgagagcccatcaaatcctgagtgtcagtttgttgtccctattgtagatgaaatagtgacgtagcaaaaacctagtaaattctgaatgcttttccacgtagacttatctggaatgtgaacacaactctttggttaatgataaatgcttaactgtagtcctgagtaggtgcatttc

SEQ ID NO: 2673 - DNA, 791 bp, Macaca Fascicularis
  misc_feature (1)...(791): n = A,T,C or G
caaacctgttgctaatcatcaatacaatattgaatnnnnaaggaaaaagaaagaagacggaaagcgagctcgagctgataaacaacatgttttagacatgctattttcagcctttgagaaacatcaatactataatcttaaggacttggtggacatcacaaaacaacctgtggtgtacctgaaggaaatcttaaaagaaattggtgttcagaatgtaaaagggatccacaaaaacacatgggagctgaagccagagtacagacactatcaaggagaagaaaagagtgactgagaagcctcctagtcagcatgctagtgaaacagctagcggcgatgctgtgctataggcgctgatactggaaggcttgaacaccgtatgttaataatggttaagtgacaatactttcatttctctcggtaaattttttaaacctgtaattcttgtaaagtttcttaactgtttttttgaggagaaagaacaaatttatttatagacttaacttgtattaaaccagattactcacaataggaataggggttggaggattaagagggtttttcttaaatattagcttttaatgtgtacaattaggaaatgttttttaaatgaggactctctacccttgctggatctgaggagctgaggtaatacagatccaaggagaattgtatagcaagaaaaaaagtcaactacagaaactcttaaaaggaataaaaagccaaagttccttattttgaaattgtcaaagaacaaagcggtgtttttcttttaaacaggtgatcatgtttcg

SEQ ID NO: 2674 - DNA, 2446 bp, Macaca Fascicularis
gcaatgcattgcctggtgtcattaaagccattgataaaattaaagataaaaatgtggattatgaggatctaaatacttgtcttcaagattttggtatttacctttctaagccagaatttaagaagatcacagaattgactgaagctggtgaaacaaaaaaagtgaattttaaagaattcattgatactatgatgagcaacacggaatgcttctctgaaaaattattattgcctgatgctattgaaaccctcgacaatctcagaaaggagacgatgaatgtttctgacctgtggaatattctgtctagtttgaatagtaatttaaaaaaggatgaatttctagctgcattgaaactagttacagttgatgaaggtgacaaagtacaatttgaagaatttgcacaagtagtaaggaatatgcgtgatgctgccaggttagaagagttacaggaagttgtcttagctgctgatttgcttgaaggtgacatgatagctgaggagaacttggaagactttctaagaaatattgggattaagtcacctaaagaagaggtagagaaaattcttcaatcagattttgtttctgaagataacatggtgaacattaaagactgtatgagggctttgagggacacccagaaattttccaattatattgcattgaatgagactatcaatacattggactccatgaaagaaaattgtcagtttgacaaagacaaaaatctagatgtacttgaaaacactgataggctttcttttactgatgacatacttcaagaagtaatggatgactcctttgttgaagattttaggaaagaggcttcaaatctaaaattaccaaaggtaaacgagattaaagaagttgctaacatcttgtcacatgttgataatggcaagattggtgtacctgatttggagcatgccttgaaatgtttgaatgttaatttaactgaggaggacttcagtggagcccttaactgttgtaacgtcagtgataatatggaggtggatttaaaagatttcttaattaaaatgaaagaaagtccacatttccaaaagtccaaagctacacagatactcttagctgctacccaaattctccagaatgatctaattgatgtctctgacctcaagacgttattgatggacaaggaccttcatacagctaatgctatacttactgtaatgttaagacatgtacctgaacatgaaagtggcaaggttaccattcaagaatttgtgactaaattctccgatatattgacaattcctaaacctgcagaagataaattttacaacaacaacattcacaaaaatgatgttacaaccatttctggtctccagaaaaatttaaatgccatgggaatctatctgacagatgataaaatacagaaaactttggataatactaatcctaatgatgaagtggtgcattttaaggattttatcagagaattggccaacactgatgaatttattgaatgccaaaaaatagaagatgcatggaatattattaatagtgtctgcgatgggaaagttgacattgaagaccttttatccactttgaagagcctggggaaacctttagatgaagaacaatttaaggtcttatcaaacagtgcaacagatgggaaggccgatataaaaaacctgaagaccgttctagacaacatgggaatcaagctcacagataaagaacttgaagatctgacacaaagcctgccagtcggtgctgataataaagtggctctgaaagcattggaggatgaagtgaaagcttttactgggaaggctgatataaaaaacctgaagaccattctagacaacatgggaatcaagctcacagataaagaacttgaagatctgacacaaagcctgccagtcggtgctgataataaagtggctctgaaagcattggaggatgaagtgaaagcttttactgaaagaaaagtgatcttaaaagatgtaattgatgttttcactaattcacctaaaccatccacaccattcaacaatttatttagagagattaaaactcttgatagtatcagaaatgatacaatgcctgtaaatgaactgagctccaaacttttgagtgccggaattccagtaagcaacaagacgttccaagagatcttgagacaagcatctgttgatgaaaataataatgtaagtctcaagaaagttttggagaatttgaacacaagtaagccaacttctgtatttgaagatatagacactgccctcagtactgtcagcttgatgaactgtgacagagttcaagttagtgacttgaaaaatgcttttgaggacctcaatatttctttaaagcctgaagaacatcagatgttagtgaaaacacttgacgctgatggtatatataatcactataagtttatttttctaataaagtgacagtagtttttaaaaaaaaaaaaaaaaaa

SEQ ID NO: 2675 - DNA, 778 bp, Macaca Fascicularis
  misc_feature (1)...(778): n = A,T,C or G
acaacattagcaggaactggagacacaaataatgttaccagttccagttttaccgagtcaacttttaatgaaccaggaggcttgtgtattggagagaatggacaattattgtatgtggcagacaccaataatcatcaaattaaaataatggatttagaaacaaaaatggtatctgtgctnnnnnnnnnnnnnnnnnnnnnngctgtagtagatggcnnnnnnnnnnnnnnnaaacagaagacattacccaaactacctaaatctgctccaagcattaggctttcccctgtgactgtgtgtgctggccagactcttnnnnnnnnnnnnnnnttggacctcccatcaggatcaaagctaacggaaggagtacccagttgctggtttctaagagctgaaggcaatgaatggctgcttcnnnnnnnnnnnnnnnnnggagatatagagaacatttccagtcaaccaacaatttcactacaaattcctgatgattgcttatcacttgaagccattgtatctgtcagcgtgtttctttattactgtagtgcagacagcagtgcttgcatgatgaaggcaattttgttcagtcagcctttacaaataacggatacacagcaaggttgcatagctccagtagagctcaggnnnnnnnnnnnnnnnnccagctagctagcaacccattgccaccacctgctgtcccccatcctgactgtttctgtaatttaaggaaagaaaacttcagttctgcctctggataacaaggtgcnnnnnnnnnnnttct

SEQ ID NO: 2676 - DNA, 743 bp, Macaca Fascicularis
  misc_feature (1)...(743): n = A,T,C or G
aggggtcatttgagttttgctgaatagggagcacgagataccnngagccttcctctcttcactggtggtgatcagaggagctgtctggtgtgtcagggtcgtgaagccgttacatttcaggacgatcctcnnnnnnnnnnnnnnnnnnnnnnnnnnnnnnnnnnnnnnnctgccttttatcacagctgtcaccattctcacnnnnnnnnnnnnngactctctggttataattactatttaatatttagactgttttactgagcagactttataataatgagatatctgcaaggcacttaaagtgttacagatgttttaccttaagaattatttaagttgtgttgggttaagacagttttcggtgtaccgtaaatgttgtnnnnnnnnnnnnnnnnnnnnnnnnnnnnnnnnnnnnnnnnctgtatatnnnacaacagtcctcaaatccacgaaactattcatacatcaagcagcatttttttcactctccttagaattggaactatgcagttaaagcggataaaatgtacagatgtttcatatattacaggttacatatataaatcaaaatttcctatataaaactgatttgggatttggggtggaaatattttgaatatttatttttaaagatgcaagataggactttgtgcaatgtatttttgtaaatgcttttcaaaatatctgtctttggtagtgctgctgctgctgccaccaaattggtaagatgctataagaggtta

SEQ ID NO: 2677 - DNA, 747 bp, Macaca Fascicularis
  misc_feature (1)...(747): n = A,T,C or G
gcagcggcaacgccgtgnngtgcaagggcaggcccaacaagctggagcgcgacgaggtggtccannnnntnnnnnnnnnnnnnnnnnnnnnagagnnnnnnnnnnnnnnnaacagccagggccggcttcccgacggcagggtggtgctgtgctttggggaagagtnnnnnnnnntggcccccttgcgctccaaactcattctcgtgcagattgagcagctctatgtccggcagctggcagaagaggctgggaagagctgtggagccggctccgtgatgcaggcccccgaggagccgccnnnnnnnnnnnnnnnnnnnnnnnnnnnagatatttgtgcctcacaccagagaccgtttttcagagaaaaccaacnnnnnnnnnnnnnnnnnnnnnnnnngggcgccccaccccggctgcgtcctgcatccatctccctattgcagtggnnnnnnnnnnnnnnnnnngatgtggatccctctgtctggggtgggatgccttactttgcacttaatttagtaagggcnnnnnnnnnnnnnnnnnnnnnnnnnnnnnnnnnnnnnnnnnnnnnnnnnnnnnnnnnnnnnnnnnnnnnnnnnnnnnnnnnnnnnnnnnnnnnnnnnnnntttattttctacattttccccttcattatcattnnnnnnnntgattctttctgcatttttggttaactatcatttccaaagacttgtcattcagtaatattagcagatnnnnnnnnnnaataaa

SEQ ID NO: 2678 - DNA, 2090 bp, Macaca Fascicularis
  misc_feature (1)...(2090): n = A,T,C or G
catctacttaaaacaaaaaaaaaagcaggttttccttcttgtacacacatatacacagtaaagatgtgtatcttaccttagataccgcgcttcatcttcgtctaatctttatttgaactcaccgtcgccactggcccagagaccttgtcagtgttattttcagtatcacttaatcagaacaaaaagataagttctgcaatattctttctcttaattccagaattggaaaattaatatttgtatagcctcctcaaaagcatacaggcaataggaagtatggtattatgttcacgatctgatgatagcatttaaaatattttaaaagcttaagacacaaaatgtgtgaaagaagtttaaaagtgaataaatctaaatcaatgctgttgtaaataattttttttatcagtttatgtatctcactaggctagacgttaccagccttctgagctgtgcccttgatgtgcaaaatgaacgaacatttgacaggatagcatttttcctctcttcaatcactgatagaggattggttaatgtggtacaataaatagcccttcctgacactatttcaaatctttttaacagaagaataacctaaatttcatctaagtaagtttcagtattatttccccctagaatacctttcaaaacgattcagacatttaagaatcactggcttttttccaacttttcctccaaggaagtcacaatagaagttgaattatgtttctactttaatcaagaatttgacattaaagtaatatatgaatcatttctatagtacactagcaaaatgggtaatagattaaactagaatttggtcactttgtgggtttgttccatttccggattataaaatgagtgctcgtaaagtgttgtggtcatgaaacaattattgagcatctttatttaagaacatgattcaattaagttttcatttatatcgataaatctataaattgaaacatacggaatatatattcatgtatatccataaatgaaaacgtgtgtgtgtgtgtatcccaggacatatttgtatgcattttaatgaaatgtgagtcatatgcaatgacaaacttttactgtcatagtcaagaaaattgtactgtagtttggtttttatatttttcttcttcaaatagaaaataaagggtgaaaggaatatagaaataactgttcacattacattaaggaattcaatttctttctctacagacttagtactaaagcctctttcatacatatttttcaatgtaaaaatcaagaaaatattgcattgcttactgtttccttgaaaaaaaattgaaatatctgaaatcaaagatgccactgtatataacagtatcctcttaatcttagacctaatttatcccatggatttaactgatctagagatatatctatgcataaggaacaatataataatacagtttacttaggaaataatattttaaagttcttttaatatgcattttagctacaatgcaaaacttataaaagtatttatatccactcaggcgcagtggctcacgcctgtaagcccagcactttgggagaccgaggaaagcagatcacgaggtctggatatcgnnnnnnnnnnnnnnnnnnnnnnnnnnnnnnnnnnnnnnnnnnnnnnnnnnnnnnnnnnnnnnnnnnnnnnnnnnnnnnnnnnnnnnnnnnnnnnnnnnnnnnnnnnnnnnnnnnnnnnnnnnnnnnnnnnnnnnnnnnnnnnnnnnnnnnnnnnnnnnnnnnnnnnnnnnnnnnnnnnnnnnnnnnnnnnnnnnnnnnncaaaaacaaaacaaaacaagtatttaaaccctatgacaagttactatttgggatgttaacattaaagagaggctgcagattcaaaataatatatttggtatttttaaggtatgttctttttcatggagtaaatctaaacaactgagatatttgctgaaaagttgatcgattcaagatatataacacatgaagacagttttctaaaatcctcagtgtaattaagtttaaagagaaacaactttattctgtcacatacatctagcaataggacaaaaaaaaaaaaaaaaaaaaaaaaaaaaaaaaa

SEQ ID NO: 2679 - DNA, 733 bp, Macaca Fascicularis
  misc_feature (1)...(733): n = A,T,C or G
acacagatnnnnngctgannnnnnnnnnagtgattcaggtgacaccacgnntcgtaggtcatgtctggaatgagtattctgtcatgttagttttttttttttttaacttttttgttttttcactgtaaggaacaacattcaaagaaaaaaggtttgtatagtaagtcgccccacatcatacttcctgggtatccactgtgaacagctgggctcgtggcttcctagagacttctgtgcgcacacacacacccctgcacacgtgcacgggcatggactgtggttttcttccatgcccacttacgtagagccctttcctcacgagagcccaccctgtttcctttgtacttctgtcatacggagctctctgttcagtttcactgctttcttctctgttgtggtaacacacgacgtaaacttgcnnnnnnnnnnnnnnnnnnnnnnnnnnnnnnnnnnnnnnnnnnnnnnnnatcacagctcactgcagcctgaatctcctgggctcaagtgatcctccctgctcccaagtagctggggccacaggcctgcactaccacacccagctaacttttaaaatctatctttnnnnnnnnnnnnnnnnnnnnnnnnnnnnnnnnnnnnnnnnnaccattttaagtccacannnnnnnnnnnnnnnnnnnnnnnnnnnnnnnnnnnnnnnnnnnnctatccaagaaagctttcattttcccaaatgcaaactgtccccataaac

SEQ ID NO: 2680 - DNA, 3047 bp, Macaca Fascicularis
  misc_feature (1)...(3047): n = A,T,C or G
gtgctatggcggagcctgtggggaagcggggccgcttgtcccgaggtagcggtgcgggccggcgtcctcgggcccagcggtctccatcccggggcactctggacgtcgtgtctgtggacttggtcagcgacagcgatgaggaaattgtggaggtcaccagtgctcgctgtgccgccgacgaggttgaggttgcaccctcggagcccccggggccggtcgcgtcccgggatgacagcgacagtgacagcgaaggggcggacgcgcggcccgcaggacccccgcgggagccggtcaggcggcggcggcggctggtgctggatcccggggaggcgccgctggttccggtgtactcggggaaggttaaaagtagcctttgccttatcccagatgacctatccctcctgaaactctaccctccaggggatgaggaagaggtggagctggcagattcgagtggtctctaccatgagggctcgccatcgccaggctctccctggaagacaaagctgaggactaaggataaagaagagaagaaaaagacagagattctggatctggacaactctcctctgtccccaccttcaccgaggaccaaaagcagaaagcatactcgggcactcaagaaattaagtgaggtgaacaagcgcctccaggatctccgttcctgcctgagccccgagccacctcagggccaagagcagcagggccaagaggacgaagtggtcttggtggaagggcccaccctcccagagaccccccgactcttcccgctcaaaatccgttgccgggctgacctggtcagattgcccctcagaatgtcggagcccctgcagagtgtggtggaccacatggccacccaccttggggtgtccccaagcaggatccttttgctttttggagagacagagctatcacctactgccactcccaggaccctaaagctcggagtggctgacatcattgactgtgtggtactggcaagttctccagaggccacagagacatcccgacagctccagctccgggtgcaggggaaggagaaacaccagacactggaagtctcactgtctcgagattcccctctaaagaccctcatgtcccactatgaggaggccatgggactgtcgggacggaagctctccttcttctttgatgggacaaagctttcaggcagggagctgccagctgacctgggcatggaatctggggacctcattgaggtctggggctgacaccccactccctgtttgatggcccagcctggacttggggagaatgactccctgttttttgccccataagggctagcagaagctgaggtagaacttatctttaagctgcagcaaaatcaaggagtgacttttgtcccctcctgttgaccctggtttagagccgttaaccacttggtgagttgtgtggatgttgttgccctggatggcctgtggctcggtccacaagtcatgctgagttctgcagcctctgtgacatggagatgtcccctcacccctcccctttcaccatcatcctcttttcctcatggaaatgtctgctctatgaaactatgcacatattgaaagtgaactgaaacaaatgagggttgggtgggagcttccaggcctgggacttacaccatgcctagcctagcagaggccttagtcccatttggggcttgggagtgacatttacttgaggcttatacactggtgtggttgcctggtttgcaggaaatgaccaagctcacacctgctggctgaagtgtaagcagacaactggggtactcttttgaaggatgaaggtggtggattctcagccctgggggtcttcctcacccgaggacccttcggagccaccctttctagtttatgtttcctggtgcacacatttaaggcataacagcacattcatccctttggtttgggatctcaggaatacagtcccatgcaaagattctctggttttacggcttttttccctttctttacaccatcctctcccataagcacccacatgtctttgaatatgaatgtatttgtaaaataccacgtttcatgtgtgaatatatgcttttactgtacatagtgctattgtgcaatacgtcttacgccgttttcattcaatgtgtgctaagatctagccccattgcctcttctagaaatgcagtattgccttgacctgccacgtggcactccacaatgtcaattgccacttacacacattgcctcaagtgggggacacctgggtgcctgtgacccctcggcactggatacaggccacgataaacatcctttcgtgtgttcccttctgtgcttgtgtggcatgtgtacccagcgtgggcttacaggtcacagaggtcagtttctctatgggtttccagattttctttagaatggtgactgacccccatacttaaggccgcccttttctccttatccttgccagcacttgtattgccagactacctaatttttgccagtctgataggtagataggggtgctgtgctttaatatacattcatctgatcagcattcatttggggaattttttcatttagcctttctggtttcctttcctgtgcattgcccattttctcatggagtttcttacctttttggtttatcctcaggagttgcttgtacattcctgggcaattgcaaataattccaagaatgcacatttgggctgggtatggaggttcaccagtaatttcaacactttgggaggctgaagcggaaagattgcttcagcccaggagttcgagaccagcctaggcaacatagcgagacctcgtttctacaaaaaaaattaaaaagggggctttgggaggccgaggcgggtagatcacgaggtcaggagattgagaccatcctggccaacaaaattagctggtccatggtggcacatannnnnnnnnnnnnnnnnnnnnnnnnnnnnnnnnnnnnnnnnnnnnnnnnnnnnnnnnnnnnnnnnnnnnnnnnnnnnnnnnnnnnnnnnnnnnnnnnnnnnnnnnnnnnnnnnnnnnnnnnnnncaaaaaaaaaaaaaaaaaaa

SEQ ID NO: 2681 - DNA, 2673 bp, Macaca Fascicularis
acagttgaggcgggaaggacacagataaagaggccaatcccaataccgggctgcatccagatctcattatgcatcaggaaaatgaaaaaacagaggaaaattctatggaggaaaggaatccacttagccttttctgagaaatggaacactgggtttggaggctttaagaagttttattttcaccaacacttgtgcattctgaaagctaagctgggaaggccaattactaggaatagacagttgagacatttccagggtggaaagaaagcccttcagatccagaaaacatgggtcaaggatgaacccccttgtgctaagaccaagttcagtgtggatactccacatgctagcactctgtcctctccagtgaaaagaaaggacactaaacacttcgtttcctcctcaaggactctcctgagactccaagcagagaagttgttgtcatcagcaaagaattctgaccatgaatactgcagagagaaaaatctcttgaagacagttactgactttccatccaatagtgctttaggtcaggccaatggtcacagacctaggacagacccacaggcttctgactttcccatgaagttcaatggggagagccaaagtccaggggagagtggcgcgattgtgatcaccttgagcaaccacaagagaaagggcttttgttacggctgctgccgagggccggagcaccacaggaatgggggacccttgattccaaagcagttccaacttaaccgacatagaagaatcaaattatctcctcttatgatgtatgagaaattatccatgattagatttcggtacaggattctcagatcccagcacttcagaaccaaaagcaaagtttgcaagctaagaaaagcccagcgaagctgggtacagaaggtcactggggaccatcaagagacccttagggagaacggtgagggtggcagtggcagcccatttccttccccggaacctaaagacccttcttgtcggcagcagccgtactttccagatatggacagcaatgctgtggtgaaggggacgaactctcatgtgcctgatggccacaccaaaggaagccctttcttgggcaaagagcttagtttagacgaagcattccctgaccaacagaatggcagtgccacacacgcctgggaccagtcatcttgtgcttctccgaagtgggagtgtacagagctgattcatgacatccccttaccagaacatcattctaataccatgttcgtttcagaaactgaaaaagaaattgcgactctgggtcaggaaaatcggacaagttctcttagtgatgacggagtaaaactgtcagtgtctggagcagatacatctgtgagtagtgtagatgggcctgtgtcccaaaaggctgttcacagtgagaactcataccagatggaggaggatggatctctcaagcagaacattcttagttctgagttgctggaccacccttactgtaaaagtccactggaggctcccctggtgtgcagtggactcaaactagaaaatcaagtaggaggtggaaaggacagtcagaaagcctctccagtggatgatgaacagctgtcagtctgtctgtctggattcctagatgaggtcatgaagaagtatggcagtttggttccactcagtgaaaaagaagtccttggaagattaaaagatgtgtttaatgaagacttttctaatagaaaaccatttatcaatagagaaataacaaactatcgggccagacatcaaaaatgtaacttccgtatcttctataataaacacatgctggatatggacgacctggcgactctggatggtcagaactggctgaatgaccaggtcattaatatgtacggtgagctgataatggatgcagtcccagacaaagttcacttcttcaacagcttttttcatagacagctggtaaccaaaggatataatggagtaaaaagatggactaaaaaggtggatttgtttaaaaagagccttctgttgattcctattcacctggaagtccactggtctctcattactgtgacactctctaatcgaattatttcattttatgattcccaaggcattcattttaagttttgtgtagagaatataagaaagtatttgctgactgaagccagagaaaaaaatagacctgaatttcttcagggttggcagactgctgttacgaagtgtattccacaacagaaaaatgacagtgactgtggagtctttgtgctccagtactgcaagtgcctcgccttagagcagcctttccagttctcacaagaagacatgccccgagtgcggaagaggatttacaaggagctgtgtgagtgccggctcatggactgaaactccgcagagaccctgggaagtctgaccaagttggagcagatggtttgttacttgaatctccaaacacttagttgaatttttacagatatttcagatcagtggagttgggccactattgttacctcaaatttattttttgcccttattcatttctccagctaccatgtactattgtttaatgttcagtttggtttcatttttaattttatggttctgtgcgtcccccatatttaatatttattattcaaacgcatgcatatagacagagcatgcagtgaagagtattaaaaaaaaaaagcttagtaaaaaaaaaaaaaaaaa

SEQ ID NO: 2682 - DNA, 772 bp, Macaca Fascicularis
  misc_feature (1)...(772): n = A,T,C or G
gcatcagacccagaggaaggggccagaggctcatggactggctgtgtgttgggattgagtctgtgccacgtgtttgtgctactgtgtgtccccctctgtccaggcactgagacaccagcgaggaggctccagagggcactctgcttgttattagacattacttcctgagacaaaaggttcagcttggagcagaggggctgaatagcagaaagttccccccactcccccacgacccacaaccttagatgttcgttctaagtctttacattggatctcattggacccttccatggtgtgatcttctgactgttgttatcaccgtgggctccctgactgggagttgatcgcctttcccaggtgctacacccttttccagctggatgagaatttgagtgctctgatccctctacagagcttccctgacccattctgaaggagcctcattcctgggaaatactccctagaaacttccaaatcccctaagcagaccactgacaaaaccatgtagaaaatttgttattttgcaacctcgctgaactctcagtctctgagcagtgaagaattcagtgttaaatgtgatgaatactgtatattgtattgtttcaattgcatctcccagataatgtgaaaatggtccaggagaaggccgattcctatatgcagtgtgctttaaaaaataaatcaataagaaacaactctttgagaaacaacaatttctactttgaagtcataccaatgaaaaaatgtatatgcacttatannntcctaataa

SEQ ID NO: 2683 - DNA, 551 bp, Macaca Fascicularis
tattgaggcattgaaaaacctatccattcttaggatgagagaccgtgcgacaatcgatatttattataggagatagtgaagtttgttttgtttcattcttttggggagggacttggtgggatggggggaggtgaaggaataatgcctgggaaattaatatagattcagtctggtttgtggtattttgggaggatgagggaatagaagaggcaagcccatgtcgttagtgggttagacagaaggaaagaagggacatatggcttgcactggaaatgggcagaaaaattgattagttaaggaggggggtgtgagtgaagggggaaggtagaccctttaaccccaagtgagggatgatatatctatcaggcttacatttaagtgcatttagttcctttaatccagggcaagtggggtacgtactgaagtttttaatggagaggggagattttcagggttgttgtttttccctttttgatgttagacagtgatactccctccctgctatgctctccgccccatctccagtggagtaagtattaatgtaggttagg

SEQ ID NO: 2684 - DNA, 526 bp, Macaca Fascicularis
cccttttttttttttttttttttttttttttttttttttttttttttttttttttttttttttagtgaaaggctaagagcagaggggagattggtagtagaagggtagaggtgatgatgagcggggggataaggggtatgggttttgtgttttcgagttgtcatgttatttttgtgttgttggatgtagggaatagtgttagggaggtggtgggagcaggacctgaccaccaccaggacaccagaactgtggagtcagtggcagcatgcaacgcccccttcggaaagcttcaggcaccagcctataacccattcgagcagccatgtaggctgcacctagcaaagccataggcacagggctacctgaggtcttgggggcccaatccctgctccagtgtgtctgtgaggcagcacatggagtcaaaagagattattctcttcccacagataccttttctctcctatggccctttaacagcataaccctcaatccccccgctcatcatcacctctacccttctactacc

SEQ ID NO: 2685 - DNA, 775 bp, Macaca Fascicularis
  misc_feature (1)...(775): n = A,T,C or G
cagtgattgnnnnagatgatgaccgttcattaataaatttgcatnncatnnnnnnnnnnnnnnnnctctttgtgatggtgataacgatgttttgctatgctgttatcaagggcagacccagcaaattgcgtcagagcaatcctgnnnnnnnnnnnnnnnnnnnnnnnnnnnnnnnagcctaattccacagctccttgttttctgagagagactgagnnnnnnnnnnnnnnnnnntgctgaacccagcnnnnnnnnnnnnnnnnnnnnaatacattatcttgcgatgttgggttattccagccaaagacatttcaagtgcctgtaacnnnnnnnnnnnnntttataaaattctattcagaaattggtccaataatgcacgtgctttgccctgggtgcagccagagcccttcagccctaccttggacttgaggacctacctgatgggatgtttccacatgtctctagagaaggatttcctggatctagctgcgttgnnnnnnnnnnnnnnnnnnnnnnnnnnnnnnnnnnnnnnnnnttgcgtcactggtggggttgaagtttggtttggttcttgtttcggcccagtatgtagagaacgtttgaaacagtctgcacctttgatacagtattgcatttccaaagccaccaatccattttgtggattttatgtgtctgtggcttaataatcatagtaacaacaatagtacctttttctccattttgcttgcaggaaacatacctaagttttttttgtttgtttatttttttccttttt

SEQ ID NO: 2686 - DNA, 1336 bp, Macaca Fascicularis
aggcggcataaggcgaaagtgccggcagcggtggaaggcgaagttcaatcccagagtccgccccctgaactggggcctttccgcaggaggaagctctgaaagacaggggacccagtgccattcccctgggaattgtcgcttgcattcagctgaaattgtaccattgcactccagcctggacgacagagcgagactctgtctcaaaaaaaaaaaagaatgttttgaaaactgtacaagtgcctaacctagcaacaaggcaggctctcagaagagtgtgttatagccactgccaccatggggaggagatggggactgtgcaagcaagtcctctgtccaggctggccatgtgaatccccgaccaccaaggtgtccagcaatcagtaccactctccctcctacagctggtacagagaaaagtggaggaatatttgaggcccctcacttacaacttctctgttccaagaggaagctgataaaaatggagatccctgcaaggagtaggatcttctcacattgactagttctgtgtgtggccaaaggcactctggacaatggagattatggagaaccagacaatgaatggatgaggagtctggggtcacatggaaggaacttgaagtcagggaaatcctttaagaccctgtcctcacaaagagaagaggaaggctgccatttccttttttgtctcattatttctgctttaaaaaaaattgctattgtttacatcatataccacagcaaaaggaaaatttttcttttggtccaaaagggcaaatggcatgatggtctttgttctaaaatagtagtgtatcatcacctagaccagaacgttaaagaggcaaagccttctcagaaaatcactaaggattgtatcttctgaaaacactgtaatttgaatttgcttattaagtttgtttgatttttagataatattttatagatgcttgtcacaggcactggtacttcaatgaaaggtcagtccttatgttgtcttggtgctttgaaaattaaatgtcatgaacaaggaatacataatttttttatctacactttcaggacagagttcattgaggtgtctaaaatgcaaactcaacattatcacatcataatacatacatatgataatatatatacattttgatagtatacgcattgctaattttcaccatttttatcatacttgtaattaaatttgcatatctggtacatatctgattttctctgtcatccaaatttgttttgagtatatatttctttgtgctgccaaaatataataaaaaaagatatacttgaaaaaaaaaaaaaaaaaaaaaaaaaaaaaaaaaaaaaaaaaaaa

SEQ ID NO: 2687 - DNA, 689 bp, Macaca Fascicularis
  misc_feature (1)...(689): n = A,T,C or G
acagtgaccacctggccgagttgtnnngaagcccagaaggtaccagccaggggtcagttagcctcttctgtccccagcccctgggctnnacagataagcagcactgttgtgtcctgagcctgcatatgaggcagggcgccccctggtggttcgacagtgcctttctgtgcccttgggtgataggacctgaaggaggagaaggtaagggagaggacnnnnnnnnnnnnnnnnnnnggagggctgcagtccagggcagaggggctgctggcttggagcaatgcccctgggggatggtccannnnnnnnnnnnnnnnngaggacattggtcccaccaggaggctgcaannnnnnnnnnnngaagggttcccgtgggcagttgaaggccattagggcccnnnnnnnnnnttccctggaggatggcagtaggggaagcaggactggtgcaccacacactgcccactgctggggtcaggagtgtgggcagccaggcttgggggagcgaaggccagtcccaaggtgtctgtgtgctggccagcgagcccatcccccttcagacctacaccctgggtgcctctagaggcctttccatgatgctcaaaggcccacactacttgaccctgatcatcccagtggcagccatccaggcatcaggccaggtctgnnnnnnnnnnnnnnnggggcttgtttgc

SEQ ID NO: 2688 - DNA, 670 bp, Macaca Fascicularis
  misc_feature (1)...(670): n = A,T,C or G
tgggnnnnnnnnnnnnnnnnnnnnnnnnnnnnnnnnnnnnnnnnnnnnnnnnnnnnnnntcggcagcctcgctggcctgggttcnnnnnnnnnnnnnnnngatccaaggaacgtttgggttttcctagctgctacatctgttacttttgttggtgttttgggattgagatcttactactatggaaaagtcatgcctgtaggtttaattnnnnnnnnnnnnnnnnnnnnnnnnnnnnnnnnnnnnnttcgtatgttgatgacagctgattagcagaagtcctgttccagcttggactcatgaaggattaaaaatctgcatcttcccctattttcaatgtattaagagaaataagtgcagcatttttgcatttgacattttacctaaaaaaaaaaaaaaagacaccaaacttggcggaggggtggaaaatcagttgttaccattataaccctnnnnnnnnnntaaagaggatgtaacatgagcttattgagaccctcannnnnnnnnnnnnnnnnnnnnnnnngttctcttctttctgtatctataggtaaatctcaagggtaaaatgttaggtgttgacattgagaaccctgaaaccccattcnnnnnnnnnnnnnnnnnnggaaaaaatagagtatctgttcttctgctcatcttagaccacagactgac

SEQ ID NO: 2689 - DNA, 158 bp, Macaca Fascicularis
tcctttacatcgcctgaaaacgccgctgttcctctttcagagtcatcgagaggcgtgaggtgcctctgcagacgaggagtttgccaactgttataaaggcgtttggggtcctccgcttttcgtggttgactcttccggatcatctgccgctgagcttc

SEQ ID NO: 2690 - DNA, 725 bp, Macaca Fascicularis
  misc_feature (1)...(725): n = A,T,C or G
tcagcaagctgaaacacttttccaggagatcttnnaaactgaagaattctgccctccacctccaaatccagaagacattatnnnnnnnnnnnnnnnnnnnnnnnnngagtcttctggaaccaataatgtaatagtggccaaactagagtcctctgaggaaggcaaaaaccaagaaagcccagagaagcaccttcaaaattagnnnnnnnnnnnnnnnnnnnnnnnnnnnnnnnnnnnnnnnnnnnnnnnnnnnnnnnnnnnnnnnnnnnnagtttcccatatgnnnnnnnnnnnnnnnnnnnnnnnnnnnnnnnnnnnnnnnnnnnnnnnnnnnnnnnnnnnnnnnnnagcattgaatatctttgttaannnnnnnnnnnnnnnnnnnttgattattgaacattttgtttagaatgggctacatgacccataatcttaaaacagagttagctgtattttagtattgggtatgtannnnnnnnnnnnatattaacaactcagcttaaaggtaatgttgtatttgctaatgatcttcagattttatctttgtctacagaacaattagtaatacccaagtaatattttaattactttcacagctattatagttgctgcggccnnnnnnnnnnnnnnnnnnnnnnnnnnnnnnnnnntatgtnnnnnnnntgcatataatataaatgtatagacatggtggtaggaatagcaactaatacaaatgccaa

SEQ ID NO: 2691 - DNA, 743 bp, Macaca Fascicularis
gttggccccaaagaggcttcaccagcaaaggaactgtgtgcattttaatactgggggacggaggacgtgtgagctgctcagctaggtctgcccaaagcctaagactcagtttcctttttcttttgcttctgcccatccttaacaactaacagctcaacccacacctctagacaacagtagttgtgctttctgctaatggtaacattttcagctcttaaaaagaagctagagattttcaaatgctagagtgtctctatcagaagggatgggacattgtgtccaaagcctcaagaacaaaccacactttccttctgacctggtccccaaaggtcagcaaagagcaagcaggcagaggccctcataaggactcttctgtcctcctttggccaaactgtttaaccgagcctaggggtgagggggagcgacccgagctgacatctttctccatggagagagattttagaaaatacttttctcgcccatgaatttcatttttggttgatttttattgttttccctttacttacaagaaaataagattgcaaccactcctggtaatgatttagtagttccttttcatttcagtttttgtaaattaggagataattctaagagttactaaaggatgatttatttaagagaactacgtcaaatagcgaatgagttatgggtaacattagatgaaaataacctttcccgtgggaaaggcttctcgaaggcatggatgcaaatataaaatataa

SEQ ID NO: 2692 - DNA, 840 bp, Macaca Fascicularis
  misc_feature (1)...(840): n = A,T,C or G
tgagccccactgccgctgcaaggggagaaactaagtgatctcccgtggggcgggagagggtgtctggtgcgcagggaggtggccggtgctcctgggcactgctgctcgtagggcaccttcccgccactcctccctgctctcctgtaccggagtgtctctgagctgctcgtagggcaccttcccgccgctcttccctgctctcctgtacccaagtgtctctgagctgcgtgtctgagctgctcgtagggcaccttcccaccgctcttccctgctctcctgtaccggagtgtctctgagctgctcgtagggcaccttcccgccgcttctccctgctctcccgtacgggagtgtctgagctgtctacgtggatgcttcttggttggccagacttgggcgtagatgtgaaaccatcttactaaaagcatcttaaaatgaccaattccaaaatcaagcatattcccgcttcttcctgcatgatccctgnnnnnnnnnnnnnnnnnngcaagtctgtaaacggattctgggagagaccaagccgctggccgtagggtgtccgtgggtaaatccaggagtcttcattgcttctgttatgaccccatctctgccgttttctaaagcttgctgagttgtcattcctttgcaacattaaaatacgtgctgaactaatatttttccttccttcagtattgtagtaatgagaaatatttcatgaatggcattgatgctaataaatcctttgcgcaaaaatttgaataaactttcagtggtttcaatgatgtacaagattgtatatttccctcatttattgtaattcaatatttagttgtttgctgaaaaact

SEQ ID NO: 2693 - DNA, 412 bp, Macaca Fascicularis
  misc_feature (1)...(412): n = A,T,C or G
tggacaccccaaaccccagctgctgtgtcaaggctgaggacgccgtgccaccatccaaagggggttcnnnnnnnnnnnnnnntggcctaaagaagggacttcgtcttactgaggagtggggaattaaagagatttgactccctttagtgttgggggcagtcnnnnnnnnnnnnnnnnnnnnnnnnnnngtggaaactgaaagccccttatctcatttaaaccccaccctatcttccctgaaggaacattccttagtctcaagggctagcatccccgaggagccggaatgggctgaatcccctccccgnnnnnnnnnnnnnnnnnnnnnnnnnnnnnnnnnnnnnnnnnnnnnnnnnnnnnnnnnnnnnnnnnnnnnnnnnnnngagcccagcgcccctgccacctccctgac

SEQ ID NO: 2694 - DNA, 3323 bp, Macaca Fascicularis
cattatggctgcttcaaaatgtacaccaaatgaattagaggttagaatatgttctcattgtcacatatctggcagcttattatctccctttaacagctttttttaaaacttgcgtctacttttggacccagtgtgtaaagcttaataaaaataggattttttaaatattcaggtgtgtgatgatcctatacctgagattttggttgctaggtccgacatgcattaccttgcacgtgtctgtgaatcatcatcaaagttaatactgttttgtggttttcattcctactggagttctcataaattctccctagtcttgattaatacaaatgatttttttttttttggcatcaacaaattttatcacctcactattcatcccctcttccagattgctaataaatataggccggaggggatggcttagtggtctaagcatcagatttgaaatacctagagtccctggaactgcaggtttgaatgtcagcagagtcaacccagctcatcattcttccaaggtagataaatggagttccatgcagatttctgtgtggggtcattaggatgagatctttaaaaactgagttggttatgagtgatacaagtcccatctgtcgttttgaaagaatgggggtttctgtcaaagttttgaacaaaatttccctctgaacttgttgtatggtcacttatgcactagttgacatcctcctccctggaggtctctgaactcacatggaagtgctctattagatttataaacattgcaggaaccatttaggagaaaaatactcttccaagaaataaaatgtgatgattttatattgacggccactaatactatggtcactctattgttagcatgtttcaattcatgacagttggccattattatattttatgcttccttcttaattatataaatctataatgtttgaggggttttaaacattttttttttctttatgatagccttcagtaagaaaaggtgtactaccaagaatgcttgaagaaattttgaagactagatttatggtgaagcagtcaatgaaggcttacaagcaagacagagccctgtcacgaatgcttgatgcacgtcagttgggacttaagctgatagcaaatgtcacatttggctatacagctgctaatttttctgggagaatgccatgcattgaagttggcgatagtattgttcacaaagccagagagaccttggaacgagctattaaactggtgaatgataccaagaaatggggggctagggttgtatatggcgatactgacagtatgtttgtgctactgaaaggagccactaaggagcagtcttttaagattggtcaggaaattgccgaagctgtaactgctaccaatcctaaaccagtgaaattgaagtttgaaaaggtatatttgccctgtgttttacaaacaaaaaagaggtatgtgggttacatgtatgaaacactggatcagaaggacccggtatttgatgcaaaaggaatagaaacagtcagaagagattcctgccctgctgtttctaagatacttgagcgttctctaaagctgctatttgaaacgagagatataagtctaattaaacagtatgttcagcgacaatgtatgaagcttctggaaggaaaggccagcatacaagactttatctttgccaaggaatacagaggaagtttttcttataaaccaggagcttgtgtgccagcccttgaacttacaaggaaaatgctgacttatgaccggcgctccgagcctcaagttggtgagcgagtgccatacgtcatcatttatgggacccccggagtaccacttatccagcttgtaaggcgcccagtggaagtcctgcaggacccaactctgagactgaatgccacttactatattaccaagcaagtccttccacccttagcaagaatcttctcacttattggtattgatgtcttcagctggtatcatgaattaccaaggatccataaagctaccaactcctcgcgaagtgaacctgaagggcggaaaggcactatttcacaatattttactaccttacactgtcctgtgtgtgatgacctaactcagcatggcatctgtagtaaatgtgaggagccaacctcagcacgttgcagtcatcctcaaccaagaaatccgggagttggaacgtaaacaggagcaacttgtaaagatatgcaagaactgtacaggttgctttgatcgacacatcccgtgtgttcctctgaactgcccagtacttttcaaagtctcccgagtaaacagagaattgtccaaagcaccatatctccggcaattattagaccagttttaaattgtcagtatcagagaattacaggtgctatttttttcagtgtttaccactaaactgttgtgcatggtgctttttaactttcatcgagtcaaggatgttcactgtctgtctgttatctgaagactatgaagacttctatgctaaccgaattaaaatgtacttgttgatctctgaatagctcacttcttacaatgtacaaattcctcattctgtcaccttttaaacattgttttataatgcaggtgttggatttgctccagtacgtgtaccaccttgtaaatccatttgagtagatcatgtttacttcccagtggaaggagcactgaaaacctcttaaagaaaaaccattcgtgtgttttccttgaactgtctgtatcaagacgtgttacttcgagatatccattcactttataattttgactgcaaaatattttgtaaatacacttttttacttttcaaacaactgagtaaaataatgtgcaatgacttttatacaaatgattttcaagttgtttggtatatttcctctaggttttgcttgactcaaagtagatcgttattttgatcaaactgtgcgaacagtagtaccatgtgtagcattttgaaacattattttttaaaaaatgctgtcttgctttagctattaatggggcattgtgaggaactgtgcaaagacatttttgttacaaacctgtgggcctgttgcaatactttaaaaataaaaaattttattccatttgcttgttttgtatagacatttctattgcttctaaatatgcttaaaatattttctttccttatgtactgtacagttaatcttatttgtcatcatcttgaacacaaaatgtgtatttagaatatttgtataactgtgtaaaataaaaaaggaattatgtggtcagtgcattgttttttaaactggaaatcattttgttttaaaagttaataatggaaaccctattaaaattgaataaaatataaaaaaaaaaaaaaaaaa

SEQ ID NO: 2695 - DNA, 645 bp, Macaca Fascicularis
  misc_feature (1)...(645): n = A,T,C or G
gggagaggggcgctgggattgaggacaaagaagtatcagggagggtcgtgaatgtcaggttggatggggtgggaggaagaagcaactgggaagggggctgatgcggagcagggagcaggtctggctgagtctgaagcacctatgggacagtccggtggagctgtcaggggagccagaaagaactgacttgtcatcagctctgaggtggcaactaggctttgagagaggttgggatttctctttaggaaagtatagagaccagaagagnnnnnnnnnnnnnnnnnnnnnnnnnnnnnnnnnnnnnnnnnnnnnnnnnnnnnnnnnnnnnnnnnnnnnnnnnnnnnnnnnnnnnnnnnnnnnnnnnnnnnnnnnnnnnnnnnnnnnnnnnnnnnnnnnnnnnnnnctggccgggcgcggtggctcaagcctgtaatcccagcactttgggaggccgagacgggcggatcacaaggtcagnnnnnnnnnnnnnnnnnnnnnnnnnnnnnnnnnnnnnnnnnnnnnnnnnnnnnnnnnnnnnnnnnnnnnnnnnnnnnnnnnnnnnnnnnnnnnnnnnnnnnnnnnnnnnnnnnnnnnnnnnnnnnnnnnnnnnnnnnnnnnnnnnnnnnnnnnnnnnnnnnnnctggc

SEQ ID NO: 2696 - DNA, 781 bp, Macaca Fascicularis
  misc_feature (1)...(781): n = A,T,C or G
taagtgtagactacacatagctacttcctnntaaagactgcaataaagaaaaggagggaaagaactactttattgtggagaaaactgacagattccacctcagccaagtgannnaggtcagcctcacagttacagggacacaatgtgtgtccctgatgtgatgggggtgacagtggcacttcacccctagatgctttctttctataacccgtagtcccagtctaaccaggagaaaacagacacattttaattgagggacattcttcaaaacatctgcccagtagtcttcgaaattgacaaggtcatcaaaaacgaggaaagtctgagaaggagcctaaagacatataactcaatgtaatggggtgttttaatggatannnnnnnnnnnnnnnnnnnnnaacctaaggaaattgtcaaactaaaattgactttagttaattgtgtctcgtctcaatcattataacaaatgggccaggtgcattggctctggcccaaaaattagctgagcacnnnnnnnnnnnnnnnnnnnnnnnnnnnnnnnnnnnnnnnnnnnnnnnnnnnnnnnnnnnnnnnnnnnnnnnnnnnnnnnnnnnnnnnnnnnnnnnnnnnnnnnnnnnnnnnnnnntgtggcagcgagactgtctcaaaaaaatataacaaatgtagcacactacggtaagatgttaataagaggggaagccacacatggtatgtgggatctcccatgtactatcttctcaattactgtnnnnnnnnnnnnnnnnntaaaagcctataaaaa

SEQ ID NO: 2697 - DNA, 744 bp, Macaca Fascicularis
  misc_feature (1)...(744): n = A,T,C or G
caggtgatgcgacataaggtgagtgcacggcatgttcagatcacagtgccttatgtccgaatacagcaatatgtcacctccgcagccggggcccacgcgtgcgaagccacnnnnnnnnnnnnnnnggaagtctttgaaccttttaccaaatcagtttgttttcattagatttgtcaaaaagttgtcatttgaatataacgaatgactttaaaactgtaatgacacttttacacgtaagtgtttcgttccgggctnnnntgtcaacgaggctgnnnnnnnnnnnnnnnnnnnagttttactttcatgccatttttttacacattttttgnnggggtaaacttcaccacacccatgaataaactctcagttattttnnnnnnnnaaatttctcattatttaagtttggatctggaaaggacatgacttctgaaacagccgctgctgggttttcaaagctgaggtctctcaaaacgtgtaggagacgttgccgtcaggcgggagccaagtgccgggaagatgtctattttttttcttgtgtattaaaatgtaaannnnnnnnnnnnnnnnnnnnnnnnnnnnnnnnntgtttgtaaattttattgtggcatatacagtattgtcatacagttgaagagaaacaatgtttcctaatgtaagtgctctgaaaatgttgacactgtatatatatatatatgaggatagtttgggttttttttgtttttgggttttnnnnnagatgaaaaa

SEQ ID NO: 2698 - DNA, 688 bp, Macaca Fascicularis
  misc_feature (1)...(688): n = A,T,C or G
tgagcccaggagctgaggctngcagtgtgctgtgatcacactactgcactccagcctgggtgacagactcagaccctgtctcttaaaaaaaaaaaaaaagtcaaaatggaagatcgcatgtacctttttcaagagaaagggtttggaatggggaagaataaggagggcagaggttgcacacacctgttttcattactcatctgcggccatgctttacgaggctctgccaaaagaccttggaacttccactaagtctttgatgaaagtcccctagttcttccccaagtagatgagttttcagtggaattcacatgccatgtgaaatctacgtgctggataattatgactgtgtctggtgaatttgaaattatttacagaccagatcttgatagtttctgactctgaatcatagcatagctgcaagagggaaataaaaggcaagaggctggaannnnnnnnnnnnnnnnnnnnnnnnnnnnnnnnnnnnnnnnnnnnnnnnnnnnnnnnnnnnnnnnnnnnnnnnnnnnnnnnnnnnnnnnnnnnnnnnnnnnnnnnnnnnnnnnnnnnnnnnnnnnnnnnnnnnnnnnnnnnnnnnnnnnnnnnnnnncagctacttaggaggctgaggtacgagaattgctcgaacctagaaggcggaggttgcagtgagccaagatcctgccactgc

SEQ ID NO: 2699 - DNA, 781 bp, Macaca Fascicularis
  misc_feature (1)...(781): n = A,T,C or G
aggtgtgtgctaccacacattaaagttttgnnggagatgtggaggtctcactatgttgnnnaagctggtctcannnnnnnnnnnnnnnnnnnnnnnnnnnnnnnnnnnnnnnnnnnnnnnnnnnngacacatgtgagccaccacgcctggacaactcaatgactttaaatgacaatgatcattttcttattctccctcagacttccaaaagctgactgggcttggctaggcaggtcctgttgggctctcttgttctatcacaatcagaatggctggggctggagttattttaaagccttgctcactcacttgtctggtaactgatgctagacatcagccagaacacctacatgtggcctttcccagtggcctgggcgccctcacaacatggtggctgggttccaagccaagtgtcctgagagagagctgggtggaagttgtgtcaccttttaggacctagccttggaagtcacagagatctcatctgttatattctatctgtgagaagcaagtcactaaggcctgcccatattcaaggagggaaaatgaatgctactgctaggaggagggccaaataatttgtgaacatattttgaaaccactatagagaacatctccagcaacacagcagcaggtgtgggcttgtaacttccagcacagggctgctaacagcatcttgatgtgcagattctccgcacatcatcccttcttcctcctccagggtaccccttcttttttgtttcccaggcctcccaacatctttgcaacaaatccctacata

SEQ ID NO: 2700 - DNA, 1684 bp, Macaca Fascicularis
ctacaaagcctttcaatatttaatatgacaatgttaaatatctattttggcaaatctatagttttaataaaactattttgggttttttttttctgagaagtatctctttaaaccagtgttcttcataatacagtttgagaaacatgcttatacatttattagaagatttgcctattaggtttctattttaaaatgtgagggaattgaaaatatttataataccttatgctaggtgttaaaaccacactattggtctccaaattggttatgaacttaagtgacaataaatttaaacatctgaaagggtagtgaaaaagctctctctcatcatttatagtaccaacttaatgtcagcttattctatggccgtctgtttacactcatattctgactgttgtttactttgctattactgcaaagcatgattttttcctcctagaacaaaaatgttaaaatgatttttttataacatgctcatttgtgatccttctaaaattcaactcactgtatattataaacaaaagccataatcttataactatatctagaaatttcagaaatatctgtattaatatggtcaaacattttatgtttgcatttctgcttatttttaatcttcaataattgttttaattatatttcgcttctagactaatttttgtaattcgttcacttttcagaaagaaatgtaattatgcaatctgcatgtaaatgtcagtttttaagaatgtggttcccttactgtagcatgaaatactgaatcaagtgtgaatttgtattgaatttcaactggaattcatttaaaatattatattctaatttgagcaactatttagaaaatttgtgtttcattcatagttcgttttaccagggcaaattagtcagtttgaaaagtatctgacagagtaatagtagaacatactgatgtgtagtgtcatctctagagttaactgcttcattttaaatcataatgttgctaccaccttttggacgaagtgcttaaccccatgtgccaatagtgcatattttatagaatggttgtgaggacttatttttataaaacgtgtgtattctaaaaacagtgcctgactcatagtaagcgcttagtaaacacgagtaaattattttacgttgtttacgaatatagattgtataatttaatgaatgagaagaaagtttctgttcagaaatatcctttgtaaaaattgggcttatcagtagagaataaaatcttgattttggctgaaaccaagaatggaggatgtctttatactatataaaaaccctttgtgggaagctaaaatttttaagttcacagatttcaaagtgagagtaatctagattctttcacttcctattgtgactttaggcaagtttacctctcaaaaccatgattcaaaacgataaaatgagaatgattccatacttcttagggttactctaaggagcagaaaaggaaatttgtataaagcacttagtgcggtgtacaatacatagtaaatgattaagtttttattattgttttaaagttatatttaaactgattattttagaaaccgctttgagaaaaataaacaaatgtacatacaaaaatcatctgacaaaaattggagtaattactactgaaatagaggaataagaatagtaaaaaaaaaaaaaaaaaaaaaaaaaaaaaaaaaaaaaa

SEQ ID NO: 2701 - DNA, 737 bp, Macaca Fascicularis
  misc_feature (1)...(737): n = A,T,C or G
atgatgaaaagcccgactgtacaaacacgttgcaaagctgcttaaatctgtttaaaatatatggttagagttttctaaggaaatataaatactgtaaaaagttcattttattttatttttcagccttttgtacataaaatgagaaattaaaagtatcttcaggtggatttcacagtcactattgttagtttctgttcctagcacttttaaattgaagcacttcacaaaataagaagcaaggactaggatgcagtgtaggtttctgcttttttattagtactgtaaacttgcacacgtttcaatgtgaaacaaatctcaaactgagttcaatgtttatttgctttcaatagtaatgccttatcattgaaagaggcttaaagaaaaaaatcagctgatattcnnnnnnnnnnnngaatccaatgtttccacctagtctttttattcagtaatcatcagtcttttccaatgtttgtttacacagatagatcttattgacccatatggcactagaactgtatcagatataatatgggatcccagctttttttcccccccacaaaaccaggtagtgaagttatattaccagttacagcaaaatactttgtgtttcacaagcaacaataaatgtagattctctatactaaagctattgacttgtagtgtgttggtgaaatgcatgcaggaaaatgctgttaccataaagaacggtaaaccacattacaatcaagccaaaagat

SEQ ID NO: 2702 - DNA, 731 bp, Macaca Fascicularis
  misc_feature (1)...(731): n = A,T,C or G
gacaaatactgtatgattccacttacataaaatatagagaataggcaaattcatagagtcagaaagtagactagaagttactaatagctgaggagagggggtaatgggcatttacgtttaatagnnnnnnnnnnnnnnnnnnnnnnnnnnnnnnnnnnntgaaagtagatagtaatgataattgtataacactgaaaatgtaattaatgccactgaattgtaattttaagtataaccacttgaannnnnnnnnnnnnnnnaatttgtaaatgaaaaaggctacaaaacatcacagtaagtatattaattttttaagtgcacatacatgagtatctagatgtgcttttctccagatgaacacatgtacagaaaaacatctggaagtttgtataccaannnnnnnnnnnnnnnnnnnnnnnnnngagactgcatgatcttcactttcttcttttaaagtttctatactgtctacatttcctaaaatgaaaatatatgacttatgaaatgattaacaagctacttttaatttgaaagtgaatggatgctgaaagatttatttatgaatgcaagtctatatttattgctataaggnnnnnnnnggtgtatgaattacttgccatttatcactctcaagctatgttgtattaatgaatattaaaacgataatatatatctcctggctggactactgccatgttctccaagctggtctatgtgtctttagttttgtc

SEQ ID NO: 2703 - DNA, 772 bp, Macaca Fascicularis
  misc_feature (1)...(772): n = A,T,C or G
ctgaaaatnnntgnnnnnnnnnnnnnnnnnnnnnnnnnnnnnnnnnnnnnnnnnnnnnnnnnnnnnnnnnnnnnnnnnnnnnnnnnnnnnnnnnngtttataaagctgtttttaccacctcatacccgagcttacagcaggaaagattctttaaacttgtgttggttaatgaggtatcccaacaagtggaaagcttaagagtgagccacctgccaaggcggaaagannnnnnnnnnnnnnnnnnnnnnnagcccaaagacattgnnnnnnnnnnngcccctgtcccatgctttggaccagtcttcacagaggnnnnnnnnnnnnnnnnnnnnnnnnnnnnnnnnnnnnnnnnnnnnnnnnnnnaatttttcgtacctctgcagagactccttgcttatcccaggttgaaccgnnnnnnnnnnnnnnnnnnnnnnnnnnnnnnnnnnnnnnnnnnnnnnnnnnnnnnnnnnnnnnnnnnnnnnnnnnnnnnnnnnnnnnnnnnnnnnnnnnnnnnnnnnnnnnnnnnnnnnnnnnnnnnnnnnnnnnnnnnnnnnnnnnnnnnnnnnnnnnnnnnnnnnnnnnnnnnnnntttaggtttttttgtgtgtgtgtaatcctaattcaagtaatgtttnnnnnnnnnnnnnnnaaaagtctgtgttccaagccattggnnnnnnnnnnnnnnnnnntggccagactgcagtaagccctgagaaagatattagggtttaactaaaaatgggtgctttcctttgatcttggacttttt

SEQ ID NO: 2704 - DNA, 755 bp, Macaca Fascicularis
  misc_feature (1)...(755): n = A,T,C or G
catgcaattattactaannncgaccagttataccattcccaagcaggataggcatttaggaaaacttgaagctatagaaaacagcacactatcttcccccaactctgatttttaacttggagttaattttggtaaaaatggatgtagatccannnnnnnnnnnnnnntttaaatggacaaactcaaaagtgatttgtggaagcgatgggtttacagcttgttaatattgtggtccctaattatcaccaggctgggttcccagagtctgggagtcaaattctctcttagcccttcttcatttctgccctcctgtatctactggagagtagacatggtaaannnnnnnnnnnnnnnagctctctctaccacnnnnnnnnnnnnnntgtttgtgtctcccaaannnnnnnnnnnnnnnnnnnnnnnnnnnnnnnnnnnnnnnnngggggggttttgggaggttggaattagtgcccttacaaaagaggctgtgtgcagtggctcacacctgtggtcccggcactttgggaggccgaggcgggcagattatgaggtnnnnnnnnnnnnnnnnnnnnnnnnnnnnnnnnnnnnnnntgtctctgctaaaaatacacacacacacacacacacaaaattagctgggtgtggtggtgggcgcctgtaatcctagctacttgggagcctaaggcagaagaattgcttgaacccgggaagtggaggttgtagggagnnnnagattgcaccgctgcactccagcc

SEQ ID NO: 2705 - DNA, 492 bp, Macaca Fascicularis
actatgcactgaataatacagaatagtggagtggctcaacactttcatgtgtcactattgcaaacctcttgctattgcctcttccctgcttctttttacctggtaaactcatattctgatttgagattgtattctctactttaaaagcagaacctgaaagtttgggaaaagaaagagagaaagggagagaagaagagaggtggagatatttactgtcttggttggggtcagaagtaatgtttgccagatattgttctaattgctttgtaaccattagtactgtccctagtcactggcaagaggagcctgataagttatgtttatatataaaaacacgtcgatgtagatatgtccatgaagaattgttaaataaaaaaatatatagaattgaaaaaaaaaacacattgatacctctgccatttgggatttgatgtttagggctggcacagtacaatctgtgactctaaacactttcttcatcattaatactat

SEQ ID NO: 2706 - DNA, 2574 bp, Macaca Fascicularis
ggtaagagggtcagggagctcggtcagcgcggaaagctgaggggaacggagggcgaggggcacgccgggcccctgagggacaccgagggaagtccttcccgaacatctctgccccggcagtggtggccggcgaggggtgtggcgaggcgacgtggcaccgagtgccgccgcagccctcgactggggcgcttgctcggcgcgcagggctgggacccgaagcctgcctttcggagggagtgacgggggtggcgtgcggagcgaaggcgccggtttacgcggggcctttcgacagctgccggccgcgcctggctgagagtcgtccgggggagagcaggcgagggttccaaaagagcagccctcggcgagctgtgccttgcagggaccctagcggcggagggcgctgctgcagctgatgaaatcgcggagccgacttgctcggggtccccgcgccgccctcctccctccggcagtgggagtggcccgcgctgccgccgctccgcccggagcgtgaacggactctggacaccctggatttgtctgcagcccacccgagccgaaatgaagctgttgtcatttctggaaggaaactggcccaggagatcaagcaggaagtgcggcaggaggtagaagagtgggtggcctcaggcaacaagcggccacacctgagcgtgatcctggttggcgagaatcctgcaagtcactcctacgtcctcaacaaaaccagggcagctgcagatgtgggaataaacagtgagacaattgtgaaaccagcttcaatttcagaggaagaattgttgaatttaatcaataaactgaataatgatgataatgtagatggcctccttgttcagctgcctcttccagagcatattgatgagagaaggatctgcaatgctgtttctccagacaaggatgttgatggctttcatgtaattaatgtagggcgaatgtgtttggaccagtattccatgttaccggctaccccatggggtgtttgggaaataattaagcgaactggtattccaaccttagggaagaatgtggttgtggctggaaggtcaaaaaatgttggaatgcccattgcaatgttactgcacacagatggggcgcatggacgtcccggaggtgatgccactgttacaatatctcatcgatatactcccaaagagcagttgaagaaacatacaattcttgcagatattgtaatatctgctgcaggtattccaaatctgatcacagcagatatgatcaaggaaggagcagcagtcattgatgtgggaataaatagagttcatgatcctgtaactgccaaacccaagttggttggagatgtggattttgaaggagtcagacaaaaagccgggtatatcactccagttcctggaggtgttggccccatgacagtggcaatgctaatgaagaataccattattgctgcaaaaaaggtgctgaggcttgaagagcgagaagtgctgaagtctaaagagcttggagtagccactaattaactattgtgtcttctatgtcacaaacagcactccaggccagctcaagaagaaaagcaggccaatagaaatgcaatattttttatttattctactgaaatggtttaaaatgatgccttgtatttattgaaagcttaaatgggtgggtgtttctgcacgtacctctgcagtacctcaccagggagcattccagtatcatgcagggtcctgtgatctagccaggagcagccattaacctagtgattaatgtgggagacattaccatatggagaatggacgcttccctttgtcaaactcggttacacatttgccttttctaggattgcatttcccaagtgctattctaataacagttgaatactcattttaggtaccaaaccttttgagttcaactgatcaaaccaaaggaaaagtattgctagagaaaattagggaaaaggtgaaaaagaaaaaatggtagtaattgagcagaaaaaaaattactctaatttatatgtgtattgattggtaaccagatttatctaagtagaactgaattggctaggaaaaaagaaaaactacatgttaatcgttttcctaagctgtctttttgaggtttagtcattgggaaaatgtttaggattattccttgctattagtactcattttatgtatgttacccttcagtaagttctccccattttagttttctaggattgaaaggcttcttttatacattattcatgtgtgttgtcatatttggcttttgctatatactttaacttcattgttaaatttttgtatagtttctttggtgtatcttaaaacctatttttgaaaaacaaacttagcttgataatcatttgggcagcttgggtaagtatgcaacttacttttccaccaaagaactgtcagcaactgcctgtttttctgtgatgtatgtaccctgttgacttttccataaattttttaagagtttgagttaatattgaatttaattagattttctgattaaaggtttttttttttcttttttaataaaacacatctgtctggtgtggtatgaatttctgaaaaaaaaaaaaaaaaa

SEQ ID NO: 2707 - DNA, 736 bp, Macaca Fascicularis
  misc_feature (1)...(736): n = A,T,C or G
gtgacgaaattcgcatacataagactataacataaatcatatttaatatattaaaaataatacttcaaatatatctttcacattaagatgattatctattatgtaaatctttcctaggtgtgtgtgtctgtttcttgatgtataaaccaaaactctgaaatattctcttgatctaacttcgtcttttaaaaactgacattgtattgaattgattctcaatcagaaaaaaaattgctgtcagactgcagtgcgagtctgcctcaacgaaagcaggaggagggatggttggaagtgcctcaggacactctgaaagtttagcaagcttatcagggagtcctcaaaccaaagnnnnnnnnnnnnnnnnnnnnnnnaactattctgtctgtgtattatatatatttactaccaaacttaataaacaaaaaccacttttgaaccaggtaattttatgtagtatgaaaagaaannnnnnnnnnnnnnnnnnnntagctaatgctatctaaaagtagacatcaaaatatttcataattggagggaatctttggagattagtggtttctaatctgggggcctcagacacccaaaatctatatattgaccagtggaagttgatgatttattatcaaacttgaaagcacctaatggaaaccccacttcatctctgtgaagattttcagttcctttgcagttatttgaaattatttcaattctgtggggccgcttnnnnactccatgg

SEQ ID NO: 2708 - DNA, 762 bp, Macaca Fascicularis
  misc_feature (1)...(762): n = A,T,C or G
ggcattggatacgaagatagacatggttagtcatgcnnncatgatnnngcacttccctaacataacaagatgagtaagctgtgggattgttctggcaatggacaacagcagcgctcgacaagtggatttagaatgaatggatggatgataagagttttaacagtgagaatagagaagatacctctcttnnnnnnnnnnnnnnnnnnnncagagaccaaggcagtcttcattactgtccactctgtgactattaggcctctctatggctaacagcaggcctggcatcttatggtaggttttaccgcttctcgccaatctttcactgagaagacttttgaaggnnnnnnnnnnnnnnnnnnnnnnnnnnnnnnnnnnnnnnnnnnnnnnnnnnnnggtatacgcttctgaaatgccctctcatctgctgccatgtcttctgtgattacagacagattggtagtttaaagttcttatacaaggccaggcgtgnnnnnnnnnnnnnnnnnnnnnnnnnnnnnnnnnnnnnnnnnnnnnnnnnnnnnnnnnnnnnnnnnnnnnnnnnnnnnnnnnnnnnnnnnnnnnnnnnnnnnnnnnnnnnnnnnnnnnnnnnnnnnnnnnnnnnnnnnnnnnnnnnnnnnnnnnnnnnnnnnnnnnnnnnnnnnnnnnnnnnnnnnnnnnnnnnnnnnnnnnnnnnnnnnnnnnnnnnnnnnnnnnnnnnnnnnnnnnnnnnnnnnnnnnnnnnnnnnnnnnnnnnnnnnnnnc

SEQ ID NO: 2709 - DNA, 1981 bp, Macaca Fascicularis
acactaggcccgcagctcccttctgcgccgcagaccccctgacatcgcacccggtgctcaggcagcgggccccagatcccgggttcggcgcgccgtcgtcggcttccggacaccacaacttgcgcccctctctgggaccctgctcccgggctctggaccccaggtgaccctaggtccccagccgccggcgaaccccatggccccccaggggggtgaggtaggagcagcgtgagtacccctagaaggtgccccgtccacgcccctccgggctgcgcggcgggagtcttcggggagctatgctgagaccgggtggtgcggaggaagctgcgcagctcccgcttcggcgcgcccgcgccccggtccctgtgccctcgcctgcggcccccgacggctcccgggcttcggcccgcctaggtcttgcctgccttctgctcctgctgctgctgacgctgccggcccgcgtagacacgtcctggtggtacattggggcactgggggcacgagtgatctgtgacaatatccctggtttggtgagccggcagcggcagctgtgccagcgttacccagacatcatgcgttcagtgggcgagggtgcccgagagtggatccgagagtgtcagcaccaattccgccaccaccgctggaactgtaccaccctggaccgggaccacaccgtctttggccgtgtcatgctcagaagtagccgagaagcagcttttgtatatgccatctcatcagcaggggtagtccatgctattactcgtgcctgtagccagggtgaactgagtgtgtgcagctgtgacccctacacccgtggccgacaccatgaccagcgtggggactttgactggggtggctgcagtgacaacatccactatggtgtccgttttgccaaggccttcgtggatgccaaggagaagaggcttaaggatgcctgtggagaaatgggcctgagtgagtcaggccaagagaatgtcttccttcagagtggagtcaactggataactgatgagccaatggtaggattaaggagggggaaatgggaggggaagagaagagctgacatcttgaggaaagctttggggtagtggagaggtaagggggtcatggttagtctgaactcaacgatagggctgaatgaatttaccacaggaggctgccttatattatatgccaagctgctggggaaagactcaggtcctagccagcccctgttctcacaagaacatgcaggttaccacataaacaatggcataggccttccatgggaagtcaacgtgacttaaatctacctatgccctattatctactttttggttctctttcctgtggaaggaaatgggcctcttctggcatctcatgctactctgtgcttttccttgggctccagattctagctcataaagatgcaagttttgcaatttcctataaatggttaagaaaagagcaagctgtccagagagtgagaagtttgaaaagcgaagtggataagtgagagaaatggtgtccatttgagccccactacagaggttatgtggcccaaaaaggaatgatggccaagcaattaatttttcctcctagttcttagcttgcttctgcattctgattggctttagacaactggcatttagtctgcattacacaaacagacactaatttatttggaacaagcagcaaaatgagaactttatttggtgcagtcagggctccatttagttccctcactctgcttctaatcactacttctcccagccctctatttgatagaggtctgtccctcagatcagcaatgtcttagcccgtctcctctcttccattccttcctgttggtactcatttcttctaacttttaataaacgtttaggtataataaaaaaaaaaaaaaaaaaaaaaaaaaaaaaaaaaaaaaaaaaaaaaaaaaaaaaaaaaaaaaaaaaaaaaaaaaaaaaaaaaaaaaaaaaaaaaaaaaaaaagaaaaaaa

SEQ ID NO: 2710 - DNA, 352 bp, Macaca Fascicularis
tgtgggagagtgagacacaagattttcacacgctttctttgtgagacgaaaagacccgagactttttttgcaaaaacacacgaaaatgtgtatatgctcgtagagacaaaatgaggagagggggagaacaccccccacccgtgtgtaccacaagactcttttccacgcggacacgtgtgccctctccacatatatttctcgttctggggagaggggggggggagatgtctatatctgtgtctaaatcacagggcacagagaggtatatttttctctccccataacacaaagagcacgagaataaaaatacactttcaaaaaataatcacgagagagggagaagagaaaaaaa

SEQ ID NO: 2711 - DNA, 700 bp, Macaca Fascicularis
  misc_feature (1)...(700): n = A,T,C or G
gaggctgtggttcggcttcctaggcaggttatgggtttctggtcagggtctattgnnnnnnnnnnnnnnnnnnnnnnnnnnnnntatgttcagtctcttgaaaggaagggtattgactctgagaggggccgccatcactggaatgggggacacacagcacttcctccagctgcctacacccccctggggtcagtggtgcctgcctgtgagggtgagcccaatggctagagagctctgctccaagtcattgcttaccacacccacaaacattctttgttctttaaggcctaatttaaagcccctatcctacaggaaaccttgattagacccctctctttattaagcttcctaaatttctatggcttacttcaaaccctgcttttgtgtaaatgctgacctccttgcctacattttaaaaacctagagctggcatgatgnnnnnnnnnnnnnnnnnnnnnnnnnnnnnnnnnnnnnnnnnnnnnnnggaggattgctagaagccaggagtttgagaccagcctgggtaacacagctagaccacatctcttaaaataattaattcnnnnnnnnnnnnnnntatgtgcctgtagtcccaaatannnnnnnnnnnnnnnngtgaggatctctgagcccaggaagtcgaggctgcagttagctatgatctcaccactgtactccagcctgggtgacagagcgaaga

SEQ ID NO: 2712 - DNA, 685 bp, Macaca Fascicularis
  misc_feature (1)...(685): n = A,T,C or G
cagttgccatggcnnnaatagaatgcacagcttacnnntaactttccgtgcagtatagcataaggatttttgacttgaaacaaccaaagaactcctccataacgagacagttcaaattcccgaattagtatttcttgactatcaacttaaagaatggacttcctaggacaatgttgcactttttttttttctgaaataattctgcccgcatgtgtgtgttgtgttttagcttctccccttaccccaccccaaagaacttttcttcctaatggttaatgtctcaactcggttactgtttactatcagatggtttttcattagtgaatttagacctctttgagaaagcttgtatataaaaagttaacagatatattttatggaaaaacccatcttattttcaaatatatttaactgctgttatattttattagaggaaggttgtaaatattttctaggagttctattgtaaagaaaagtatttttgaaaaaaattaatgtaataaaaaggaaaacatttttaaatagtggttgtgattgcttcctgttctggcttcgttatgttctattctcagcagatgaattgcatgccttccatatcaggatgtaatttattcaggtttgcactattataagttgacatcataatatctagtgtgcttaactgtattttcctggaatgcaagtc

SEQ ID NO: 2713 - DNA, 618 bp, Macaca Fascicularis
aaatgaaatctgttgcagaaagccaccaatcagaggctaaagtgaagttaccaagttgcacttctatggaaagacttgtcctcctatccgaagcttcaattaatttacaagggtacagtcctatgcaaattctgattgattagaaaaagccaatcagaggtactttcaatttcccatctgccatgcagaagtgggggtttgcaaagggagtaagacttcctaattccaggaagaaagtgtgaaatggcctccagaccctattctcctgcctcaattgtatcccgaaagtaaagtgttttttctttttgaaatggtgtctcgctatggtgccgaggccggagtgcagtggaacaatctctgctcattgcaccctctgcctcctgcgttccaatgatctcctgcctcagcctcctggggtagctggaattacaggtaatctgccaccctgcccatctaatttttgcacttctagtagagacgaggtttcaccatgttggccatgctggtcttgaactccccacctcaggtgatctgccaacctctgcctcccaaagtgctaggattataggtgtgagccaccactgccggtcctgaaagtaacatactaatgtcttatat

SEQ ID NO: 2714 - DNA, 802 bp, Macaca Fascicularis
  misc_feature (1)...(802): n = A,T,C or G
cataaagagagnnnnnnnnnnnagagatgnngaggctgctaagcatgacagaggctagagaaagtatccacaggcagttgtgttcccagcagttcctcccnnnnnnngcatggttcacaccannnnnnnnnnnnnnnnnnnnnnnnnnnnnnnnnnnnttccacccaggggactcacagaagccagtaaagagaccaggagccacctcaatcagcaggacagcctcactgcccctctcgcagactcccctttgcctgtcctgaatgcacagtctccctgctcatccccttcagccccctgcttnnnnnnnnnnnnnnnnnnnnnnnnnnnnnnngaggaagggacagcaggaatgaggtggggagggcggagggagcgggcaggctcggcaccggccctcgcagccccagcccggccagcctgagcttgctgccctcggcagagacagaggcagcgtttgcatgggaggtgtttctgcctgccctgcctgatgtccctggtggagcaggtgcctccgggcgggcaagcctctaatttgcacacctgaaaatcgcggaattgagtttagatagattgatttttaaaacttgtttttggagtagggggcataggggaatcatttaatttaaatcattaagattcccctgctcagacccagactcctgtgtacagatgctatttagagggaatcagaaaaatgccaagccttttttctctttgaatgtgctgtctatttttataactgaacttgtccatatgtatacaagagagacacatcttccttttnnnnnnnnnnaaaaaa

SEQ ID NO: 2715 - DNA, 626 bp, Macaca Fascicularis
  misc_feature (1)...(626): n = A,T,C or G
attattacttgagcacaagtgtaacctaaatatttctatannnnnnnnnnnnnnnnntttnnaaagaatgccaaaagtgtaataaggtcataattgcatttatcatgaacactaaaaatgtacacattttagttaatgtgcattaaactgtaacaaggctctggcaattnnnnnnnnnnnnnnnngctccccaaagtgcatgagacacatgctaaaattacaaattaaaattttgggtcagactttgccataatgctggactcaatttagctctttgaactagttggtaattttttttttttaaattcccactttggctgtgtacatcaaatgaaatgagaattgtgtatgttgaccaaaccacaagaaactttaagttgtgttaaagagggaagacctagaatccaagcatgttacgtgaaaattgtaacagaacagctgcttccacctttcagatattgatgttggaaccacagcagaagttatagaatgacaacttatatacacatctagaatgtaagttaaacaaaataccggcttccagagacccattttctccagccatattacataaggctagaagtaattaattttgtaattatttaatctacaannnngtgcatgtg

SEQ ID NO: 2716 - DNA, 752 bp, Macaca Fascicularis
  misc_feature (1)...(752): n = A,T,C or G
atgtatatacattttgctaaactcagatttttagcctaattcttgcccttctatccacctgcatctgcacatggcctgcatggggctgcctgccctgcagtgttcnnnnnnnnnnnnnnnnnnnnnnagctgttggtggacagcctcaggtcctgggggcactgtagccactaaatgaggtgtgaaaggctcaagagggcgaccagnnnnnnnnnnnnnnnnnnnnnnnnannnnnnnnnnnnnnnnnnnnnctggtcaagtcttggaactnnnnnnnnnnnnnnnnnnnnnnnnnnnnnnnnnnnnnnnnnnnnnnnnnnnnnnnnnnnnnnnnnnnnnnnntgcaaacatactgcttaactactgacaagacactggcccatacgctgctgttcaaactgggttctagctttgaagaacaaaagtgctaaacatttccttgaatatattcttcctctttttgtnnnnnnnnnnnnnnnnnnnnnctcttatcacacgtagaacaactcgtttcttttccatctattcaagtgtgtttctaattctaaaatgctgatcttctctggagtctgtggtaggcaattccggtcactggaatagtttatcttgttttnnnnnnnnnnnnnnnnnnntacaacagcatccaannnnnnnnnnnnnnnnnnnnnnnnnnnnnnnnnnnnttaggccttttgtgtataccattacaatatggtggggtaagacactctacaatggcctgtgctgagct

SEQ ID NO: 2717 - DNA, 339 bp, Macaca Fascicularis
acatttagcagttttgctgcagcccttttttttctttggggtctgccttgatgcccccaccaaggttggactctgatgccactgtgtgatgctgagcaagtgcctcacctttcggagtctctgctttttcatctgagaaatgggtctgtggaggctgttgtttcaaggcctcagcggatgatatgcagaaccacataaatatcaggtacaccgtatctgggtagcaggtgcagcgctcattaagtggggggacccacatggaagggattaatatttttcaggggacagatcttctaagaataagaatggagccaaggtttgctggacacttaacattta

SEQ ID NO: 2718 - DNA, 687 bp, Macaca Fascicularis
  misc_feature (1)...(687): n = A,T,C or G
gagttcatagtggtgagnnnnnnnataagtgtaatgaatgcgacaagacnnncagtngcaggtcatcncttcattgccatnnnnnacttcatagtggtgagaaaccttacaagtgtaatgagtgtggcaataccttctgtcactggccataccttatataccatattagacttcacactggagagaaatcttacaaatgtactgtttgtgacaaggcttttgtgcgtaattcactcttggcaagacataatagaattcacactgcagagaaaccctacaagtgtaatgaatgtgggaaggtttttaatcaacaatcacacatttcacgtcatcatagaattcatactggagagaaacattagaaatgtgaagagtgtgacaaagttttcagttggaaatcacaccctaaaagacagaattcatactggagagaagccatacaaatgtaaggtttgtcacaagacttttgcgagtgattcactctggcacaacatactggaattcacactggagagaaacaagtgtaatgagtgtggcaaagcccttagtggacactcaacacttattccccatcaggcagttcatggtatggggaaatttgactaatgtaatgattctcacagtcttcagtaacgctaaaaccattgcaaatcatttgagaacccataatgaagggatatcttataa

SEQ ID NO: 2719 - DNA, 696 bp, Macaca Fascicularis
  misc_feature (1)...(696): n = A,T,C or G
cannnnacagagacatgtnagagcctttgaagatgaggagagagtgcaagaaggctgggggccatggaggagaggcctagagtttcgcttgggacagagagcagagcacactctggcctcatccctcccaagatgccagtgagccacgtccatgcccattccatgcgaggcagatattccagacacgttaacagaacactctgagacagctgaagaagaaatagtacaaagcaggggtactcccttcacagccgatggttaacattccaccttctttctagcccttcaaaggtgctgccagtgttcgccctagagttgttacaaagccagtgccaaaacccagccatgggctctttgcatcctcccagctgtgctcattccagctgacagtgagatgcaagcaaatgctcagcccaccttgccctgaaggggtctccctggaatggaattccccctggcatggtcagtcctcaggcccaagactcagacccctgtgttctgtgggtgaataactgcccaccaaccagagtggaaaacccagaaagacgggccttccacgaatgcttcattccagagggaccagagggcctccctgtgcaagggatcaagtgtgtctggcttgggttttcaaagagggatcctcatggcctggtggtctatagcctgggtcaagatgagggtcttttagtgttccta

SEQ ID NO: 2720 - DNA, 674 bp, Macaca Fascicularis
  misc_feature (1)...(674): n = A,T,C or G
caactaggaaacagaacgtgggcagagacatgaccaagccatcnccagccccaaacactgaccgccccatctccctttctaatgagaaggactttgtggtacggcagaggcgggggaaagagagtttgcgtagcagccctcacaaaaaggccttgtaacggggcaggccccggggcaggactgtggagacccgtcctgaacgggcgactgtcttgactacctttcaaaaccagcactgtgtgggaatgtccgccaggcagagctcggagcctcattgagaaaggggagagagaaagacaaagagaggaccttcttccagatgccttcccagttgtaaccggtaaaactgttaccagatagtgtttgtacaaaagcaacaacaaaaaaaaaattacctttacagttgagggttgttgaggaaaaagattttctctgtaaatatatacaccgtgtttggtttgggatgtagagtctatacttggctgctgattgcgtcgtttactacagctttttttaaataagatttttgatttaccatttatcataatgtagtaatgaagcaaagtggtcaaaactgggtgtgtgtgaccagagatacacccatattcgtgtatatacacatccacctacatgttttggtctgtggtttaagagactatttcaaggttccattt

SEQ ID NO: 2721 - DNA, 743 bp, Macaca Fascicularis
  misc_feature (1)...(743): n = A,T,C or G
tgtgggcgtgttttgccggtgcttgtaagtgcaggagaacatgtcacctgaggctnnnnnnnnnnnnnnnnnnnnnnnnnnnnttcttgttggtattcctccnnnnnnnnnccnnnnnnnnnnnnnnnnnnnnnnnnntatttattgggactgtcnnnnnnnnnnnnnnnnnnnagtnnnnnnnnnnnnnnnnnnnnnnnnnnnnnnnnnnnnnnnnngaaaattctccgaatgcttttgtttttttggctgcttggaatttacttctgccacctgctggtcatcactgtcctcaccaggcggattctggctccccggtacctcatggctcaaactaccactcctcagtcgctatattaaagcttannnnnnnnnnnnnnnnnnnnaaatacaaaagaaagttcagtatgttttcatttctgtagggaaaatgggattgctgctttaaatttctgagctaggattttttttggcagctacagtattggtcactattgtaaaattatctttgtttctctctgtaaatacgcacctgctaacattacaatttgtatttnnnnnnnnnnnnnnnntttggtgaagagctgggaaaggaatttttagctcttaaaagcatttgctttgagaccacacaggagtgtctttccttgtaaaacagtgatgatnnnnnnnnnnnnnnnnnnnnnnnnncaatgttgtgtgaagggatgaagactctaaaaggcttcataagcccttggaga

SEQ ID NO: 2722 - DNA, 697 bp, Macaca Fascicularis
  misc_feature (1)...(697): n = A,T,C or G
nnnnnnnnnnnnnnnnnnnnnnnnnnnnnnnnnnnnnnnnnnnnnnnnnnnnnnnnnnnnnnnnnnnnnnnnnnnnnnnnnnnnnnnnnnnnnnnnnnnnnnnnnnnnnnnnnnnnnnnnnnnnnnnnnnnnnnnnnnnnnnnnnnnnnnnnnnnnnnnnnnnnnnnnnnnnnnnnnnnnctgacctcgtgatccacccgtctcggcctcccaaagtgctgggattacaggcttgagccaccacgcccggccgggggtatcagttttacatgaggatgtatgaaacttcccagctcaggaaatcacagagcaagtcctgcagatagggaaggaaacctcccccgcccaatggggcagatcctttaaagaactaagcccaaaggatcagaaacatgcttggtttatgaaggatccaccaaatacattggggacccgatgctcgaaggccatggcttataattctattaaaaacataagaatttatgatgaaggaaggggtgggagcagccagttaactgaactagtagccatcctccaagctattcaagaggaggccagagggatttgtcacttgtataccaactcggtctgtagcaaatggtcttactacctggataccccaatggtaacaaaacaaatggttaattgggaataaagaggtttggggaaaagaatactgggaagatatctgaatcct

SEQ ID NO: 2723 - DNA, 693 bp, Macaca Fascicularis
  misc_feature (1)...(693): n = A,T,C or G
cacccaggatggagtgcagtggcgtgannnnnnnnnnnnncagcctcaacctctcggnnnnnnnnnnnnnnnccacgtcaccttctgggtggctgggactgcaggcacacgccaccatgcctggctagtttttgtagagacgaggtttccccatgtagtgcaggctggtcttgaactcacaggctcaagtgatccttttacctctgcctcccaaagtgttggnnnnnnnnnnnnnnnnnnnnnnnnnnnnnnnnnnnnnnnnnnnnnnnnnnnnnnngtgtggattcttgggtctgaacccagacctatggagtcaaacagtaggtttggggtccnnnnnnnnnnnnnnnaacaagccatccaggtgtttctgatgcacagtaaagttgggggccactggtgtagtagctttggtatggcaacttttccatcacttgttttatgtagtnnnnnnnnnnnnnnnntgaaaacataatgaatgttggaaatgaaacagtaaaaataatgaaagccaactcttatgcctggaaatatgtgcacctatgaccaagtccgtgaattatacagaaattatgtgattatgagtgatgtacttcnnnnnnnnnnnnnntacacttgtttactttgtatgtttgcaggattaaactttgtataatctttaaaaaaattttttttcactatacaaggtgcaag

SEQ ID NO: 2724 - DNA, 759 bp, Macaca Fascicularis
  misc_feature (1)...(759): n = A,T,C or G
tgcagaccaagaattacgacatcggggcggctctggacaccatccagtattcaaagcactccccgccattgtgaccgcttttacccacctcttctgtgtccccctcttctgtctcgtagctgttaagctagtgtagaattgcaggtctctgtacgggccagtttctctgccgccttccaggatcaggggatcaggggttagggtggaagaagccatttagggcagcaaaacaagtgacatgaggggagggtccccgtgtgtgtgatgtctgagaagcaagaccggtctcctgggtgctctggttccctgcagcagggctgggcctgcgagacctgaggctcaccgcagcgctcctggcccctccctgcaggggccacattagcagcccagacatagcttgcctaatggccttccactttctctttttaaatgactcagagnnccttgacatttagttgattttctgctagagacctggtacgctctgattttagataaaggaagcctaggtgttgttggcgggtaagcannnnnnnnnnnnnnnnnnnnnnnnnnnntggggaggccggggcagccagtgtggtgggcttcctgctgggactgagaaggctcatgcagggcacccgtaatgttggtttcgctgagagctgcctcctggtctctccaccactgtagttctctcattgccaaaccatcagctgcttttaaaataagatctctttgtagccatcctgttacgtttgtaaacgatctaattaa

SEQ ID NO: 2725 - DNA, 851 bp, Macaca Fascicularis
  misc_feature (1)...(851): n = A,T,C or G
ggaaactggaagctaaaaatacagagggtgacacagaaacacgcagacaccattctaaagaaagtagtgatcatgtattaaatcgaacagaattctcacggattttactattcctgttataaactattatttgttgtttagccaaaacagaaaatgatttccactggacagtagaaaaatatgtgtaaaatagggaagaaagttagtattggatcagtgcgagtcctgaagcactttcagtgctctgagaacgacatccagtgtgggtttcattcatttataagcagaagagctgtcagtctctcgtgcctctctgtggcctccaagccgtgctgtcgagtaaagagcagttcttgtttgttacaacctttgnnnnnnnnnnntgcctgcagagtgtgctgtgttttagtcctggtaggaatatataccagagttcccactacttaaaacccaacagcttcnnnnnnntattgcccgnnnnnnnnnnnnnnnnnnnnnnnnnnnnnnnnnnnnnntctttccactggatgcatttgtgatttgtaaccattacggtttaaatcatcgtttaagaattttcccaaataacagaaattttgttcgggaagggataaactaggtatagcatatagagcctgtctttgagttttagacactttatttgtaaataacttaaaatagctttctgaaaccgtgcattctacaatttcttcctttcagtgaaattattcaatgttaatgtatttttggcgctgcgattttaaccatttattaaataaaaattttgttaaaaaatgctcaacatcactaacagtcagggaaatgcaaatcaaaactacaatgcaataacc

SEQ ID NO: 2726 - DNA, 757 bp, Macaca Fascicularis
  misc_feature (1)...(757): n = A,T,C or G
aaataaggcagaatgattgttgtngnnngctcaaactgatacaagtncnngaaaccatgattggcatatgttagataacaaatgaggatgtctaagnnnnnnnnnnnnnnnnnnnnnngtagtgaacgtgtgtacagaagttttcaatcttaactatatagtgttagtgtgatgctatactattggaaaaatagcaacttttttctattttataagttgtatgcataaacataagatttgtaatgtttcatttataaactgccttcttcaacacatgttaatagtgttttctcaaagtattgnnnnnnnnnnnnnnnnnnnnnnnnnnnnnnnntacagtaaatagttcctagcttgttgaaatgttaaattctttgttggctttctttttgattctgtgggggtgtataacaagcctgaaggacattgtaatcatttcttacagggtgaaaatttagaaagattgtgtatgagagcctatatagttgttttatccattatcatctttgattaagacttaaaaaaaatgctatttccagttaatgcatttnnnnnnnnnnnnnnnnnnnnnnnnnnaaaacattaaagaacaagttnnnnnnnnnnnnnnnnnnaccaattaagcttgagattgttctgaaagtatcagttgctttaaaacnnnnnnnnnnnnnnnnnnnaagatctccaagctgaaacttccatgttaaaattttgccnnnnnnnnnnnnnnnnnnaatgttaannaaaacacaaa

SEQ ID NO: 2727 - DNA, 700 bp, Macaca Fascicularis
  misc_feature (1)...(700): n = A,T,C or G
cccggcccctgcattgannnggctcgggctgcgcctcactgcgcctgccaactgtcacacgctccgaggctgtcaacagcggggcgccagggacaaacaagccgcggnnnnnnnnnnnnnnnnnnnnnnnnnnnnnnnnnnnnnnnnnnnnnnnnnnnnnnnnnnnnnnnnnnnnnnnnnnnnnnnnaagtcaagtcgaagtacaatattgtattttaaactgtctgttcttattacatccctcataatccacgctctacttgaaacttccagtgcataccaactgcacttagaaaaaaaaaatgaaactccttgcctaactctgggacctcatcagnnnnnnnnnnnnnnnnnnnnnnnnnnnnnnnnnnnnnnnnnnnnnnnnnnntcgccaagttccatccatcattgttaatcattccttttgctcgctcttcgcacaagagccatttcttnnnnnnnnnnnnnnnnnnnnnnnnnnnnnnnnnnnntttaagtctcagctcagatgtcacctctgcaaagaaccnnnnnnnnnnnatacatctaaaatagccacactctataaagacttggccttgctttatttccttctcagccctcatcactgtctgaaacaacgttttggatttgttgtttattatcagtctccctctcaagaatgcaagctttgtgagggcagggtcgtaatcctttttaa

SEQ ID NO: 2728 - DNA, 179 bp, Macaca Fascicularis
  misc_feature (1)...(179): n = A,T,C or G
tggtgacaaaaatttaaccttgcttttttgatatttgcttgttcttttgattttaggttggttgtggagctggaaatagtgtgtttccaattttgaacactttgcagtgagttttaagagttttctttctacagaattttnnnnnnnnngggaggtcgtcaatttatggggaaatgttg

SEQ ID NO: 2729 - DNA, 754 bp, Macaca Fascicularis
  misc_feature (1)...(754): n = A,T,C or G
agctgctgacgtgaagatgagcagctcagaggaggtnncnnnnannnnnnggttctnnnnnnnnnnnnnnnntgaattcttctgtgaagtggatgaagactacancnaggacaaatttaatcttactggactcaatgagcaggttcctcactatcgacaagctctagacatgatcttggacctggagcctgatgaagaactggaagacaaccccaaccagagtgacctgattgagcaggctgccgagatgctttatggattgatccacgcccgctacatccttaccaaccgtggcattgcccagatgttggaaaagtaccagcagggagactttggttactgtcctcgtgtgtactgtgagaaccagccaatgcttcccatcggcctttcagacatcccaggtgaagccatggtgaagctctactgccccaagtgcatggatgtgtacacacccaagtcatcgagacaccatcacacggatggcgcctactttggcactggtttccctcacatgctcttcatggtgcatcccgagtaccggcccaagagacccgccaaccagtttgtgcccaggctctacggtttcaagattcatccgatggcctaccagctgcagctccaagccgccagcaacttcaagagcccagtcaagacgattcgctgattccctaccccacctgtcctgcacttcctttcctttttgccaccctttcaggaaccctgtatggtttttagtttaaattaaaggagtcat

SEQ ID NO: 2730 - DNA, 2416 bp, Macaca Fascicularis
aagccaggagggcttttggggaggggcgcagcccctggcagactgacagtgtggcctggggatttgggggtgccaaggaagcaggggccaacctcgtaggaggaggcacgagtgcggttctctttcccccactggggggcctgctgtgtcggcggccaggcgggaggcctgggcggcagagccagtggcgcaggggcctgggcagggcggtgtctggcagcgggggcaccatggctaccacccagtcagagaccgactgctacgacatcatcgaggtcttgggcaaggggaccttcggggaggtagccaagggctggcggcggagcacgggcgagatggtggccatcaagatcctcaagaacgacgcctaccgcaaccgcatcatcaagaatgagctgaagctgctgcactgcatgcgaggcctggaccctgaggaggcccacgtcatccgcttcctcgagttcttccacgacgccctcaagttctacctggtcttcgagctgctggagcaaaacctttttgagttccagaaggagaacaacttcgcgcccctccctgcccgccacatccgtacagtcaccctgcaggtgctcagagccctggcccggctcaaggagctggcaatcatccacgctgatctcaagcctgagaatatcatgctggtggaccagacccgctgccccttcagggtcaaggtgattgacttcggctctgccagcattttcagcgaggtgcgctacgtgaaggagccatacatccagtcgcgcttctaccgggcccccgagatcctgctggggctgcccttctgcgagaaggtggacgtgtggtccctgggctgtgtcatggctgagctgcacctgggctggcccctctaccccggcaataacgagtacgaccaggtgcgctacatctgcgaaacccagggcctccccaagccgcacctgctgcacgccgcccgcaaggcccaccacttctttaagcgcaacccccaccctgacgccgccaacccctggcagctcaagtcctcggctgactacctggccgagacgaaggtgcgcccactggagcgccgcaagtatatgcttaagtccttggaccagatcgagacagtgaatggtggcagtgtggccagtcggctgaccttccccgaccgggaggcactggcagagcacgccgacctcaagagcatggtggagctgatcaaacgcatgctgacctgggaatcacatgaacgcatcagccccagtgctgccctgcgccaccccttcgtgtccatgcagcagctgcgcaatgcccacgagaccacccactactaccagctctcgctgcgcagctaccgcctctcgctgcaggtggagggcaagccccccgcgcctgtcgtggctgcagaagatgggaccccctactaccgtctggctgaggagaaggaggctgcgggcatgggcagtgtggccagcagcagccccttcttccgagaggagaaggcaccaggtatgcaaagagccatcgaccagctggacgacctgagtctgcaggaggctgggcatgggctgtggggtgagacctgcaccgatgtggtctccgacatgatggcccccctcaaggcagccatcactggccgccacatgcccgactcaggccccgagcccatcctggccttctatagcagccgcctggcaggccgccacaaggcccgcaagccacctgcgggttccaaatccgactccaacctcagcaacctcatccggctgagccaggtctcgcctgaggatgacaggccctgccggggcagcagctgggaggaaggagagcatctcggggcctctgctgagccaccggccatcctgcagcgagatggggatgggcccaacattgacaacatgaccatggaggctgagaggccagaccctgagctcttcgaccccagcagctgtcccggagaatggctgagtgagccagactggaccctggagggcgtcaggggcccacgggctcaggggctcccaccccgccgctcccaccagcatggtccgccccggggggccaccagtttcctccagcatgtcaccgggcaccactgatggtgattccacccctgcccatcactgagggctgcgctagctgagctggcatcccctcccaacctgaactgctcctcagagccatctcccgaacccacaaattattcttacagaaagatagttatctggaaattcccattccccgtctgcggtgcggtgcgtgcctgcacacttctcttaaacacagcagagctttggagtctggcccatgctccttggccagagggacagcaggaagggggggctgcaccccgctggccctgcgaccgccctcggccctgctgcctctgtctgtttcaatatagaactgttcagcaaaaaaaaaaaaaaaaaaa

SEQ ID NO: 2731 - DNA, 525 bp, Macaca Fascicularis
  misc_feature (1)...(525): n = A,T,C or G
accnnnnntgctttctagattcttttcnnnctatcaggcannntgtccaaaaaaaacaaaaaaaggcagtaaccaaagagagtagtggaccagagcgaatagatcttaagtctcaaacgnnnnnnnnnnnnnnnnnnnnnnnnnnnatgctctctcttgctcttcagtgactaattgaggggatgtgattcataaaacagataatcgaatagatcttctccaggattcccaaaatgcttttggcagtgagtaaatacagagtaaacatgtcagtttcttaatgtagacactatgtgttcaattcccaaaattataaaactgaaacccgtgaagcaagaatagatgtgagaaatctatgtaaaaaacaaattaaagaaatgcatgtgtgtaaagtagtaatatgatgattttaggtagtgctttttattttaaaaatggtctagttagtaatgttgtatccttgcctgaatattattctgaattccttttgcatgtttactatttgcaatgagctcaaatgctatc

SEQ ID NO: 2732 - DNA, 2092 bp, Macaca Fascicularis
aaaaaaaaaaaaaacatctttctcatgcatagatttatgatcttcaagcgctctgtgcaatatgcaaactttttttgtgtctgtatatatgctgttgtttccagatttcactacattggtatgctgcttttcccttccccccacacctccccctcacccccagcactatgaaatgcagaaacagtctgatctcaaagtatgctaagatatcactttattctgttttgttatttgggatttgggtctgatctagaagatactagcccttgcctaaaaggtgagtggctgaggatacacaccagggtggtgggagtagagctggtagacagaatagaggacagccctttgctttacatttgcttcccataaagcactatgcaaggtttatgatcttatttgaaaacatattttctctatcattttgtctggtgaaacaactgcctctgaacttctctgtcagctcttcaacagataagggtgcagaagtcatttttattttttttttttttactgaaagattatcatattgttggatttgtatttcaattaggagtgtttattttgcaggaggtagaatcaagtgctaggaaacccagctgcaatttcacaaatgtatcctttcaactttggaactcatctgatatataagggcaaccacctagtgctcacatttttgaccctgcttaccatgcaaaaggaaccccagcatgtttctggaattttagctgtactagagattcatgtgcattttggtagaggacatgttctccagacttatctcatgatgtattgcacccttacatttatagccctgcatttcggtcatcaatgggggttggaggtgtccaagaaagaaagaaaaaaagaagcagaaaaaggaaggcatgcccttaagtgaaatgaacgcgaagaaaactggacatgagctaaattgagctttgtttgctattaaatatatgaatatgattcattctaatttatatgtgctctgatgagtaaacttattaaaatacatatcagggcaccactgcaagacatctattcacaccccccatcatctctttgatttgtgagagatggaaagacacctgcttaggaaagggaggaaaactaacaattctgaggttcagaaatagagattccccatttacaatgataatgttaacatgcacatgggatattcactcttaaataaatgaagaaggatcaaactgaaacatttaaccctcacaaaagccccccccccctttttttgtcaaggttctagattatctgagagtaaaacttctttattcagatcctgttgagatgctgcattctcatatttatgtttataatggaaatgccccagtacatgattaaatcatataaaagaattttgctgttgttgtttagggcagaggaaagagaacagattatccaattctcccggccctattatttgttttgatttttttttttaaatttcccttgtttgggtgttgaacaggaagatcatgtgactctaaggtagaacatttttggagttctgtgtcactagcaattaaagctattaagtatgtggagtgtcataaaactctcatacatgtaaagtgcaatttttatttatgcttttgatgttgatcttttatggacttctcatgaagtatttggaactaagcccaaaggcaataatagtatttgatcacttaaattatggtcaccttcctgttttatcatgaaagaaagtatgttcgtaggcctcaaaatagcttagtttcaaatttctatttttctatggataggatatattggtcacgaattatgattaccaggctctttattgcttccaaataatataaaagccacatttcaaacatattagctacctataatgttaatgcttatttaacaactagggttgaaggggaagagaatgggattgggagctggcaattccaaaaatgtctgttgaagtggataaaaacattttcttctgcattctaaagttatctgataatgtttaaatttcagaaaaaaatacaattctggttattttctaagcaattaaaaaagaatatcaataaaaaaaaaaaaaaaaaaaaaaaaaaaa

SEQ ID NO: 2733 - DNA, 742 bp, Macaca Fascicularis
  misc_feature (1)...(742): n = A,T,C or G
agctgctgtnnnagaatatattgtcagaaacacaaggcttgatttggtcccaggacagtgaaacacagtaataccacgtaatcnnnnccattcattttggggaacagaagatccataactttagaaatacgggttttgacttaactcacaagagaactcatcacannnnnnnnnnnnnnnnnnnnnnnnnnnnnnnnnnnnnnnnnnntgggtannnnnnnnnnnnnnnnnnnnnnnnnnnnnnnnnnnnnnnnnnnnnnnnnngatcctagaccgtaaagacacagaagatgccaacctcacccctgccacctatcccaagacctcnnnnnnnnnnnnnnnnnnnnnnaaatgtttgcaagataggccaaatgagnnnnnnnnnnngtctgtcnnnnnnnnnnnnnnnnnnnnnnnnnactcacgcttcaatccaagacctgaccgctagtagggaggtttattcggatcactggtggcctcggctgagcagatgcacggaggggatcactgcacagtgggaccacccgcactggccttctgcagcagggttctgggnnnnnnnnnnnnnnnnnnnnnnnnnntttagagcaagggctcagaaaacagaaatactgtcatggaggtgctgaacacagggaaggtnnnnnnnnnnnnnnnnnttatgagcagaacaaatactcaactaaatgcacaaagtataaagtgtagccatgtctagacannnnnnnnnnnncggaat

SEQ ID NO: 2734 - DNA, 743 bp, Macaca Fascicularis
  misc_feature (1)...(743): n = A,T,C or G
ctgtccagaatgcagagaaggcttattnnnnnnnnnnnnnnnggacctgcgtgaatacactcaagccaccatctatgtccataaagttgtggataataaaaaggtgatgaaggattcagctccagagctgaatgtgagtagttctgaaacagaggaagacaaggaannnnnnnnnnnnnnnngagaaaaagatccagattttaatcaaagcaannnnnnnnnnnnnnnnnnnnnnnnnnnnnntcaaaattatatagcctatcaaaagcaagttattcgccgaagtatgcgacatagaaaagttcgtggtgagaaagcacttctcgtttctgctaatcagacgttaaaagaattgaaaattcagatcatgcatgcattttcagttgctccttttgaccagaatttgtcgattgatggaaagattnnnnnnnnnnnnnnnnnnnccctaggcacccttggcgtcattcctgaatctgtcattttattaaaggctgannnnnnnnnnnnnnnnnnnnnnnnnnnnnnnnnnnnnatgcaagtttgtatgccagaagaagnnnnnnnnnnnnnnnnnnnnnnnnnnnnntaatctttgaatacttgctgactgctaagaaatgaccagaggggaagaggagtttgacatgttagggcattaaagcaaaggtggatttaagaattaaaccattacatgccccttccaaaaggcagaaatcgattcaaacgtgacttcccaaatgcct

SEQ ID NO: 2735 - DNA, 205 bp, Macaca Fascicularis
  misc_feature (1)...(205): n = A,T,C or G
gcagcgggaggcacaggatagaggaacatatgaagcctctcaagacagatacgtctncgcctaacagagggtcacctggctccccacctgcaaagtcattttgannnnnnnnnnnnnnnnnnnnnnnnnnnnnnnnnnnnnnnnnnnnnnnnnnnnnnnnnnnnnnnnnnnnagtttcagtgaatctataaaaatcagtagcaaa

SEQ ID NO: 2736 - DNA, 812 bp, Macaca Fascicularis
  misc_feature (1)...(812): n = A,T,C or G
agtccgtaaattgattgagactatctaaactcatacctgtgtgannnaagctgtaatgcctgtagctctggttgtatacttntgcttttcaaattatagtttatcttctgtataactgatttataaaggtttttgtacattttttaatactcattgtgaatttgagaaaaaggacatctgagtttttgcatttattaatgaaacttcctataaaaaactgctttgaattatgatctctgatcctctgtccattttactaccgaatattaactaaggccttattaatttttatataaattatattttaaatctagttacaatttatttcatgcataatagctaatgttattttgcaaatgccatatattcaaaaaagttcaaagataattttctttactgttatgttcaaataatattcaatatgtatattatctttaaaaagttaaatgtatttttttaatcttcaagaaatcatgctacacttaacttctcctagaagctaagctgtaccataaatgatacattcatgttcacaagatattaaattaccagtttttaaattattgttaaataaagaacaaaataaagaacaaaatgattcttgtccaaagaaaggcacattttaaacactccttcactctaaaactcgtactattataaattttgaaagttaatatttatatatgaaatgtatagcttttatactctatcctttctagaaaatggtaattttcagatgttaattaaatataatattatatatatatattcacagaaaataaacctaaataatgatctattagattcaaata

SEQ ID NO: 2737 - DNA, 712 bp, Macaca Fascicularis
  misc_feature (1)...(712): n = A,T,C or G
acaacttggatnnnnnnnnnnnnnnnatcctgggctcccacagtctcctctgctaccctccacacccccacccctctcttatggcacttgtcacaccctaccatagctgtctctctagaattatagaaggctccctgaaggaagagaccatcaactctgcacgccctttaaagtagcaaatatgaacgaaaaaatagtaaagcccactnnnnnnnnnnnnnnnnnnnttnnnnnnnnnnnnnnnnnnnnnnnnnnnnnnnnnnnnnnnnnnnctgagtacttgaactcaaagtgaagcaaaatatccagtccctgtgtctcccgctcctcttcctcccttgaagcacatcagagaaaacagaattcctgttccccaaagcacgtcatagaaactagaacctctctccctctaagtcagccataaaatctagaaaggttacactttcccttttcccttgccccttgaagacttttatcccagaggggtcctgccccgtatgctggagagaggaatgctgcacaaagagaccaaaaagaatttggacaggctttgctggatctccccgctcagtctgttaccatgaggtcatgcctctttgtccaatcacatctccacacggctgttcattcttcattgaacccaaacacaaaacacagttttctctgggtttttgggtctttatttctgaaggctccnnnnnnntgtaaaact

SEQ ID NO: 2738 - DNA, 3162 bp, Macaca Fascicularis
attttctctcatagcctggcgcttggcaggcaggctggcgttccctggctctgccttccccatctccctgtcttttctcccacggcccatctgcccctcctttcctccacccccttctcctctctgctcccctttatttccactccccacccgcgtggctttgccctccctctcccccctcagctcgtctgtatttggagctccggaagctgccggcgactctcccctggagcagcgtgactgacaccggctcctattcagctgggaggagggagaggggaggagaaggggagggccgcgggaggagggtgcgagtggccgaccacggatttgcattgccgaggactggaccccagggcagcgaagcagaatggccaacatgcagggactagtggaaagactggaacgagctgtcagccgcctggagtcgctgtctgcagagtcccacaggccccctggggactgcggggaagtcaatggtgtcagtggaggtgtggcaccctccgtggaagcctttgacaagctgatgaacagtatggtggccgagtttttaaagaacagtaggatccttgctggggatgtggagacccacgcagtaaatggtgcacagcgctttccaggcccagcggtctttccttctgatggcctctcagtaccagcaaccccacaagaatgatgtggccacacttctgaaacccatatcggaaaagattcaggaaatccaaacattcagagagagaaaccgggggagtaacatgtttaatcatctttcggccgtcagcgaaagcatccctgcccttggatggatagctgtgtcccccaaacccggtccttatgtcaaggagatgaatgacgctgccaccttttacactaacagggtcttaaaggactacaaacacagtgatttgcgtcatgtggattgggtgaagtcatatttgaacatttggagtgagcttcaagcatacatcaaggaacaccacaccacgggcctcacatggagcaaaacaggtcctgtagcatccacagtatcagcgttttctgtcctctcctctgggcctggccttcctccaccccctcctcccccgcctcctccagggccacctccacttttcgagaatgaaggcaaaaaagaggagtcttctccttcaggctcagctttatttgcccagcttaaccagggagaagcaattacgaaagggctccgccatgtcacagatgaccagaagacatacaaaaatcccagcctgcgtgctcaaggagggcaaactcgatctcctaccaaaagtcacactccaagtcccacatctcctaaatctcatccttctcagaaacatgccccagtgttggagttggaaggaaagaaatggagagtggagtaccaagaggacaggaatgaccttgtgatttcagagactgagctgaaacaagtggcttacattttcaaatgcgaaaaatcaactcttcagataaaagggaaagtaaactccattataattgacaactgtaagaagctcggcctggtgtttgacaatgtggtgggcattgtggaagtgatcaactcccaggacattcaaatccaggtaatggggagagtgccaacaatttccattaataagacagaaggttgccacatatacctcagtgaagatgcattagactgtgagatcgtgagcgccaagtcatctgaaatgaacatacttatccctcaggatggtgattatagagaatttcccgttcctgaacagttcaagacagcatgggatggatccaagttaatcactgaacctgcagaaattatggcctaacttcccgagagaccgaactccctcacctgaatccccccctatcaaacaaacaaaaaagcagcagtaaagagctagaagtcgcagtagcacctactgctttagctttggcctccaacaattctgtgctgtagacacagcactgtttctggcacgcctcgtgggcattttgaaatatttaacgtttcctcatgatttgcctttgtgtgtgattttagttccacatgatgacttgtgaacattatggatttaaagggaaaaaaaaaagaattctgttcccctcatatcatgaacacagtaactgatagataaaaagactgcatgattcacttttatacttatatttcattgctagttaaaaaaataaaacctttgagaatctaagatgtacatttttaccttttaggcaatttcaatataatgtagaagtagtagtatgccctgaaaaatgtacacgttttttcttattgttaccacatgttcacctttatcagcgtggatactgtcagcatgagttatttcaacccacacttttaaaagacctaagagtttatattaagaaccaaattcagtttcttggtccttagaagacctatattctctgtagttactgaaaactgaaagtaaattctagttattcatcttacatatttttccaccacgtcatttgaaaacttacttttcttctgcataagagattcttatgccaaaacattaatcagaagaagtcatttttttgctacgtaatacctcgcaactttgctttaaaatcaagctcagttattattttccaagtttgaacatgttaaatatcagatgccttgtaaattatgtctttaatgttttattatagactaatttcctctttttcatctgccagacttgctaactagcctcaaaaatgaacatgaaaaagccatacatgtattatttctccgaaaacctaaggcattatctgttggtttggcttgctgctcctattttgtagtcttgatagtagaagcttctttagcataagagtagctattatattcctttttatcttttcagtacatagtgctgaaaaatctgcaatttcttggatcacatttaatgaattacagtataatgcttggcgggcccagtacaagcatatatagcgtgcctattacagcctttggaatacatcgttttcattttttaaatatcttctatatccatatagtattcgaattattaatgctcatgtaccaaggttttgctatgaaagttttgtctgtatgaataatgtggctttagtaaatcatttttcaactgtaaacttattctgaaataaagtaaaattctaattgtttaaaaaaaaaaaaaaaaaaaaaaaaaa

SEQ ID NO: 2739 - DNA, 482 bp, Macaca Fascicularis
  misc_feature (1)...(482): n = A,T,C or G
aatggacacaggtagcctttactgcagcacctttactctttcggctgtgatccaannnnnnnnnnnnnnnnnnnnnnnnnnnnnnnnnnnnnnnnnngcagtccccctgactttcttcattctgttcttgcgttcctttcgttgctttcttgaggtctttttcttctcatacaggccatgtcttgcaagtctatgtttgggttcatttttctttgcataatccagggagtcataaatcatgccaaagccagttgtcttgccaccaccaaaatgagttctgaatccaaatacaaagatgacatccggtgtggtcttgtacattttggctagtttttcccgaatttctgtcttaggnnnnnnnnnnttcccagggtgaaggacgtcaatgaccatttgtttcctctgaagtagtcggttggtcatgaactttctagtgcggatannnnnnnnnnngttcntgatggctgcctatctccggacag

SEQ ID NO: 2740 - DNA, 2033 bp, Macaca Fascicularis
tttatgtcacttatacaggaggagagcatgcttgcttttcttaaaagcgggatcagtgttgggtcaagttaccacatatacaaagactgtgaacaagtattaacacagatccctgacaaccacagcaaagctcacaaacacctggttggaggtataaaatttggacttggagcattcaatttgatgttatcacttatgccaccaaagacacttaaactactcaatattattggatattctggtgatagagaagtgggcttggctttgcttcatgagagtgcatctgaaacccatataaataatatcttaagtcttttgactctactcttttattacaattatgtctatgtagcttttggtgttgaaaaggtttataattctgctacagaggatctcttcctagtctacctccagaaatttccaaactgtgtcatatttaaatttttccatgcacgttctagtatgctgaaaggagattttgaaaatgcacagttaaaattacaggagtgcatttttactcagaatgaatggaagcaggttcatcacctctgttactgggaattcatgtggtgccacattttactgcaggattggaggcaggcttaccactacgccaatctactgtctcaacacagcagatggtccaaggcaatatacgtgtacagtaaagctatcaccctggctttgcttccttctgattttgtgaaatcagtaagtgaggatatgaactctctcttcttaaaagtggaaagcctgaaaatcaaatttttaggcagtgctgtgccaatagagaagtttgttgcagagaagggtcagcgctatggtactacaacaggctggtttacagcccagccccttctggagttcatatatgcctggagtggtttcctagtcatgagcaaaaagaatgagcttatttcaagctggctgtcaataatcgacaaaggagaagaccttttacaagaaaatccacataaagtgtatggcacagatgacataagtttattaaatttactgaaaggcctatgcctgaaacacttaggcaaatattcaaaggctgagtattactttaattgtgtcattcaaaagaagaaattattaaaatatgaccactatttggtgccatatacttactatgaactgggaatcttacactatctaaaaggagactatgacagtgcaacaaaaaacctagacaacccttagtgccatcttcttggaaacctctgtgccgtgagagccaagtggaggaagacgcgaatgcacaggctgaagtgtaaaagaagaaagatgaggcagaaggccaagtcaaccagtagctagtgtacccagaaacatggaatgccagaggctggagatgctggtacaagttgttggactgcatgctgctgtctaagtggatctagagcttccatcaccatctgatcacggatactacctctgatacccatcttgcttgtaaccaaaacagcccatgttggttctttgccctggaactgtgacattctgtactatttctctgttcccttgtggctgagtataacaagcatacaataaatcacctcttctgctgccttagctgaagaattaaaaaattttttaaaagacaaatttccaaacaatgatgcaccgaatggcacagactctgaatgattttccattatacacaatcatttttattggctttttataccagaggggcttgtccgccctgggtgatcagtagtatttcttacccttttttagtaagaagcagaatgtgagtttataatttgccacagaatagagaagaaagccctctccttcttctacacacacatgaactctttgaagataactgggagaggccaagaagatagatgcagtggcagtcagaggaaaagttttgttaccacgtaatcctccctttacttgtcctccttaaggtgtaattcttaataagaccagcttttcaacataattaaactgatggcatctaaaaaaaaaaaaaaaaaaaaaaaaaaaaaaaaaaaaaaaaaaaaaaaaaaaaaaaa

SEQ ID NO: 2741 - DNA, 1908 bp, Macaca Fascicularis
aaaaaaagttgagaaataggcgagcgggagagataagcaggaaggcccgggtgggcccgggtaaggaagaaggagagagggtcgggctgcgcgctacgcccctcgccgcgcgttaccttccgcggagccctcgtagaagtggccgccgttgagcgccgggccaagcccaaggtcctgcaggaggaagtcaattcaggatacctattctattcaacagagttatcaagcagtttactgtggaggatgcaaatatcacccaggaaaatgtcaccaacaatttaaacaaggcagcctgaatcaaaggctgagtctttgcctcctatgacaaccttgctgaggcacagagagggtaagtaacttgcccaaggtgtggcagagaaggggaaacactcagcaggtaagggattggttcagatgtgtggtgacaaaggcctgcacagatatgtggtcgagagaatggagagggatgcctggagggaagaggtattagagggaagtaatgaccagacttattgccagatccgggtgggatgggggcatgtgtgtgggtgaccagcagcccagagaataggggtcacagaggccccacactggcatcagtggaagggatagcatgtctccagcggacatcatgaatctctcagccagatttctatgcaggaagaagttcttcatccagtattgtgaactgaaaactcaggacactgcactgctgctttcacgatcagcagatgacatctgtcgagactcacatgcctagcttcggccgctggtacagtaggtggagggtggtttctgctaagctgagaccaagtgaaacaaagtgcttaacacttgagaggtttatgaccaacacagccaggtgtggggcagaatttcaagataatttgtgagttcaccattcatgctgttcaataaccaattgaattataacagcatttgtcactgaaaaattgtccgtggagtaagagatgagtggatggcaagatccagataattccaggccctataatgaaaaaactgaacaaaacccctctcctctgctgagaagagctatcttttaaatggaaatgatacttactagctgttttacactggctgaatgtttaattcattcatttaataggagagcctaccatgtgatccccatttgctggtaccaggatacagtggtacacacgacatgtgatccctgccttcacagtgcttacactttgctggaatggaagtgtctcatccacattgaagaaaatcatcatttggatgtgaattagagtagaatctggtcttgtgagaagagtttctggctctgggcctcaactgtaaggtcaattcttcatttagagaaacatcagccacggcaccacattccctttcattctctacttccctcagcctgcaccacaggaaggacaatgcgctcctttcccccccagtggatttccagaagggatcggcacgatgagaaagaggtaacctcagatctgagatttgcttgacatatacaaaacttctttctgacagggaaaactcagttgctttttttttccttcaaaggaaagacatttggtattatgtttgtcctgtttagatactgaaatcctaaattgattcatataaaaattctgggtttgggaacccaagaagattgattctcattagtgacattcttcctggaaggtcaggctgaggaatggtaaataaacctgtgggtctggtgcttcctgctcactcatgatgagagagagtgagagagcaagagggagagcgagagcggagaggagaggaggagaagagaggagagaagagaggacagaggacgggaggagagaagaggggaggggaggggaagtgagaggagggaggggtagggaggggaggggacggaaaggaaaaaaaaaaaaaaaa

SEQ ID NO: 2742 - DNA, 2086 bp, Macaca Fascicularis
  misc_feature (1)...(2086): n = A,T,C or G
aggagagcgtttacggcatgtcattcctggacacatggcgtgttccatggcgtgtggtggtagagcttgcaagtatgagaatccagcccgctggagtgagcaggaacaagccattaaaggggtttactcatcctgggtcactgataatatactggccatggcccgcccatcctctgagctcctggagaagtaccacatcattgatcagttcctcagccatggcataaaaacaataatcaacctccagcgccctggtgagcatgctagctgtgggaaccctctggaacaagaaagtggcttcacataccttcctgaggctttcatggaggctggcatttatttctacaatttcgggtggaaggattatggtgtagcatctcttactactatcctagatatggtgaaggtgatgacatttgccttacaggaaggaaaagtagctatccattgtcatgcagggcttggtcgaacaggtgtcttaatagcatgttacttagtttttgcaacaagaatgactgctgaccaagcaattatatttgtgcgggcaaagcgacccaattccatacaaaccagagggcagctcctctgtgtaagggaatttactcagtttctaactcctctccgcaatatattctcttgctgtgatcccaaagcacatgctgtcaccttagctcaatatctaattcgccagcgtcatctgcttcatggttatgaggcacgacttctgaaacatgtgccaaaaattatccacctagtttgcaaattgcttctggacttagcggaaaacaggccagtgatgatgaaggacgagtccgaaggacctggtctctctgctgaaatagaaaagaccatgtctgagatggtcaccatgcagctggataaagaattactgaggaatgacagtgatgtgtccaacccgcctaaccccactgcagtggcagcagattttgacaatcgaggcatgattttctccaatgagcaagagtttgaccctctttggaaaaggcggaatgttgagtgccttcaacccctttctcatctgaaaaggcggctcagctacagtgactcagatttaaagagggccgagaacctcctggaggaaggggagcctccacagacagtgcctgtccaggtcttggttggccacaaccccaggcagcagaagcgcataagccattgttacatcccacagtcttcagaaccagacttacataaagaagccttggttcgcagcacactttctttctggagtcagtctaagtttggaaggctggaagggctcaaagataatggctcaccaattttccatggacggatcattccaaaggaagcacagcagagtagagctttctctgcagatgtttcaggcccacacagccctggggaaccagtttcacccaactttgcaaatgtccgtaaggatccaaaccctactcaccagcaagtgtctcactgtcagtgtaaaactcatggtgttgggagccctgggtctgtcaggcagaacagcaggacaccccaaagacctctggactgtggctgcagtctgaaagcacagttcttggttgaacatgaaacccaggacagtaaagatctggctgaagcagcttcacactctacattacagtctgaattgagtgctgaggcaagaagaatactggcggccaaagctctagcaaatttaaatgaatntgtagaaaaggaggaactaaaaaggaagaaagagcttaattcccgagatggagcttgggaaagaatatgtggcgagagggaccctttcatcctatgcagcttgatgtggtcttgggtggagcaactgaaggagcctgtaatcaccaaagaggatgtggacatgttggttgacaggcgagcagacgccgcagaagcactgtttttattagagaagggacagcaccagactattctctgcgtgttgcactgcatagtgaacctgcagacaattcccgtggatgtggaggaagctttccttgcccatgccattaaggcgttcactaaggttaattttgattctgaaaatggaccaatagtttacaacaccctgaagaaaatatttaagcacacgcggtga

SEQ ID NO: 2743 - DNA, 743 bp, Macaca Fascicularis
  misc_feature (1)...(743): n = A,T,C or G
gatgcgggccatcatgtcgacagcactcgggtactgctacaccgttggccagttcnnnnnnnnnnnnnnnnnnnnnnnnnnnnnnnnnnnnnnttggctgcagttaactgtgtccattcccttcttcatcttcttcctatcatcctggtggacaccagagtccatacgctggttggtcctgactggaaagtcctcgaaggccctgaagatactccggcgggtggctgccttcaatggcaagaaggaagagggagaaaggctcagcttggagctgtccagaattcagagtggttgccgggatgtcccggccatgactattcctgtgctgcttcggggtgcttattgcaaggacatgcatgacgggaagggaagacacccaggaaaatgctttccagggactccacctggctcgatgcatggagatccaatatggagcaccacttttgggcagagtcctcatgctgtgtcaactcacaggtcactggcctcatgtccagtctataaatggaagtctttggaggaatttctaatttctgcaccatccatcagccaggataatcaggccacaaggcacaaagctcacagtgtatctcagaattccttactcagaatgttgcgaggggcctggcacacacttggaatctgctggactcctccccaagtcaatcatttcaaacccatggttagggcacgtgatctaagcaagactgttttatatgatctgtaaattatttattgaaacg

SEQ ID NO: 2744 - DNA, 715 bp, Macaca Fascicularis
cacagacaatgccaatctcttctaaaaaaaacaaaattaaattaaaacagaatgttggtttaaaaacttcaaagtaattgtcaaactgctttgtacggttaacatattctgcccagtctatgaccacacgtctgtaccatgcaatttaactcttatttacattgttatgtttggtttggttatttgcttaggtgtgcatacattcattcagcaaatactgaacaccagccacctgcacagcagttgcttttattagtcttaactctaccatttaaatctatgtgtccaagggggaaaatgtgttatatttgtaaccaaaaactactagtttaccaaaggctggaagggtagtggggaagggagataaagaggagatgattaatacaaaaatccagttagatgaaaggaataataaatacagtgttcagcaacacaatagagtgactattagcttaaattatgtgaaattgcctctatttgatcttattttataagaaaaaaacatcaattttatatagtctaacttaatacctaggcttatgagttgtataaggtaacgttacctacctgagaagctgattaacattggctgtacaatcttatccattagagaacatgatacttagggtctgagaccttttgaaaaggtctgaaaactcttttaaaaaaaggaaagaaagaaagaaatgaggaaaaacatatcaaaataaaaaat

SEQ ID NO: 2745 - DNA, 682 bp, Macaca Fascicularis
  misc_feature (1)...(682): n = A,T,C or G
acnnnnnnnnnnnntgctcggctaaatgatgactccagctacatttcccaaggccaaaagatnnnnnnnnnnnnnnnnnnnnnnnnnnnnnnnnnnnnnnnnnnnnnnnnnntgctgggcaccacaaagggctgcctggtgttccaaagccatggcccagtgcttccctgggnnnnnnnnnnnngagtctgcatggagggtgagtctggagagatgttcgtgtccaggtggctgcctgtggtctggctaaggggtgagtattcttggtgtcaccgcccaaagtaaagctgggtccacgggacacggactgggtgaggctctgtgtnnnnnnnntgnnnnnnnnnnnnnnnnnnnnnnnnnnnnnnnnnnnnnnnnnnnnnnnnnnnnnnnnntggtgccgtgtggaatgtgattacatactnnnnnnnnnnnnnnnnnnnnnnnnnnnnnnnnnnnnnnnnnnnnnnncctgtgtccctgggatctgtgcccttgtatgtgggtgacactattccagtgcgtggagaccctgcctcctcatgagacctcgcctaggccgcccttgtgcggccgtcctcattccctgccaccttgcgggaccccaggannnnnnnnnnnnnnnttgtggtttttcccggccgggnnnnnnnnnnnnnnnnnnnnnnctgnnnngtccggggcg

SEQ ID NO: 2746 - DNA, 756 bp, Macaca Fascicularis
  misc_feature (1)...(756): n = A,T,C or G
gaaagtacacaagnnnncnacgcctgctgtgcgattcatgaactcaatcacaccgaggccctgtgggagcnnnnnnntnnnnnnnnnnnnnnnnnnnnngcggccggatggaagcagtcctgagaagcaggtgggctggggtgagtaagcgctcgcttcgnnnnnnnnnnnnnnnnnnnnnnnnnnnnnnnnnnnnctcttcttggccgttggactctgatttcccaaacagcttgtttttggggtctcctctccctccacacagctctccgccgccgtttctgaggcacagctgtggtctcctgcagactagagctaggaggcagaaacgctgtcccgacaggaaggggggggcccacgagggcggcagggctgtcaccccagcacccatgtctactctggcaagagtcatcggagaactccaacctaggtcccagcgaggacggtggcttggactggacgagaaactggctatcagatttttcaaacccccaccttggtggttttaacatgcagctaggattgcagtcaagaggctgagtaggtaagattcatgtgttttcttttactttctaaggagagcaagagcctggggtcgaggcccagggtcctggcctgctgctgtgnnnnnnnnnnnnnacatggcaaatatgtaatggtctttatggatagctggaacagaacaaaacaagatctgtgattcctgtagcctgaactcagcctgttaagcaaaagtagcaagtgttccccctgccc

SEQ ID NO: 2747 - DNA, 765 bp, Macaca Fascicularis
  misc_feature (1)...(765): n = A,T,C or G
aggcagtcctagcgaaatatgannnnnnnnnncttccaaagnnnnnnnnnnnnnnnnnannnnnnnnnnnnntgaagacaagactgttcagaaaaatctctccagaaacagcctccagaagaggattaagcacannnnnnnnnnnnnnngtggaagcaattcatagagctgtggaatttaatcctcatgttccaaaatatttattagagatgaaaagtttaattttacctccagaannnnnnnnnnnnnnnnnnnnnnnnnnnnnnnnnnnntatgctttctttcatcttcagcactggaaacgaatagaaggtgctcttaatctgttacagtgtacatgggaaggcacttttagaatgattccannnnnnnnnnnnnnnnnnnnnntattttacccttatcccagctgcacagagatggctgatagagagctattacctaatggagtttccgtccctttttaccctgactggagtgcaatggcgctcatctcatctcacagcagaactctgctctcccacgatcaagtgatacccattcctcaacctcnnnnnnnnnnnnnnnnnnnnnnnnnnnnnnnnnnnnnnnnnnnnnnnnnnnnnnnnnnnnnnnnnnnnnnnnnnnnnnnnnnnnnnnnnntcnnnnnnnnnnnnnnnnnnnnnnnnnnnnnnnnnggaagatatttgttgtaaattaaaggaattgattgatagcgcnnnnnnnnnnnnattgttcctgtatctcnnnnnnnnnnnnnnntaaaaa

SEQ ID NO: 2748 - DNA, 709 bp, Macaca Fascicularis
cattcatggcatagagggcctcgggcgtctaagttgctccacgcaggcagccacctcttctcaggctgtgacaagcgaactcctcagccaatggagcagtgagaattaacttaggaagtccaatgaggcgctgaggaccgtcctgatccctttcacatattagctcatttatccctcaacagctcaatgaaccatgagcgattatcatttctccccctcatacaggcagacagcctcgggctcagcctcagcctcaggttcagcctcgttacctgcagagtctgagtaatctgccccagtgtaccagccacaagggtgggctggagcccagagctggtgatccagctaccacattcactccttctgctacagacttggcaggtaacacttctcctgtcactctcaggctcaaagggtgaatgaaagtaaagccagtttaacaggtacctgtttgggtccaagtgtagtggctcatgcctgtaataccagcactttggaaggccaaggtgggaggatcgcttgaggtcaggggttcaagatcagtctgggcaacatagcaagactctgcatctaaaagaaaacattttaaattagccaaatgtgatggtgtgcacctgtaggcctagctacttgagaggctgaggtaagaggatggtttaagcccaggagttttgaggctgcagtgagctatgattgtgccactgcactc

SEQ ID NO: 2749 - DNA, 592 bp, Macaca Fascicularis
  misc_feature (1)...(592): n = A,T,C or G
gatagggtnnnnnnnnnnnnnnnnnnngagcttctggagaacgggcagcgggcaggcacctgtgtccnnnnnnnnnnnnnnnnnnnnnnnactttgtttgccatgtcacaatatgnnnnnnnnnnntttagccgggaggatnnnnnnnnnnnnnnnnnnnnnnnnnnnnnnnnnnnnnnnnnnnnnnnnnnnnnnaaccctgagtcnnnnnnnnnnnnccgcctcattgtctactcggaacctgcagnnnnnnnnnnnnnnnnnnnntcccaagaggttctccggcacctgcggcaggagaaaaaggaagaggttactgtgggcagcttgaagaactcagcggtgcccagtacctccacaatgtcccaagagcctgagctcctnnnnnnnnnnnnnnnnnnnnnnnnnnnnnnnnnnnnnnnnnnnncctgagacccacggtcaccctgccagagcctccagtggtctccaagcctctggactgggggctttcttcagtggctgcatgtccagcagannnnnnnnnnnnnnnnnnnnnnnnnnnnnnnnnnnntccaggacttgacatcttaagatgagtcctgtccccttg

SEQ ID NO: 2750 - DNA, 734 bp, Macaca Fascicularis
  misc_feature (1)...(734): n = A,T,C or G
tgaggaaaaatgttttntnnntgagtaatataagatattaagagaattatggttcatatatcatactaatctgaannnnnntatataaaaatgaaatcttatgtttattttaattgctgttgtaacttactcatgaaacagtatacagacaccttgtacttttcctagactataagaacagactttccatgttagcaattaagctattgtcaaatagtcnnnnnnnnnnnnnnnattttcaatgttttcccagcctataaaaaaaggaaggtgcacgctgcccttttaaagcttgtgaggtaaattgggatgagtagacaggatattgcattaaaaattggaagctcgatctcgttatagtcaggagcagccagcgtgacctcacacataggatgggggacgtgtgagccaatgtgcactggccaccaccagggttgggggcaccacagctgtgagcccggcccccgctgttctcagcagccacttcccaggctgcctcactttatgccgtgactaaccttaatattgggatattgttatgcaatttttattctgtttagactattaaaagcatgtttatgtacttaagagtcccccagacnnnnnnnnnnnnnnnnnnctgttgcagtgtctgtaaagaaaggatgcacatatgtagacgattaagtgtatattttaagctgtatgctgaaaatggcttccatagccatgagaacatcttaaaactatgtata

SEQ ID NO: 2751 - DNA, 641 bp, Macaca Fascicularis
  misc_feature (1)...(641): n = A,T,C or G
gnnnnnnnnnnnnnnnnnnnnaagatccacttcatcgcccccaaaanctactgctgtggggctggagtagccgctgacgccgagatgaccacaaggatggtggcgtccaagatggagctacacgcgctatccacgggccgagagccccgcgtggccacggtcactcgnnnnnnnnnnnnnnnnnnnnnnnngtaccggggccacgtgggtgcatcgctgatcgtgggcggcgtagacctgannnnnnnnnnnnnnnnnnnnnnnnnnnnnnnnnnnnnnnnnagccgtctgcccttcttagccatcgattcacaccacagggtgggctggaggttcagggaggatgggttgagcccggcacacacgcagggttctgctccgtgaggggggcttgggagggtctccagcaggatgcagtgggtgccattgtggggaagggggggaatgacacacacttcannnnnnnnnnccgaggannnnnnnnnnnnnnngcaggcttcagacacccccagcgcccaccctcacaggcccaggagtggagctttctctggnnnnnnnnnnnnnnaatgatctccgcatggtgttgggggtgctgttgtgtcttggtgcccgaacttgagtctcacccnnngagataagag

SEQ ID NO: 2752 - DNA, 2014 bp, Macaca Fascicularis
catccaaaataaggggtttggtttacattgattgctttcctccaaatatggggatatacaacataacaaaggagaagggggcaatgccatgtggaatcccttttttctcttccctttagggactaatctgtgaacctgttcagaattaaacttaccatccctttgatcctcttaaagccagtagagtaaattatggcccaccctattgctgaaatagataatgggcccccaaaggatcctgcagtttctgtagagcagtggttctcaagtgtagttcctggatctgcagcaacaacattacttggggacttgttagaagtgctaattctctatccccacctagaccaattgaataaaaaattctgggggtggggtccaaaaatacttatgaatcagttgcccattaaaggttgagagcttgttaaagcacaggttgatagttccctgagttttcagttcagttggtctggggtggggtctgcatttttgcatatgtaaaaattcccagatgatactgatgcagctgatccagggaccgtacttcgagtaccacttctgtagtggaaacctgcctgatagagctaattgcacctaaggtgttcatttagacaaatttgttcactcagtgatccactgatctctaatcaaaaatatttttaaaaaatacaatttaggtctctgaaaattggaacctaccagagtatcatcttgatagtgttacttcagcatatgactgactgattttatgaagggagtttagctgacctttccctatagccctatcatattaaaaaaagcaaaacagaagtggtccacttgaagcagcaaggacaaagggcaatttagggagaggcagggtgaaggggatagctcgattgggcatccagagtggaaaaggattattattgtacataatagcagttttggctggaattccaatccactttctggggatcattttgatgttgaatgttcctccaaagcattctgacaagtttggtccacttggctctttaccccaggtaggaagacccttattgactttgaaaaactggcataaatgagcttaagaaatccattgtatacagtcctagtgtttgccttcttggtaaaattacatttaaggatgtcatttcatgagtcaaattgtatctgctgacactgaagtgtattgagaagttgttctttagtttaagtatgtaacaaagtaatattcaaaggggatgtgtgggggtggggctgggaccgggtggctttatattgataatgaaatattccagagcaaaacacattgtcctaatgaagttgttgcagctctctttgttttcttgtgccgctggaattggcccgtgggtcacttgttgtgcaaaagtgaattaatttcaaataggaatcatattgcttttgtgaaacaaagaaaatttaccaccttgtctgatgtgtagattggaaggcgctcttggtaaagacaaacccacaaacacctgatcttgattggaaagcattgtaggtcattagggaaaactgatgatgctgactgttgatccagctgtgttggcaattcaagatgaccttgttaataactgcaagttgctgtcaaccttagcaaacaaactagctaacaccattacagcactggttaagtagatttttactggcactggctggcgttcagctgaggaaggctaggatacagactttaatgaccaagagccagactagctcaagctagaaatcagcaacaaatacctccttgtgctatttgaatgctaaggtattagttgcaaaaggcttacgccttcgctcctctagtgaggggaatgagcctgatgacactattactgtttacctgtcaaaccagggtggaaatttagagggatgcaagtacagtatgtctcattaagcagtctctgttgctgattatatgaagatgaaattgttgtatatgctgatctgtatgttatgtacattttcacagtgattgaatcgttgtaaaaaaaaaaaaaaaaaaaaa

SEQ ID NO: 2753 - DNA, 1715 bp, Macaca Fascicularis
caaaaaaaatttcatctagatgcaacatttggaataatgtttggtttaaaaatatgttaatgaaaccttttgctgttaattccagtttatttgtactttaataccataaaacggtattcttattcagtgtttgtagataaccatactaaccgtataggtaacctactggacagttttctgagtaagattttgctttcattttaaattcctttctcattttttgctttcatctatcctttgtatactaattgacctccattacctttatctatagtacaaagagtggtaagtatgtgtcaccaaaaacttgcaaagatactggagcaatttatgactaaacacactggagtgaaaggctgcgcatacctatgcttgtaactttcaagaaatagcactattgatctaattgacttaaagtggaatcagacggtacagatgattaaataactattgatttggttgtcttgtgtaggctacgtttttaaacccagatcaacatgtcttattttgccattctctgtgcattaattattaagagtactggggagtgaagtgggttaccctttgatgtaagaattgtggcagaattctgttatctttatgagttttgtagtgcccctccccatttaaacgaccttagcaatttttaaaatgtgttccgaaattattaccttaattatgtcacaaaatacttaagtgttttgaaaaccgtcttcccttcttacttgtgtttgaaaagcgtattagcacatttttttggagagttattttgaccttgaaaggtaagattatttaaggaatgaatattgtatttgcattccatttttggatttgaagtagcgatacagcttataataagttttctaactcacttttttaattgaagaaaaaggtctcataaagactttactaaacttttccatcattagcaggatgtaagatgagtgttggcctttagtgatcacttcttaaatatgaaatggcataatagagattttcttggtagctacagaataagttttgtcacaactctagtttccacagatactatttaagaactatttatttgggttgtatggtccgcagttttttctttgcataccaagaaggtgtgcagtaatataattggctgaagaagcattgtacaatgttctgttttagtgatgtctatgtctctaaaagatacttgtaatatatatttacagtacaccaagggaatttaatttccaaaagaactgtgaagaagcatcaataaagtgattcatcattcagtaatttgagtaatcaggctcttaagtgcaggcttttgtcgatcattttattgaagtaggaaaaaccatattagaaattaagaaaaacgcttcaatgctaagaattttaagtacgaactttaattggttttcaaactctgttccttggattcctgtgggtttttttcctagattccttgagacttcctatgacaacccaccctcccaaaccaggacagcttttgtttttatgtattaaatgtattgtatttaaatataagaatatttaacttaaatataagaaaaatatttattatttaaatataagaaaaatagctaatgggtactaggcttaatacctgggtaacaacaaacccccttgacatgagtttacctttataacaaactgcacgtgtccccctgaacttaaagtttaagaaaaagcccctaaaaaaaaaaaaaaaa

SEQ ID NO: 2754 - DNA, 701 bp, Macaca Fascicularis
  misc_feature (1)...(701): n = A,T,C or G
agtgcagtggcacgatctcagctcactgcaacctccgcacccnnnnnnnnnnnnnnnnnncatgcctcagcctcctgagtagctgggattacaggtgtatgccaccactcccggctaatttttgtagtttcagtcagggtttcaccatgttggccaggctggtctcaaactcctgacctcaggtgatctgcnnnnnnnnnnctcccaaagttctgggattacaggtgtgagccaccccacccagacaggaatagtctttcatttatggttcttagctaaaatattgacctcctcctaagagtggtcgcacttttcagttgctatgtcctcttcagagctcctctacccttagatacatgatcatctctccacatgaaggcagaaagctctgcacaaaagaaaatgtagcatgtgttacatttattggagtgacacatccaaggaaaaagcaaactacaagcatgattaaataaagttctaggagctttgtacgtactttctttgaatgtaccacacttcaatgggcttcaaagcctttccaatacattttcagtttaacaagaannnnnnnnnnnnnnnngccttaatgnnnnnnngaagtacgnnnnnnnnnnnnnnnnnnttagtctggcccagataagcaaaactaactaatagtacttctcgctacaaacgtcaacaaannnntttcccaatgactc

SEQ ID NO: 2755 - DNA, 648 bp, Macaca Fascicularis
  misc_feature (1)...(648): n = A,T,C or G
cagctatagatcattgtttttcttaagnnnnnnnnnnnnnnnnnnngaaaccactcaaattatcccagtttagctccctaccttttggtctccatgaggaagacaagctgttgtatcatcatattcctctgtgctgnnnnnnnnnnnnnnnnnnnnnnnnnnnnnnnnnnnnnnnnnnnncagcagtnnnnnnnnnnnnnnnnnnnnnnnnnnnaccatgagagattgtccaacaaatgccacctggcagatgtgnnnnnnnnnnnnnnnnnnnnnnnnnnnnnntcccataaaggnnnnnnnnnnngcnnnnnngaagatcttcctttggaaccaggcacttttggctccttctcagtgactgcaatgtggaactcttcttaagaaaatattgaaaacagcttaatgctttcatatagtgactgacatttagtggaaaactactgctgcatannnnnnnnnnnnnnnnnnnnnnnnnnnnnnnnnnnnnnngtgtgggtttaaagctatgaagtgtatnnnnnnnntgaagttttaattatctttattgaaattaattgtgtaaaaatggtatgtgctctattaggtattcagtttgtatgtgaattctgtatagaaagtggtttttgttctttgagtttatcttgt

SEQ ID NO: 2756 - DNA, 704 bp, Macaca Fascicularis
  misc_feature (1)...(704): n = A,T,C or G
atgcctgaagacctggccatnnnntacgaggagagnnaggacctgcagctgtgcatgaatnnnnnnnnnnnnnnnnnnnncatcgatgatgggcagggccaggtgtctgccatcntgggacacagcctgcctcgcacctccttggtgcaggcctggcctggctacacactggagactgccaacactcaatgccatgagaagatgccagtgaaggacatctatttccagtcctgtgtcttcgacctgctcacnnnnnnnnnnnnnnnnnnnnnnnnnnnnnnnnnnnnnnnnnnnnnnnnnnnnnnnnnnnnnnnnccgaggaaggaacgctnnnnnnnnnnnnnnnnnnnnngcaatgggactccccgtggnnnnnnnnnnnnnnntgtcagtctaggactcnnnnnnnnnnnnnnnnnngtgtttttgtaggggttgtcttttgttttggttttttattttttgtctataacaaaattttaaaatatgtattgtcataatatattgagtaaaagagtatatatgtatataccatgtatatgacaggacgtttgtcctgggacacccaccagattgtacatattgtgtttggctgttnnnnnnnnnnntggatgtagtgttctttgattgtatcaattttgttttgcagttttgtgaaatgttttataatgtccctgcccagggacctgttagaaagcacttta

SEQ ID NO: 2757 - DNA, 730 bp, Macaca Fascicularis
  misc_feature (1)...(730): n = A,T,C or G
acacaaggcagctctcaaactgtggagaacatagtaatgaccagattcagctcagccactctcagccttgaaacccagagcattatgaacagcccatcaccatcccccaccttcaaatccaaagatccctacagcccaaagctgctccctggcctcaactcctgttggcatcaggccccaaggaagctggagcacgtctgtctgggaccctgtcaccttctggagaatgacaataaagaggacccagcagcctgcaggaggagactgtattcgaggcaggaccatgggatgggtgaggcacaggactgtggttctatcctctctattcgaggggttagagatgagctgcctctgccaccctttccgtggtgatatttctagaatacacccctgctggaattcgtatgaggaaagaaacccgatgagatgctgtggtgaagagggtccacaagggtcttgaataccaagttaatatcgctaccagctgagatttggaagtgaaacccaggacccaggagaggaggaggaagagatagtgcaggaccctgtgatcactctcctggccgtctgtgtgcagtgagacgcttcccttcagggttgggagcacccagtatcatggtcctgagtgttgtgaccctgtcgttctcatctgtgaatggggccggatccctttcttcctctaatataaataacttggaggatctgtcaccagacacctcantatctacat

SEQ ID NO: 2758 - DNA, 722 bp, Macaca Fascicularis
  misc_feature (1)...(722): n = A,T,C or G
gggtgtatcttcctcttactacttttctgaatgacttttttnnnnnnnnnnnnnnnnnnnnnnntttaataatttttgtattgactgctttctatgagctaagcatgtttgattttgattaagtagcttgtgctcaagcatcagtcctcagggatnnnnnnnnnnnnnnnnnnnnnnnnnnnnnnngtttttcattttgggatagtgggatgaggaaggagagaaannnnnnnnnnnnnnnnnnnnnttaatttgtgaaggagagaagaaatttgtaaagtagggaaatctatttnnnnnnnnnnnnnnnnnttgagccattataatgaaccaaatacctagctgggtgcctgggattcgaagacaaatacactccttgcctttagatcattcttaaggggtggaaagatatttaaaccaagaacagagtatagtttaaatgcaatgaaagggaaaagtccacatgctatataagcttaaaggaggtccacaaagattgattttttttttttaatttaaaaaatgctgttccattttttccctgttaaccatttcttacctccactagacaagttcccactgtgtaccaaaannnnnnnnnnnnnnntggtatccaggaatgttacataaatatttgttcaatgaatgaatgaattttgtcagtgagtccctaggaatttagatttataaatgcctagaatgtctcaaaggaaagcttatat

SEQ ID NO: 2759 - DNA, 760 bp, Macaca Fascicularis
  misc_feature (1)...(760): n = A,T,C or G
taggaagcagatcacagaaatggggaggnnnngatgactgttcagaaagtcccagtccccggagagaggaggaccccattgtgaagccatatnnnnnnnnnnnacactcatcactcctgcattcatctagnnnnnnnnnnnnnnnnnnnnnnnngaatcctaggggtaggcactgcggtgagccaaagggaatgtggccccacacccgaggtgatccaagnnnnnnnnagaaggccccacctcattcttaggtctgactagaagaccctccccctgcacaaagaagatgacccccacctttaaggatcnnnnnnnnnnnnnnnnnagaannnnnnnnnnnnnnnnnnnnnnnnnnnnnnnnnnnnnnnnnnnnnnnnnnnnnnnnnnnnnnnnnnnnnnnnnnnnnnnnnnnnnnnnnnnnaagccctcatcagtggccactannnnnnnnnnnnnnnnnnnnnttgtgatcctagcccagcccctgtggtcctggataagtgggtctgtgcacagccctcaagccagaaggcgannnnnnnnnnnnnnnnnnnnnnnnnnnnnnnnnnnnnnnnnnnnnaagcctacagtgttcagggagacaagtggagggccctgggctatgccaaggccatnnnnnnnnnnnnnagcnnnnnnnnnnnnnnnnnnnnnnnnnnnnnnnnnnnnggctagggtgggaagaggggtctttactannnnnnnnnnnnnnnnnggcgctgnngtcaccagtgcggtcagg

SEQ ID NO: 2760 - DNA, 702 bp, Macaca Fascicularis
  misc_feature (1)...(702): n = A,T,C or G
tgattgagggagaaacttgaaaataggaggaacgcattttcccatctcttgagggaaagctccgtctgagagtcactctcaggcctttccaggtccacagagctctctctgcaagcctgttcatttgccagatttcccagaggttgcttagaaaccagatcttgtgagtatagtgagaatgagtcaagtcctagggctctaacagatcagctggaaggaactgatgaggtctaggagcctacaaaactgactcgggcctcgttggccccattaggacacttgtttaacaagacatcagcccacgcccctggcatctcattggctacagcacatcatactggaccttctgtctcctcccaggtgcccagggacagtgatctggaaggaaggggcttaagnnnnnnnnnnnnnnnnnnnnnnnnnnnnnnnnnnnnnnnnnnnnnnnnnnnnnnnnnnnnnnnnnnnnnnnnnnnnnnnnnnnnnnnnnnnnnnnnnnnnnnnnnnnnnnnnnnnnnnnnnnnnnnnnnnnnnnnnnnnnnnnnnnnnnnnaggttgtagtaagcacaagaatgcgccattgcactctaagcctgggcaacaagagtgaaactccatctcaaaaaatccgactacataaataactaaaccctccatatgtcaggcacgcggttctctaagtatgcacgtgagcggagatcaggc

SEQ ID NO: 2761 - DNA, 728 bp, Macaca Fascicularis
  misc_feature (1)...(728): n = A,T,C or G
cggggagcaccccttcctggaccccagcgtnnnnnnnnnnnnnngaggaagggtggtcatcccagctcctgccccaccctctcacttaactggagctttgggaagtgccctccacagtgggaggtgggtggtgggtgagggctggcggggcctcatgacagcttggtgctggtaagaggaagcccatggttctggccaggctcttgtgtccagacagcggggaccaggggaaaacccagtcccttctgtaatcccccttcatttcctaccttccttcctcctctgtttagcaaaggagggcagctgacttggatgtcnttagaacgccccggccccaggctgagcaataagaaaccggagccttgcggcccagtggcctgggccatgtttcaggccctccccctcctctgcctggggccattgagcccagcctccagggccccagcgcatttgcaggccagcggccactgtccaggctgtgatggcaccgaggcaggtggagcaccgggcgccacacagctgggcttcccaccaggctctcccgcgggggtctcagggagcttccccctggcgctgcttggagtctgcaggaactgtccttgttctccctagcccatcactccatacagtattaggtgaggatggatgggcnnnnnnnnnnnnnnnnnnnnnnnntggaagttgcagtggcttgttcatacctgtgggaagaaaagtgaagacttccc

SEQ ID NO: 2762 - DNA, 2126 bp, Macaca Fascicularis
ttaagcacttctttacattttaatctattttcatgattacttttggtattagtgttccagtttataatactgagcttttaggaaatcagggttcaatttgcagccatcatttagaaactaagttgggtttgactaaactaagttggggttgccttctcctgcaaagtattatcttacagccttgacctactccaagctgaaaaggtcatttttcccaagtgaagtctgttttttgttcagtttcaaatttttcagagataatttccaaagctctttggtaataatatacaggaaatgtcaattatcataaaaaatcccaatgtccaagtaataaaatgagtcagagcagaactagaagcccaggctggagcagagatggagtgagaagtcactggatatggaacggggattggagccagttaaggaggacagtgagataccagaattgagggtgttccaaattttccagcttgttttaatatctcaaggtcctagtgaacaaaatgaccttatatatattgttgacatgtacaatatacctgtagtaccacttttatggtacactgtccagttatatgagtacttcaatctgcatgttttatttattgattaacaacacaccacacaagtactgccaagaacaaaaaagccaataggggaagaatagccatttgcactccattgttctcaatttggaaaataagctttgagaccaaacatcatgtgctctgttagagggatcaagtctgaagattgttgtcacaaattagtatgactacctagtattcaggactttgaaaaatcactgcattgcacaatagaataaaccgccccacagagcatccacttaaaaataaacacagaagagagcaggagcataaggaactttacagtgaatcggagaaactgttggagggttggagtgctgcatattgcagagtttcaaagtttccaaaaactgttctgtgagtgatgaggtacagatgcataagtcatgcatgcagagaagagttcatttatattactaagtctgcactgtatccacatgtagctgagtaaactcaactgaacacagactgttaagtatccaaggtttctgtatttatggattgttttaactataacttaatatacctatatggtgagtaatgtggttttttgttctggttttgaagacaggaatatatactacacagaatgacagcttttatttttgctcattcttatataattgtttaaattataatgagatcataatgtcattcactgttaataatcaatgtctctatgccattgtattcataaaatacttgttagaaaattgaaagtatagttgtgtgttctctcattttggcctattttcaatacaagctccaacagcaaataaatttactttcttggggccaaaattctagttcaagtaactacttctgatataatcagtctataggtttctaaaggtttctaaactttttatccatatactaccagaagaaataccatttatctttgtaaacataaagttataatctactttagaaatctaataacacgaaactcaggtcaactgtgaccagattggcatacttaaacttttgatctcagaaaaaatattatgaaaatacaatcaggaactctatcatttcaggtcatttgggaggaaacagccaaaatcatagcttgataaccaacaccaatgattaattgctttttcaacatgtggattatcttggtgccaaaaattatagaacaactgcttaacaaattggagagtccctgatgtcaatgctcatattttctttggattatactaagcaattatgctaaagtttctaatgactgagtaaaatggtatttgtgccttgggcacattttgatgaactacagttgtacttttcaaaacctaagaggcacatgctttaaaaagtatattgcctataataaatctctgtttaaactttatattcgatttcagaggattattataagtacctattgtaaaactataaatatgtttaccattgatagttgttactttaaactacttaccttcctgaaaaatcagttggtataatttcatctccaaataaatgtttaacttacgtgaaaaaaaaaaaaaaaaaaaa

SEQ ID NO: 2763 - DNA, 732 bp, Macaca Fascicularis
  misc_feature (1)...(732): n = A,T,C or G
aaaaatacaaaaaaaatcnnnnnnnnnnnnnnnnnnnnnnnnnnnnnnnnnnnnnnnnnnnnnnnnnnnnnnnnnnnnnnnnnnnnnnnnnnnnnnnnnnnnnnnnnnnnnnnnnnnnnnnnnnnnnnnnnnnnnnnnnnnnnnnnnnnnnnnnnnnnnnnnnnnnnnnnnnnnnnnnnnnnnaaaaaggttttggcnnnnnnnnnnnnnnnnnnnnnnnnnnnnnnnnnnnnnnnnnnnnnnnnnnnnnnnnnnnnnnnnnnnnnnnnnnnntgagactggcctgggcaacataaaaaataaaaaaatagccaggcatggacatggtagtgcatannnnnnnnnnnnnnnnnnnnnnnnnnnnnnnnnnnnnnnnnnnnnnnnnnnnnnnnnnnnnnnnnnnnnnnnnnnnnnnnnnnnnnnnnnnnnnnnnnnnnnnnnnnnnnnnnnnnnnnnnnnncaacattttaagtcaaaggtttgtagtaatgtattcaatgccacttcttgccatcactttgcaattgttgaaatgggtatactgagctcagaaagcaaatctgatgccttcatgggagacggagccatatttgtgttctgggtgggatcactagtgcaggagaacattacattttcttctgaaggcaaaatgcttgtaggttttgcctctttactttgtatttacttttaaaattgcacttgttcacctaccagtgtttacgaaatcctgta

SEQ ID NO: 2764 - DNA, 2959 bp, Macaca Fascicularis
aaaaatggtgatctgaatctggttctgcctgactccaaattcttgttttcataactccatatggccttcagatggtaaccatgaaaaggacaaaacaagaaaatacatgtctcctgtggtcttgctaaacaacatcagagtcttttcaaggggatcaaacctgagtctgataaagcctttgggtctacttaccaattggcgggaaacccagaggacagaggaacatgctgatctgcaccatgtgtatgcagtcaacaagatggatgtgttacttgactactggagaggtcatattactgaagacaaagcaggaacctgttaccactattttaatggtttgatgatccagagacattggagatatacagacaaaaagaacagagtgattaaaggagacacacctagtcagataaacattcgtaaatagtccagaacaccatgggagtctaaacagatgatgaacacctacctcaagctcaagccaacacttgatctgaatcttaaagtctcagtgggagtaaactatgcaaacatagatgacagaggaaaggcatcaaattatgatggaatagtgtggacacatgtaaatgcaagaaacagcctttgcgtttcacaattctaagagttccattaacattttattctgtgtgcacctggatttttgcaggacagcaatcatgtggaaaacagcataatttaatttcattagatcttggaaaagaaagagctgagaagtaggcaaagcctacccatagaagaatgttctggattttagaataattaacgcaatgcagggtattcagatgtgggtaggaagaagtaagaacactccatcctggatcttccatggaaagcagctataaaacctggactgagtggatggagaagatactttgagtactctaaaaaataactcgtagcaggaggggtggcgaagaaggccaaaattcaatgtatcactgaatcagcagtaagtttttcattcttttttactctggtatccacatggcctggtgcaacccaccccagagcctgaaagaactcaagagaagtactctagttatagcttgagtagtaagaacaaatttcctaatggccggagagaatacagtaaatgcttatttgcaaaatatattatatttcagcctgtagcttctcacaaacacctagaattctgagtagaaccttcctattggataaagaagctgtgctttgaagagggaggagaaaactcttatttctatacccccacccctaccttttctgtcctccacagcttaaccccagaactgtgcacagcaaagggaagtatgggagactccagtgaataaatcagctttgggaatagtaggctaaaagggggagtcctaggaaatgagaagattttgagatttcagagagggaagacttccaaaaattcacctaaaaattatttgtgaatttctggacacaccccaagctgtgcatgcatggatctattaaaactaaaagcttaagattatccatatggtttaagcaagacttagcatctcacaaggtaatattcaaaatatgtacaacacaatccaagcattactcaatatatgaaaaatcaggacaaacttaactcaagagaaacagaaaatcaacaaatgctagttggaattatctgacagaccctaaacagctatttttaaaatgcttcaacaagttaaggtaagcattgttgaaatgaatgggaaggtagaaagtcttaacaaaaacaaatagaagatataaagaagaaacgactggaaattaaaaacagaaaaacacattaaagtaaaagtatcacagtaggggctcactagcagaatgaatatgctacaaggaaaagtcagtggacttgaaatatgtcattagaatttatttaatctgaaaaacacagagagagaagatggagaaaaaggaacagtctcagagatttatgggaaaatataaaaatctaacatttatgtcaaagaagtcccagaaggagaagaaaagtagtgtgcagagaaaatatttgaagaaataatagtaagaaagcctctcaaatttgacaaaacccataaacttacagacttaagaagttaaatgaactccaaacagaaaacaaacaaacaaataaagaaattcacacttggagacattataatcaagctgctggaaagtaaagacaaaatattgaagacaacagagaaaatgatgcattacttaggagagcaacaatttcaatgactgtagatttctcatcagaaaccatggtagccagaaagaagtaaacaaacatttttaaagggcctaaagaaaaacacagtcaacctccattgagtaaaaaattcctgcagaaatgacagtcaaataaagctgtcttggataaagaactaagagaatttgttgccagcggacttcctctaaaataactgttaaggaattttgtttgcagaacaaatcttttcttttaaaaagaaagctatggttaacatctagctatattaatatcagacaaagtagacgtcagagtaaagaacattagggataaagtgagacataacataatggtaaggtcaatttctcaagaagatgtaaaagtcctcaatgtgtaaaataagtactgacaatagaatttcaaaacatatgaaatgaaatttgacagaactgaaagaagtatacaaatccaccattatatttagatgtattacctctgctctcagtaattcaacctctgttctcagtaattgatagagttagtggatattgagtctgcaaggatgtagaaaaactgaacaacatcatcaaaactggatgtttttacacttatagaacatatcaaccaacaaccgaagaatgtacattcttgtcttcaagtggacagagatcattcaccgagatagagtgtattccaggtcacaaaacaaatttaaaaattaaaatcacttgaaatcaaaaaaaaaaaaaa

SEQ ID NO: 2765 - DNA, 674 bp, Macaca Fascicularis
  misc_feature (1)...(674): n = A,T,C or G
acagacgacnnnnncatnntcaagtcnnnnntggacnnnnnnnnnnnnnnnaccaaacgggacatgggctttactgaagannnnnnnnnnnnnnnnncctttatcatgtaatgacacattaagaacgcaacctcacggtctctgctctggcacttgctgccgtgtgannnnnnnnnnnnnnnnnnnnnnnnnnnccccctctaagcgtannnnnnnnnnnnnnntgaagaggatggactatcactacattgctaagagctgccttctttgttcnnnnnnnnnnnnnnnnnnnnnnnnnnnnnnnnnncagaacatcaatgcggccaaatctagtttcctcccagaagatgagaagagggagcttctcgacctgctctataaagcctannnnnnnnnnnnnnnngcctctgcagggcagcacctctgaggacaacacccctccaagcctttgccctgtggagtcaccccaattctgtggcactgagcaacatttttacatttattccttccaagaagaccatgatctcaatcgtcagttactgatgcttctgaagcctgtgtgtccatttctgcacacacgtatacctcggcgtggccgtatcccttctctgattatgtgtcctggtcagggaccagcgcccttgcacatgggcatggttgaannnnaaaccctc

SEQ ID NO: 2766 - DNA, 738 bp, Macaca Fascicularis
  misc_feature (1)...(738): n = A,T,C or G
taaatgttaagtgtgcctggcnttcannnnnnnncggaaacccagtcncagtccctcgaacagaatgggcgaggcatggattctgggttgcagggacagttctgattagaagtaggaaatctccccacccccgccctggccaagaacgtgcaataaattggagatttacccggggnnnnnnnnnnnnnnnnnnnnnnnnnnnnnnnnnnnccagtgccccttttcagacagtttttgattcactctagacctttttttaatagggagggaaaaaaaatttttgatattttacttttttctacatgcacttaaactaaaacacaggtttagattaattttatttgcttccttttttccgcttttcttcccacagagcctgatgggagaatgtccagggcagggaaaccacattttttgtaggtgataactcaatgaaaattggtgcttattttttatacttctctcttgnnnnnnnnnnnnnnnnnnnnnnnnnncgaaggcgcaccggggtacctggccatgcctcgttctccctgctttctttatcctnnnnnnnnnnnnnnnnnnnnnnnnnnnnnnnnnnnnnnnnnnnnnacgtcactttcctttnnnnnnnnnnnnnnngccaagcactcaccctcctgcgctctccggcgccctcccgccccagtgcgtccactcccgagggctgttatgaggactgggttgtgcctacttgattgaaacacacacaagcaa

SEQ ID NO: 2767 - DNA, 644 bp, Macaca Fascicularis
gcagagcagacagcgtgaccagagggcagggaatgccgcgttgtccggaggcagacagcccagctgagcctccttatctttcttcagccaagcccacctgcccgtgatctgctggcctcaggctgctgttctgccttcattgctggagacactagaggcatgtacacatgtggatgcatacacacacaccaatgcacacacacagagatatgcacacacacggatgcacacacagagggtcacacagagatatgcaaacacactgatacacatacagagatatgcacatacacggatgcatatacacagatatgcgcacacacagatgcgtgcacaccacaccaatgcacgcacacactaatgcacccacacggatgcagagagatatgcacacaccgatgtgcacatacacagatatgcacacacatggatgagtgcacacacaccaatgtacacacacagataatgcacacactgatgcacacacaccaatgctgactccatgtgtgctgtcctccaaaggcggttgtttagctctcacttttctcgttcttatccattatcatcttcatttcagacaattcagaagcatcaccatgcatgttggcaaatgccccaaactctcccccaaaatgtgcccggct

SEQ ID NO: 2768 - DNA, 566 bp, Macaca Fascicularis
gacgtgtggcttaatacatgtaaatctagacctctgacatcatgatgttttcttaatgcctcacattgctggcacggggatgtgccctgcctgccagcacagaggactttgagttgggttgcagcttatgacatgcatgataggttttggagggtaacttttaactgcaaacctgtaaagttctattttttattttataaatgaacagggttttaacatgctcaactttgatttttttcaattgtatgaaggccttaaaaaagctacattaagcgtagctaaaattatttattggactaaaaattaacagaacttcatttccagattttttttttttttctttttggcaaatgtttacattgagttaaggggaaaaaatagaaccagcacaaatgagtggcaattgcttcatcttggggtaattataggcaagtcattttcacatcctctagaagttcagagcatcagaatgaactctatgaatacatgtgtaagtgccagacagctgaatctttatcaggtattgtaaagatacacatactgatatgtttttaaaacttgaaata

SEQ ID NO: 2769 - DNA, 725 bp, Macaca Fascicularis
  misc_feature (1)...(725): n = A,T,C or G
gagaccgctgannncagccatcagccatgtgcatcgtgggggcggcgagctcaggacggagagctcttgcctggttcggagtcagcacacctgcactcccttgcacacacccacccagctgtgtgtcctccaccaagggcgagcctctctgtgactcttctgtaaaatgcaccccgttttgcccactcgtgccatgagacacatcctcagccatcccgccaggcatgagcgcgtgaatgcacgtgcaaagcnnnnnnnnnnnnnggtggtgtgggccctgcaggtcctagccctcggccttgaagctccctcaggctgcagactctggcctcccgggtctgaacattagaaccggggaaaggggtgtccctgagcagagccaggagtgcaaacagccttcagccgtctggccttttaagtatattgtgttgcgtttccaggtaggaaggtagcatctcaagttcaaagagagatgagtcatgcaaccatctttccnnnnnnnnnnnnnnngtaagaaggacagtttttcttatggtttaggggaaattttcttgaaatttccaccattaccaatagattactgatgtccatggcaagtgatctgttcttggtattttgttttgttttggtttggtttttaaannnnnnnnnnnnnnnnnnnnnnnnnnnnnnnnnnnnnnnnnnnnctgctagccacggccccaacaatgcttccggctctcatg

SEQ ID NO: 2770 - DNA, 696 bp, Macaca Fascicularis
  misc_feature (1)...(696): n = A,T,C or G
tgatggtcagtctgtactcagacgggggctccttggacagagaggagagaggaagagtaggtatgttccttgaagtttccatgatttaaaacctgtaccatcccagccccatgacctggagccacaggaacctttctggggaggaatttgacaagaactggtttgtgtgatgccccaaacatggggccatttgtctggtgtggtgccactcacacccaccacagcaaccccctgccgacccccgaaacattgatctcctggctcctggatcaggggagctctgaatttcctctccttctcctaaactcagcagatcagaggacacttttgaaataacactgtttgtccaagcaaaaccctagaaagctgcctagacccgggctggaattgtttccttacagagtattttaaacactgtgtggactggacgtgnnnnnnnnnnnnnnnnnnnnnnnnnnnnnnnnnnnnnnnnnnnnnnnnnnnnnnnnnnnnnnnnnnnnnnnnnnnnnnnnnnnnnnnnnnnnnnnnnnnnnnnnnnnnnnnnnnnnnnnnnnnnnnnnnnnnnnnnnnnnnnnnnnnnnnnnnnncagctactcaggaggctgagtcaggagaatcacttgaacccaggaagtggaggttaaagtgagctgagatgtcaccagtgcactccggcctgggtaacagagcgagact

SEQ ID NO: 2771 - DNA, 785 bp, Macaca Fascicularis
  misc_feature (1)...(785): n = A,T,C or G
tatacatacatgcttgaannnnnggaaagtagnnnnntcttgacctagtactagnnnnnnnnnnnnnattgcagcccttgtgatgtgattagtgtctcatgnnnnnnnnnnnnnnnnnnattgatgagnnnnnnnnnnnnnnnnnnnnnnctcnnnnnnnnnnnnnnnnnnnnnnnnnnnnnnnnnnnnnnnnnnnnnnnnnnnnnnnnnnnnnnnnnnnnnnnnnnnnnnggttaggaaaaccatgggtaacgacggactcacttctctttttagttgaggccttttagttaccacattactctggctctatatataggtggttttctttaagtggggtgggaaggggagcacaatttcccttcatactccttttaagcagtgagttatgatggtggtctcatgaagaaaagaccttcttttggcccagtctctgccatatcagtgaacctttaaaaactcaaaaactgagaaatttactacaatagttagaattatatcactttacgattctctacttgagagcctcaaggagagaaagtttcgttatattaaaacacttaggtaacttttcggtctttcccatttctacctaagtcagctttcatctttctgnnnnnnnnnnnnnnnnnnnnnnnagaaaataacaaagcccttattctctttttttcttgtcctcattcttgccttgagttccaattcctctttgcttggtgtacagacttcttggtgcccagtcacctctgtcttcagcaccctcttaagtggtnnnnnnnacactattt

SEQ ID NO: 2772 - DNA, 719 bp, Macaca Fascicularis
  misc_feature (1)...(719): n = A,T,C or G
tacagcatcattaaacactaagctcagttaaggagccatcagcaacactgaagagatcagtaataagaattccattttccctcatcagtgaagacatcacaaattgaaactcagaactatatttctannnnnnnnnnnnnnnngatgcataattttcttattaatattaagaaacagtttttctatggcatctccaaaactgcatgacatcactagtcttacttctgcttaattttatgagaaggtattcttcattttaattgtttttgggattactccacatctttgtttatttcttgactaatcagattttcaacagagtgaagttaaattgggggtcataaaagcattggattaacatatggtttgccagcctatgggtttacaggcattgcccaaacatttctttgagatctatatttataagcagccatggaattcctattatgggatgttggcaatcttacattttatagaggtcatatgcatagttttcataggtgttttgtaagaactgattgctctcctgtgagttaagctatgtttactattgggaccctcaagaggaannnnnnnnnnnnnnnnnnnnnnnnnnnnnnnnnnnnnnnnnnnnnnnnnnnnnnnttctgaaaaagggttatagaaacctggaaataagaaaggaagagctctctgtatactataattggaagagaaaaaaagaaaaaattttaactgga

SEQ ID NO: 2773 - DNA, 608 bp, Macaca Fascicularis
  misc_feature (1)...(608): n = A,T,C or G
tccgctnnnagganncggagccctccgggtcctggctgtagccgaggccgcagccagagagaggcggggcctcgagcgggcccctcctcctctgttcccggcgccccccacctcgcgcacgccctggcccgcgccctgcccgcggataccttggacgacggtgccctcccgcccccgccagcggacacttacaggtggcgcttggccatccgcttggcggaggtcgagtgggtgcaagggccctcgggacctcccacatgtacagttcccctacctcttgccctggctagcttccctggagagaggcctagccaacaaggaagggacnnnnnnnnnnnnnnnnnnnnnnnnnnnnnnnnnnncatttcatgttccctgaacttttctagatgttgtgagaannnnnttgtacttttttccctgtattttggttctgagggatgagtaatgcgtttttaattggttgagtttgtacattcttcaatcccctaaagccttcagctattctctcttatgtggccaacattttaataagtacagtgtttgcttttataagtcggtgttacttggatgtcctataaaatacccaatttttataaagatgatat

SEQ ID NO: 2774 - DNA, 2276 bp, Macaca Fascicularis
  misc_feature (1)...(2276): n = A,T,C or G
gctgtttttcttcctttttttcttttgttctttttttccttctctctgatcctgtcctcatagcaaagagtgtgtggtttgtggtgctgccttggcgtttcgggccggccctcctgtcaaatcctgcatcctcttttcatcagacctcctggatggcagcagagcctgccaacagtgcagagcagctgctggccggccggggtgttctcactgcagtctgcgcctacaggctttatgaaaatctaattcgtgttaccctactctggctcaggcactgttaaaattgagagatatattcaattttaaacaagaacaaactaaatctgtcttctaaagaaaagtacgaacagcctcttgtggcatttctttaaatggactaatatgttgatctcggagaaactgggagccatccttcgtgttttcattattaagccaggtaaaatgaaaaccaaatctcactcccaaatgccacctctgggaattctctgttgtttctattttaaagtaacctacatgtttccttctgtagttagggcatactgttgaaaatataagatttcagtcttctttttttttagttttagatactgtttaggtactttctgttcgcagggctcatgcaaagaacatttcatcatgtttactggttgtgactatctgattgtatgagaagtaattgctgtggatcttccttgacaaataaactacaatccgaacctggcaataaactaccaattatcagagtactgcatcatagtccgtcgcagatacctaagtccttatttatttacatgtttttaagtgaaattatgtgtcataaaatgtaggcattaaatggtaacttttgccacactaggctattcctgatgatctagggaaaatactttttcacatcgagtgctttcactcagtaactctttataaaggagcaaatattcttaagagaacagaatgccttcctctttcttttgctagggtcactaactcactgaccttgtagctcagtactgtttatctggcttgaagggggaaattctggaaagtgggcttagcattgctttactcttatttacggggaaaaactcaaaaggccagagaggtttgtgtttatttctctcttaaaaagatggaattgggctaaagcgagagcttcaggggagacttgtgacacatcccagtacagcaacgtatcgtccttaaaagatatataaatgttggcatgactaccccgccttcccagtacccatagccagtgaaacccagttactgaaaaatgacggaatttaccagcatctgtaatttccttctgtgtatatgatctcggtggctggggaactgcctaataacctagtaaaggcggactctgaaaactgtcctatgtttctgtagtagtatttaatagtaatctatctcagctgggctcagcggctcacacccttctaggcttgtccccttgtcccagcattgcctagtctggccctgtcctctactcaccttcatcttatcctgagtggggatgacacccacgtacctgtctggggcccacctgcctgccaggaccccatgggtaccatcctacctgcctactctacagttctctggaagagtactatcactgctgccagtctggccccctccagcccagctttctcccgacacagatgtggtcatgcctttccctgaaacccatgacgttagcatggagtggcattagaatttccctgatcccatctcccccatgcggcccagccgaggtccagcttcagagcctgcctgcacgatgagggggccaaggttgccatctcacccacatttcagtaaaattatgaacctttaaaatactccctctcaaactgctaggcatgttgcccctagaaatctttgtttcttccagatttgaccctcttccagcctggcaaagacagtggctgccactctagatttctgcttgacagacatgacctcaagacctgcagacttgaccaggcatgnnnnnnnnnnnnnnnnnnnnnnnnnnnnnnnnnnnnnnnnnnnnnnnnnnnnnnnnnnnnnnnnnnnnnnnnnnnnnnnnnnnnnnnnnnnnnnnnnnnnnnnnnnnnnnnnnnnnnnnnnnnnnnnnnnnnnnnnnnnnnnnnnnnnnnnnnnnnnnnnnnnnnnnnnnnnnnnnnnnnnnnnnnnnnnncaagagtttgaggctgcagaaagctattactgaaccactgccctccagcctgtgtgacaaagcaacaccctatcttaaaaaaaaaaaaaaaaaa

SEQ ID NO: 2775 - DNA, 2167 bp, Macaca Fascicularis
aacagcatgctgccggggtccgctgcgctggcagagccgggcggagatggagggcgggtctgagcacactaaggaccccggcggggaaggcggagacggggaaagcctggccgcgcggccgtccaagatcaaggccagctctggccctccgacccctcccgaacccggggaactggagtcggagccagaggaggaggaggaggaggaggaggaggaggaagaggaggcttcgcagggaggcacagccgcggacgagcaggccaaggtcccgaaagagctaacggcagccgaggctgcgggcgaggaggggcctggagagccggggaggccggccaagccccagcccgaacccgaagagccggccgaggccggggctgaggagcccgtccagccgaagtccggagccgggcccgaggaactagatgcggaggcgagggcggaggagctggagcaggcggcggagggcaaggaagtccggtcccaggcctctctgccgctgaccaggatcggcgaggaagaggctgctgcagccccggaggccgagacagagcgggtggagggggaggaggaggacgaggaggagacacggagagacggcgcggagagcgaggggagggctggggaaggacgcccggccaaaagccaggaagaggggaagcccctcggtggaagggacgagtttgaggacctggagtggtccgaggaggtccagaagctacaggagcagcagctgcgcagcgacctcctggaccagtaccgttccctgctgatggagcggaaccgctcccagcgctacaacctgtacctgcagcacaagatcttcgaggcgctgcgcaaaaagaagggcctggaggcggcggaggtgcctgaccggggcgcacaagcagaggcccccgagaaagagcaagcgtacctgcgccatctgggcatgctggaggacctgaagaagcagcaggcagatgacctgcagtggtaccaccaggagctgggccagttgaagcagcagtgccaggagaagctctcaagagtggagaaggagtggcggcgcttccaggcactcaagaagcaggtggtgatgcaggccatgggcagctgtcggatgaggggcgggcgccaggctgctctgcgagaggtggagcagatcctggcgttggaggataaaaaggagaaggagatgagcgccgtgcggctggagaacgtgcagctgaagcagagcctggtgcattttgaaaccaggatgaggacccaggaggacctgacccagggtctgcttcttattgactttgaacagctgaagattgagaaccagaccttcaatgagaaaattgaggaacgaaatgaggaacttttaaaacttcgcaacaaggtgaccaacagtgtgcaagtaataacccacatgaaggaaaagctgcacttcatggacacggagaacgcgtgcaaaaagaaacagctggcagaaatcgaggcccaggtcgcccaaggaagagacatcctgaccaagacgaagcaagcccgagaggggctgcggacagacaacatcaggctgaatcagaagtgcgggcttctaggcaacgactcacttctccgggacttggaagaaaaagtggacaagacccaactgctccaccagcgcctggaatccctgaagcgccaccacgctgggctcactttgtcctgcagaggcgtgaggcaaaagatcagggaggccaaagcctttctcccctcttgaccagatcgatgagaagagtctgcaaaacacttcatcctcaggacatgctgtcctgctttatttacctttgttgctattcttaaaaaggcctgtgtcctttggaacgggactgtattttgtatttatctcaaaacgttttagcttccaaatcagtgctgagcccaaaactgggttaggagttttatttgggattgagcaaaaataggtccagaaaagcaaacaaagcgtgatttaatgtaactgacttctcatgaaagactgtggaaggtctcaagtctgagcaattccataatttcaatgacttaatactaaggagtcctgttcctctttcgtatgtaggagggtttaaaagttcagtgaatgggcaaggtacacaaaaaccctgtgcattaagctaattattaaattatttggatgtattaaaaaaaaaaaaaaaaa

SEQ ID NO: 2776 - DNA, 733 bp, Macaca Fascicularis
tgattccaatgaatgcgattttcttcaatgatgaatcgatctagtttgctgaatgctatgtagcctggcaatggaagatgcactgtggatcggtatggagggtgagctgcagtgaaggcgctgcagtgaaggcgcagcagtgtgtggtgtggtggtgagctggggaccgaattgcagggcctcttaccacagctgccaggcgtctggagggggaggcagtgcagggtcccgaagacgcacctgcagaggtggcagccgcggagggtccaggcgccatgctccagggcaccgcattcactgcgcctctggtcatgctcgcagtagcggccggtgaagtgggccgggcacacgcaaaagctgcccagcacgcaggtgccgccgttccggcagcagcgcggcctcgcggacgcacctgcgggattacccgcgcgtcagccccgcgcccccagcggcccgtggccctcccgattctcccgcagggacggggccgaacgtggccgccccggggaggcagtaaaatcagctccccgccaagtgtgtttgctcaggtaaaccctgcttgttagggacatgaaacaaacgaccagggctgcggcctgcaaacccggcttgctctctcccttcctttcacatgttaacctctttcacctgacagtgattaagcacaggcctcccgggcgggaccacccacgggtgtgatgacgccaaacctaccggcgaggggcctcctggg

SEQ ID NO: 2777 - DNA, 631 bp, Macaca Fascicularis
  misc_feature (1)...(631): n = A,T,C or G
agggaggaacagggtgcagctggctngnnccagatacaacccacagcaggttctggtggtggctgggggtaggggtgggcagggatacctcttcgtttctttttaccccagaatacaacagctcacaacagagacttcctcggaccccgctaacagggcaaggaacaagacgactacactgttcatcacaaaccctgcctgtattgaaagccactttcctgctctgaagctaccgcctcttagagaaaagggatctctctttatgggctgggggtgagggctcctccccagggtctctgttaatttctagccttggtgctcaggcccgtccgcagcctcccttgtccatctctctatccgtgcttgaggggcccagacaggattccccaaaccagctgaggccccagcacccccatctccccagaagccccttcctctctcatatgttgaaagtatattttaaaaactgtctctgttccttgccgtagattgcagagctgatttatcacgtttctctcctgtgagaccccgttttatatgatatatccagaggaagttttgtaacataaaacaggccgcccaaactgatggttttgcactggtttttgtgactgnnnctacaaaaagaaaa

SEQ ID NO: 2778 - DNA, 1861 bp, Macaca Fascicularis
tgtggccttttttttttttttttttttttttggtcttaaaggaaatctaagatctccttgagcacaatctgtggtgtaccttgttatagtaggtgggacagtgttgggacaggggttgggcaagccaggcaccaggccagcagatgacagcccatacatgattaaacgaggtccagattgggctggtcacactttctctgccttgagtagatggctgtgagtacagttaaactatctagtgatggatgatactgtgaagagactgcccttcagtgcattctagtacagagatctccaagctgctttgattcctccaggactttacacaaaggtccccttttctgtgaggcctctcctcccccataccatttaaattgcacactctaacactaccttcccacttccaacgttccctatttctccttagcttttatcactgcccagcatgctatacatcatcctatttattttgctattatctattttatcctattagaatataaactccatgtttcactcccttgccttaatttatccagtaactagaatagaacttcgtacataatagtcacaagtcgaaaacaaacaacaaacaaacaaataaacacacaccctgatgttttcggttttcatatattgcactggactccgaaggaacagtgagattttagagcacagaagtagaaaatgtatcattttctgtatcattctaatacatttttattttgtttaatgtgcccataagttcccgctgctttctattgtgagcctcaactgaacagtgttttaaaatgtataaaatgctttccaatatattttctcatcaaccttgagaaatatatttactatttttattactttaaaaataaactgaaccttggggaaattcaatatttgcatattcacgtttcaagtttagatataaggctgaaatttgtatctcctgctccttgcattttgtagtctgcctcatgtagaaaatccccagtattgagatttgattaagattccatctctaatgattactttactccaacagtcattagttcatatttatatcccattgaaacatcttgttttcattcactttcatgtattcccacaggtttctcaccagacatgatgaacaataataatgtattcaaatcaaaggatattacttttgaatagatggaattgagtttctcttccatgttcttttcctgaggctacatattgtctgtgattttctccatcctttcttcttaagatctagttttcacttagtaaattatgttggcagcatttcatattaaatatttctctatattttttgaaaatgtaatatactaactggctatactaataaaattagattaatgcaatgttaaaaataaggctaattttctaggcctgtgattgtatttgacctttccctacaaaagcacaaattctcctacctttagtttagcttataaaaaaactatgactgtccctctcatcattatctacaatggttgatgtgctcacatttccttcaacacatgttttatagtgctacttaatatatcttattagacatatgcaaagttaaaataaattgggggattacttaatagtgcaaaatatattaactttatttcagttacaatattttacaaggtaaaaaaaatcttcaaatttgtattaccaaataacatctattcacttcacatatatttttggagtgccacatatgatgaaatgtcctgagaatcatcatcgaataaaatacattttcttggaatttatgtctataacatagtactatagcaggattaagcaaagtataattttctggggcatttttctattttgtttgagaagtgaaatatatccagta

SEQ ID NO: 2779 - DNA, 597 bp, Macaca Fascicularis
  misc_feature (1)...(597): n = A,T,C or G
caaaaaaaaaaaaaaaaagagaacagtggagggatacttggnnnctgagggaagtttgaaattcttagggagccaggaacatccaaagaggtggctatgaaggctgcattgtggagctcccataacgagtgctttgcatctgggagaaagtgaccaatatctgtgctgtctcccgaggtcagaggtttgtttaatgaagaagtgggttgcgtccaggttgactccttgttttctgtcctcctgtgtccagtgcgagtctggatccgagggcgatgggacagtgcaccgcaggaagaagaggaggacgtgtagcatggtgggaaannnnnnnnnnnnnncccaggacgactgtgtcagcaaagagcgcagctcctccaggtgacccagcaaggctattgtctgtatggaaggacacgctcgcggcaagggcagggcctggggagggcggcctgtctagtcctgcagacaaggggaggcctgacagagcctgagaatgaggacgccctcggcacgggnnnnnnnnnnnnnnnnnnnnnnnnnnnnnnnnnnnnnnnnnnnnnnnnnnnnnnnnnnnnnggcttgttttactcagaaagg

SEQ ID NO: 2780 - DNA, 646 bp, Macaca Fascicularis
  misc_feature (1)...(646): n = A,T,C or G
ctacatgagttgannnanttgaagtgnnnnnnataaggccaggcatccaagacctcatacaataataataataataataatccattaaaattaacagaaaaggagagaaggttactgcaggacaacacagaagagcctcttcagtcgacaaatatttccttgggagccgcttttcctctttaaactgaaagaaccaaggaaagcactgaagactaaaattaatgtannnnnnnnnnnnnnnnnnattcaaggcaaaaacagggttaatatgctatccatttttaaagtatcaagcataaaatgcaattcagagtatttgttttgttgttctaatttccacttagatccagaaaaccaagtgaactggaaaacagatacagaaaaatgaaagccgagggtatctagagaaaagagagtctccacctcctttggaaagaatcccctcttttccgagtatgtgactcatnnncccgttgcccactcagttattaaaataattcaggaggggtcagaagcagtggctcacacctgtaatcccagcactttgggagcccaatgtgggcggatcactttcagctaagaagtttgagaccaccnnnnnnnncatggcaaaaccccgtctctactaagaatacaaaaattacca

SEQ ID NO: 2781 - DNA, 769 bp, Macaca Fascicularis
  misc_feature (1)...(769): n = A,T,C or G
gtagttcaatagtgaaatctaaatgagtgttatgggnnntaattnnnnnnnnnaatgtggnnnnnnnnnnnnttgaaactgaataccagaatgaaaagtgttgttttggttaagaactcttataatgtattgtttcttttgatgtaccctgagttgttacaaaccccactcactgctgcttactactttatacttctgagtcagctcctttcatgctctatcccagaatatttaccaacagaggagaactgctctcttttctgttgctcatagtttggttatggctttataaacttttatttggtgaaagtcccagatacccaaatgtcattggcaaaacattttttttctggagagatcagatttctagagagattagcattcatagtaaatgaaaattgtctaatttttttaatccatgctattactgggcagtaggtctaatttttgtcgacaaaaaatagatctattttccttatatgttgatttagaatcttaagttaaaattttataaaagaaatgtctgagcagttctatgtatggaggannnnnnnnnnnnnnnnnnnnnaactttatcttttgccactagagggagatctgtggttgctttctcctttggagaatagctgctttgtttttgtttttaatttctaaggttggaatagaacttattctcaaaattcctttagtgttattaaatactttcatttattagtcaaaggtaagttaattaagcttgtttaatgacaccaatcttatgcttttctgt

SEQ ID NO: 2782 - DNA, 520 bp, Macaca Fascicularis
  misc_feature (1)...(520): n = A,T,C or G
ggagcagtggggcccaggatggcncatgggggcccccagctcggccctacacatgaagggctcccagacacccattccctgccctcccgcagtgggagcagtgagatgcatgtgaagccagggcaccgcctcagccattaggctgagaccagtgccagcccttaagaggcccctgctctcgagggacatggagttccggctcggccctcccaacttggccatgctctccaggctttttgggctttttactgctgaaaagcaggggcgcaggccatgatccccttcactgtgtcttgtaagcccacggaatgggctgtgccttcagaacaacagctggatgccccgggccagagagagcagggcctctgactggggcttaggccagcccccccaggagtctcttgaggagcctttcctgcctagttcctgcccactggactctgcgtgaatctgtgaagctttcaggcggttgggagggagtcccatttcaccagagggcgggcttgtttcctctttctgt

SEQ ID NO: 2783 - DNA, 772 bp, Macaca Fascicularis
  misc_feature (1)...(772): n = A,T,C or G
cattccaaagtcaaaaactggactgaagctaaatttgtacttttcataatatacattctgcttctggcttatcttcttggtacatcaatatattaattgtaaagtttattgtatagtatttaaccgctgaagttcctattttatgttgtgcttatgtgaaccccttggtgaaggtcccttttccttggatgtgtagttatatgatctttttaaatgtacagatattttgctataaannnnnnnnnnnnntttatggtttttacacttctctttaattcccacctaagcctctgggtaatattgtaaatattgttttaaaatgcatcagcctatgctatacaatctgaatgttattttaacttatagttttttttaatatatatatttaactacaaggacagtttagggaacaagttaccacatttcactttagtgtacctatttacagaaagattaaactgccaccnnnnnnnnnnnnnnnnnaaatgtgtactttaaaaagaacatgccaagattttgtctttctgtggactgaacattcactttgattgattaaaaatagcaatttgaccaagttggacttccactacaaagcagctgttttccaaagttcaatgctgacatatatnnnnnnnnnnnnnnntatttattcatctacaaatagacaacgttggcatgttcttttctgtttgtctattaatgggcctgcttcttagcaatattagaatgttttataaaagcaattcatgttacttttctggtcttttcatgg

SEQ ID NO: 2784 - DNA, 691 bp, Macaca Fascicularis
  misc_feature (1)...(691): n = A,T,C or G
gagctggcattgctggtgtttagtgaagtgattatattgaatattttaatgggaggatatagcagaagttgaggtttgatcnnanctcatggccaaatagtgctagagagaacatgtcaacagttagcttggggtggcgagctaaagacgctctccccagagtcatcatgagaccacctctgtccttgcctgcagggctgccactcaccggagctgaatagataaagttgaacagcaaaagtgctagaatctatatgaccataaagggtaagagtttgaagcgatagcgtttccagaaaacagagcagaagtgttgaactggtgaccgcaaccagatgaaagaggtgtaggggcgtctgtccaggagccagggaaatggcagagaatggcagagagaaccttcaggtcaagcaatctgatgcaaagagctttctttttaaaaaaggcaacttatgggctaggcgcagtggctcacgcctgtaatcccaacagtttgggaggccgaggtgagtggatcacctgaggtcaggagtctgagaccagcctggctaacatggtgaaaccccgtctactaaaaatacaaaaattagcctgggcatggctggcaggccccttgtaatcccatgttactcaggaggctgaggcaggagaatcgcttgaacccaggaggcagagattgcagcgagcagag

SEQ ID NO: 2785 - DNA, 729 bp, Macaca Fascicularis
  misc_feature (1)...(729): n = A,T,C or G
cannnnnnnnnnnnnnnnnnnnnnnnnnnncgcacctggcctcaaatcttttaaaagttaactttcgggaaagatggcggaacaggctaccaagtccgtgctgtttgtnnnnnnnnnnnnnnnnnnnnnnnnnnnnnnnnnnnnnnnnnnnnnnnnnnnnnnnnnnnnnnnnnnnnnnnnntcagagaattggagggtagacagcgcggcgacttccgggtatgagatagggaacgcccctgactnnnnnnnnnnnnnnnnnnnnnnnnnnnnnnnnnnccccatgagccacgttgcccggcagattaccaaagaagattttaccacgtttgattatatactatgtatggatgaaagcaatctgagagatttgaatagaaaaagtaatcaagttaaaacctgcaaagctaaaannnnnnnnnnnnnnnnnnntgatccacaaaaacaacttattattgaagatccctattatgggaatgactgactttgagacggtgtnnnnnnnnnnnnncaggtgctgcagagcgttcttggnnnnnnnnnnnnnnnnnnnnnnnnnnccctgctgtggccagcctgactagaccccaccctgaggtcctgcattctcagnnnnnnnnnnnnnnnnnnnnnnnnnnnnnnnnnnnnnnnnnnnnnnnnnnnnnnnnnnnnnnnnnnnnnttaaaaaatattgtagatggaaatcagttatgnnnnnnnnnnnnncaa

SEQ ID NO: 2786 - DNA, 701 bp, Macaca Fascicularis
  misc_feature (1)...(701): n = A,T,C or G
attgtgatcatnnngcaccactccccaacaattaggaactggaccctgggaataagctgagggtgctgaactgttggggaagggtgactgtagccatatggaagataaaatatgggtttttctgcaaaatttccatctgagggtttttacatttaatatttttttaagacagtttaaagagcaaacgttttttaagtgtattctagttgcaaagtatgcacacatatcttgaatggctttatttttattgtgtaaaactgttgaacacatgactgtgatgcacacattctttacgtgtaaggagtctatgcattttacagtaacttattttatgattgagtgatgaaacagttatacattcaactgccattatttttattaagtgctttcattttctttacagttattacaaaattgtatttattttatacagatgggttttcattttcctgatgctgtaatgtttacttcagcttgttgacctttctttgtgttatctgcatgttgtaacgtgtgataagaatgaatgcaaaggctgtggcaactgtaattaatttttgtaaannnnnnnnnnnnnnnnnnnnnnnnnnnnnnnnnnnnnnnnnntgattttagtaaccagatcaccttttcagaagtttagacatgaacaccaaaagnnnnnnnnnnnnnnnaaaaattaatagctggttctatttttt

SEQ ID NO: 2787 - DNA, 678 bp, Macaca Fascicularis
  misc_feature (1)...(678): n = A,T,C or G
ggcatgagatgacaaacctttgtattacctaggacaatgacacctcttcagcaggtggtcactggactggtggagcttaagactcatgttcatgatcaactgcagggtgactggagtcttatcctcttccagggagggaggtggtgtcggtctcctctcaacattttacatgttgtaaaccaaaaataaacatcaaagccaccccctcctaaccatcttaatggacaccctcagccagggtgctcaaaagttaacctgaaagactggctcaagccaccatgattatgccgtcttccgttttggaattcaggaaaagctgaccagcatttaccatcaacacagaccttcaatctgatcagaaacatttacaatctattctctctgaagcctggcacctggaggtgtcatctgcatgagaaaattttggactccacaacctcttatcataacccagacatttcctttctattgatagtaactcaaccaatcgccaatcagaaaaattaaaaatctacttataacccagaagcactaccccgcaacccttgcctgcttcagattgttccagctttctgaaatgagcccatgtatagcttaaatgtatttcattgatgtcgcatatcttcctaaaatgtataaaaccaacccctgtgccccaacnccacccttgagcacatg

SEQ ID NO: 2788 - DNA, 584 bp, Macaca Fascicularis
  misc_feature (1)...(584): n = A,T,C or G
tgcatttaccagcctcccaacaatatctgannnnncatcaaagagtagggccaccaanactaggtctnnagaatgaaccctttgcagaagagtaagcattgtcctatatatggtttggtgaaccacaatactgtgtacatttagttcagttgttgtgaaggatcattttcaaaagctaaatgtccactttccatctaaaacttcatcacattcacccctgcaagtcatttggactggaaaaaagaatgagggagaattttaacccatttctcctatttcaaaacctggacaattgaagaaatcaagtacaaaaaaatataatgagaaacaattaggatatcatccnnnnnnnnnnnnnnnntaaactttagattttcaacattgtttatgtagattagacatgattatggtctctcttaccaaaatagaattagcctagaatcaagaaaattaatagaacaaaaagaaaagaagaaaatatgtgttaggaaataaggacaaataacaggaatagaaagagaaaacaagttacttacagctcagaaagtctagagagcgatttagaaacttgccacagggtgcaa

SEQ ID NO: 2789 - DNA, 281 bp, Macaca Fascicularis
cccctatctctgggcataggagtgtgtcctggtaccaacagaccccaggacagggccttcagttcctcttcgaatacttcagtgagacacagagattaaaaggaaacttccctaatcgattctcagggcgccagttctctaactctcgctctgagatgaatgtgagcaccttggagttgggggactcagccctttatctttgtgccagcagcgaattattcgacggtgagcagttctttgggccaggcacgcggctcaccgtactagaggacctgaaaaaa

SEQ ID NO: 2790 - DNA, 661 bp, Macaca Fascicularis
  misc_feature (1)...(661): n = A,T,C or G
aagtcacttaaaaactcaactttcatgattgggttgattaaannnnnnnnnnnnnnnnnnnnnnnnnnnnnnnnnnnnnnnnnnnnnntatcctttgttttccatattttataactctgaaactgagctctttacagttgataatcgaaatattttgcctttttcctattagcatcctgcccatttcactactccaatcagccaatcaagagataataatgagctgggcttggtggctcatgcctgtaatctcagcactttgggaggtcaaggtagtgggatagcatannnnnnnnnnnnnnngcaacatagcaacttcgtctttaccaaaaaaaaaaaaagaggtaaaaatgaaataggaatttaaatnnnnnnnnnnnnnnnnttgctattctttcatagttaaggcaaaatattttttgttaaaattaaataaaatcaggtattggtactctttgtgggtttcttttctgatgttctaaggtgaattattcagagtagtttaattttaatattatttctgctggttaatgctacagtttttttttttcttcattataggtatgctccgtatagtgattttagctgttcctctggattnnnnnnnnnnnnnnnnnnnnnnnnnnnnnnnaaagttatatnnnatanntaccaagtcagc

SEQ ID NO: 2791 - DNA, 2114 bp, Macaca Fascicularis
atgaagatcacaattaaaatctttactggagtcaatagaagaatttacatgcaaaaatatcagaaattggaacaattggaactggaagcactccatgaatacaaaggaaagatgatgaaataataaataatgatgggaaacaattacatgtagaaaaatggagaacgaacatccacctaagtgtaaattgtcttaaaggaatcagaacaattcaaacaaaaatgataaaagatttaatgtaatgtactttctgaagttattaaaatatctgattgcatattaaaatgttttctgatgtactgtataaaaatcagttatataagatccatacccagatacatacagatattttagaattatactgtcaactttctgggcagcaaaaactccctcttattcactatattaataacacatgacatattgtctggcagttagtaggtgttcaacagatactatagaatgaatgagaatgagtgaaggaattaattacttaacttcaaaaatgaaaattcacaagaatctgccagaaataaagaaagagatggataagagagataaaaagaaaagaaggagtaaaaggaaggaaagaaaggcatgaagaaagaaaaagagaaagggagaaaaagagagttggaaggaagatgaaagaaagggagggaaggccaagcttttgattctgtaacagatggtatagattcacctttcctgatcctcaattctaaatgaaactaaacactctggaaaaattcttcagcagaccattttaaaaggactctgaaagcttcgaagaagaaggcaaactgactgggacatcaggacttaaagaaaaacatcatggtatgcttcttgcattttctttttatctcctatatatccctcgactgcataccagacaggcttgcaatctggtactgtcgacaggcatgaagaaaagaaggaaaaaaaacaaaagcgaatcatactctctcagtccagaggaccaagagagagaaaaacaacagaggcttggaagagagccaccgatatcttattctatagtcctaatcgacaggcagttcaattcacctgcagaaacagaacagtaaggccgcaggccatccctgctctgctctccctggtgggcagatctatctggtagtaatggtggcagcagtaaagccctgtgtcttcctatctttcacccagtgtcataaagagacccaggcccagtggcttctgtgccttcccagagatttacctaggaatattagggaacccagagcagcacttttaactctagcagatgacaccagcggagttttggcagaagctccaacagtgccggaagaatgaagcagaccagattagcattagcattataaaaaatcagaacactaactgccattggaactaaagcccacaaaattagtccaaaccctataagctaaacctaaacaggatacatacctgctcaaataaggatttcaataggattaaaagtctcctaacataataatcaaaatattcaaaatgcaattgaatgtaactcatcataccatgaaccagaaaaaccacaatctgagaaaagacattccactgaccccaatactaagacgaattagataatggaatttctgagaaggaaattgaagcatccatcataagaatgcttcagaagacaattacataatctcttgaaacaagtcaagaaaaacagaaaatctcaggggaaaaaaaaggacttataaaaaagaaccaaatggaaattatgtaactgaaaatcaaaattaccaaaataaaaatatcacttaatggactcaatagtagagtgaaaattacagaaaatagattaaacgaatatgtagattagtggaatttactcaatctgaacaacaaagagaatatatactaaacaaaaatggacagaacctcagggatttgtggaaaaataataaaagatacaatatttgtatcatcagaatcccaggagaggaaaggagtatgggacagataaaagtatttaagaagtaatggttgcaaacttctacaagttgacaaaagacataaatctagatattcaagaagctgggtcaacaccaaagaagataaaccaaaaaaaaaaaaaaaaaaaa

SEQ ID NO: 2792 - DNA, 765 bp, Macaca Fascicularis
  misc_feature (1)...(765): n = A,T,C or G
tatgtcagacagcagnnncnnnntgatcaggcgtaaatcannnnntccctcaaaaatgaaacagataatcaggttgggcaggcaaggtatgaaagttgatgttgaaacactaccaaccatagcatttacattgttagtacgtttttcaaattggagtgtttttcttttcctttataaattaatcatgcaacagaagtaatctcattctttaggagcaatcaatgtataggaaaatctttatggaaatacagtaaaagtggcctttggacctgcagttattagatggtctcgatcttttgtattttgaagtatctttcattttccgcctcttactgatttcttgccatgcaattttaaaaatttaaatcatcctgtgttttctgctgtgtgtgtatatatatacacacatatatatatacatacatacacacacacacacacacacacacacattgtgtaccaggatgtgagtcagtaatgaagaaaaagcttggaagaaaaagagatctgtgttgagaagagagaaagagaagacagaatgaataaactgtgttgtcatgtgattttttaaaaagacccttttttgtggttgttatgagtcacattttaaacaatgtagcctgggtgtgcattcttttcttttcttttttaaagcagtggctataaacatggtgccgtcatgtatctttttctaggatttgagcttcaacaaatgaaaaannngtgtgtatagagggggaaaaaagaaccgaaacagctggtgta

SEQ ID NO: 2793 - DNA, 189 bp, Macaca Fascicularis
tttgtacagacacatagaccaacaggggagtatatgtttgagtttgatgaaggtgagcagttctatgtggatctggacaagaaggagaccgtctggcatctggaggagtttggccgagccttttcctttgaggctcagggcgggctggctaacattgctatattgaacaacaacttgaatatcacgatc

SEQ ID NO: 2794 - DNA, 785 bp, Macaca Fascicularis
  misc_feature (1)...(785): n = A,T,C or G
gaggaagcagaggcaggcannnnnnnntcccccacaaattatttcaaaaaaagtctgtattttcatgcatgtgtcattggcaagaggaagagctggtgtttttgaaagcagtatggattctttaaatggctctcactcttacaagatagtaggcttttatgagataaacttatctgtgtcaattaacatttaaactggcatatagaaaaaacggaggattttctgcattgtaaaataatcagtatggtttatatgttgaatttgacatttgtgtgtaattttgaggtggcctagtgttgtggtgcttctggtaatggtaatagaagctcaactatttttttgtggatttcagattttatcatcagaagtcctagacagtaacatttcttaatggtgggagtccagctcgcatttctgattatacaaaacagtttgcagcaggttatttgtcatttcagttttttactgaaatttgagctaaacatttttacatgtaaatacttgtatttaccaaagatttaaatcagttgattaattaattaacctaaacactgtgaactatctttaaaacactagaaaaaagaaacgttagtatctcaattacattaacagtgcaaatggactttgataaaatagaaataatctacattggtnnnnnnnnnnnnnnnngaagagctttagggtttctagtagaaggatactgaatactcaggcccacttaaattattaatgtatacattgtgtttttgtctttatgctatgtacagagaaatgtgataattttt

SEQ ID NO: 2795 - DNA, 695 bp, Macaca Fascicularis
  misc_feature (1)...(695): n = A,T,C or G
aaccccacagcttctagntgnnnngaggagctnnncccatcccttccggggcctccccagcccgacaccgctcaggccgactgtgacttccccagaaaggagccagcttgagcgcccaccccctcgcagcccccacccagtcccctccccnnnnnnnnnnnnnnnnnnnnnnnnnnnnnnnnnntccagccgccaggatttggggattcgggcctttcagcttttgtatccccctccactagctctaggccagcctggattccaggaatcccgcccccagccctgtccccattcaggtggcacaggctgcctgaccctggggccttgatctgacctcaaataagccatagaggggagaagtcttgaggggtgggagccagtgtgtactgacaattcccctccacgtgtcctgagctgggaccttgtcatctgccccaacacatgcaaatgcacacaaatccatgcatacacaagcacgcacaaacacgcgcacacacacacacaggcatctccctttctggctgggggagcatgggagggggcggttcacagggagaagataaatagttccacacctgaagaccctccaacagcttctgcctccttcctcctcccttcctttctccactcccctctccaacactggccccttccccaaactgattccctggtgaggaaagccagaggagctggac

SEQ ID NO: 2796 - DNA, 743 bp, Macaca Fascicularis
  misc_feature (1)...(743): n = A,T,C or G
tcacannnnnnnnnnnnnnnnnnnnnnnnnnnnnttgtgtatgannnnntgtgtaatatatcatcattgcttttgtnnnnnnnnnnnnnnnnnnnttttttaatggtgtgcttcccttatacttnnnnnnnnnnnnnnntttggaaagtaccaaagaagcaggggaatcgttggccagtgttacattttcacattgtctgtctcccaccctcactgatcatgcctgccccggaccnnnnnnnnnnnnnnnnnnnnnnnnnnnnnnnnnnnnnnnnnnnnnctcccaccagcagtgccaccgccgccaccacaccccagatcccgcccgccctgcagtggcctttccttgtnnnnnnnnnnnnnnnnnnnnnnnnnnnnnnnnnnnnnnnnnnnnnnnnnnnnnnnnnnnnnnnnnnnnnnnnnnnnnnnnnnnattctcccggcagcccgaagaatggatccttgtctcaaatgtcagcacaaaggaggctttttctgtgctttgacattctagcagttcagggatgggagggaggggnnnnnnnnnnnnnnnnatggagtatttctctgaggcccannnnnnnnnnnnnnnnnnnnnnntctactctatcccattggagtctcttcttttttgatagtgggagggaggaagtacgactaatgttggagcctgaaactatggaaatgctgctaaaatttttatattgacaaacattttcttggtacttcattgtgatttttca

SEQ ID NO: 2797 - DNA, 723 bp, Macaca Fascicularis
  misc_feature (1)...(723): n = A,T,C or G
tcatgcacaaagggacaggcccaggcccgacctcaggtcanntgcccactggctgcagagcatccccgggagccatggcgaggcccgtggagcctgagctttgtgtagctcgtgcacttattatgcaccacctcccttcagtcatcactcctcttcctccgccatcttcatttatactgattgcacaccccccactcaaacaataatgtcnnnnnnnnnnnnnnnnnnnnnnnnnnnnnnnnnnnnnnnnnnnnnnnnagcccaaagcccacttnnnnnnnnnnnnnnnnnnnnnnnnnnnnnnnnnnnnnnnnnnnnntccttctgggtttggccggatagggttgtgtccctctatggaatggagagtgatgggggcaagggtgtcattttctcgcacaatacaactcactgaggatgcttctgtagaagtgagaaacacgatgactacattcagaattacaataactcactctcactgggtaacttctcatgatagatttgtatgatcnnnnnnnnnnnnnnnntatgtcaactgaacactgtnnnnnnnnnnnnnnnnnnnnnnnnnattgttaaattgagacaagtaattgaataatttgtcctatttttattttaaaaaagtgaatggactgaaatgttaaatgtgaatgtacatttcttaattgcaacttttctactgagtgtttgcactatactttctggaatcttattaacaaa

SEQ ID NO: 2798 - DNA, 2443 bp, Macaca Fascicularis
taataaatattataatgtcatgattagttgaatatataatgtaactttaagatcatcatgctcagtttaattggatctagtgttgtggaaactcttatttagaattgaaagtataaatctcaaaaatgttctctgaggggggcagctctgaatggcaacctaaacacaaaggctgaaaattatagggagcgtatttctgtccagtgtaagaaacaactttatagtcatactttagaatgaaaccagttacccaaaactgtggcatatggaagatcattagctcaataatttcctatatgaaagagcatgaccaaagatttctacattctattacacatctcaatctccatcatttctgatatatgttttctcctccaacttatttagcattttaggcattgtgaataacttgattcagtggttcttgatactcacgatttttcaatagaaactgagtcttaaaactacaccatttttggaactatatatttattcaagataaattttttaattaggaaaatttgtaaatggtgctgatatttacagtgagctgctagttgggatttttcctttgatttgccatagaggtatgttcattttataatgagtagaaactgaaagatcagtacctacaattttctcctaaattattatttttctgcatagtatttatactggcaagggtagtaattttacttaaatattatataatgtgaaagaatatgtcttaaacatctagatgtgtttataaaatatattcaatgactgatgcttgatcaaatttaatgtcaaaatggggaattcaatcacagggaaatactattatacatttaccaaaagataactcttctaaatcatagactcattcaaatttgaaaataaccttggaagctaatgcagcttccaagcctgctatagaaatttcctttaaattgtaaaacaccctgacatgcagtttttgttttttcaatttctaaattggtgttttcagtggttaagaatcactatctccacgtttgaacagttctaatagaaaattcttcctaacactgaaaacaagtctgcctccctgtaataacttccaggccttggtcctaggtcgctgtcttcacatgccagtcatttaagtgtttgaaccaataccatgtcttccattcctccaaaatcaagacctcatttttattcttgttcaaatgcttggcactttaacatctcccacaatagctgatgttatgtatcttcttgtacaattacctcaggcaatctatcctacctagctctattgattttatggtggattgcgcctgaccagtgttgcagaatctgtttcttgtatggaccttgcctccctgtctgttctcagtgtgcttgataattcagacatgtcattccctcatttagctctttaaatcttatatatcccatttggactggagtcctgctgtgtctcccttctcctactcatgcccatcaacataatcacaaccatattttctgggagaggaattatgaagccaaatgttattaagtcaaacaatttgtcattagatatggtttgaagacttttaaaaacactaaagaaaactccagaaactatacaaaaaatagaaaccaaagcagtcacacccttggtggtgaatgagaggacaataggctcacaaatcaatactgaccagccttatgacaataacaatctaaatttggagatttgtgcagctagtccatttggatagagcatgatattttcataaaacaagactataattaaataagtctatgagtcagatagttttgttcatctcactaactttgacattcccaaccataaaagtctaactagctcaacaaattgtgctgatggtctcaagggtaacaagattgctgaaataactcagagtacagtcctccattaatgagtatcatattgtagtataaatatttctttatatgtctgtcttcctcatttaactagaaactcttagggataaggacatatcttcagcatttctgggcccagcagttggcagagtgcctgtcatataataaagcatccaataagctgatagtatattgacccaatatgtgaagcaagatatattttagttgtttctgaatcagtttggtatatctgtatttttttttacttattttcatatgaaaaggaaattattttgatttatgttagaatttcacattttagaatgctaccacattgtactttcttaatgtacatgttaatttttttgtaatattaatcttgcttatgttcaaagtctctgagaaaattggtttaggtagtttatgcaactttagttgttgtagtacaataaatggaaaagttaatcaaaagcatttttttagagtgaaattgcattatacaagtgcattgccaatctttggagagcatgtatatattataattgactgtatagttatgtatgca

SEQ ID NO: 2799 - DNA, 710 bp, Macaca Fascicularis
  misc_feature (1)...(710): n = A,T,C or G
gtgaagagcaatgcttttggcattgacttttcccccagtgtgatgtctgtaatacagccttgtgaccaaggaattctacactctgtgaagagcaagtataaacacttttttttttttaaagtatgcttgcttcagttaacagaggcctgaaaatccaggacttccttaaagaatttagtcttaaggatgccatctacacagttgctaatgcttggaatgatgttgataagtcaacattaacaaatggttggcacagactttaggctacaatgatgtttgaaaatgacctagctgatgaagattttgaaggatttcatgactctaatgagaagacaatggtagcataactcattacctttgccaaaagtttatcagccaaaagtgtaaataagttagaagaagctgacattgaagaaatggttaatattgataatgatgaacccatagtgcaccctaagagtgatggggaaattgctgagatnnnnnnnnnnnnnnnnnnnnnnnnnnnnngtagtaatcatgatgatgacattatgcatttgggtgaaaaaaatttccatagatcatatggtgaaaatgtgtgannnnnnnnttgctggccttgaacaatgtacatttatcagtgagcaagagctgatgacaatttagtcaattaaagagaaactgcttagacagaaaccagtgttaaggaggcaggtgaaactgggaaa

SEQ ID NO: 2800 - DNA, 2033 bp, Macaca Fascicularis
gttttgaagcttcagacaagaggcaaggctcttcctgtggccactgtcagaagaaagagagagcgctggctgccctggttcccttgggcctgccctcccttgggccagccttctctcctcctttgcggccaggttcatctcacccgctgacatgctgtgtggctctggcggcctagctgtggttacatgctgtgcaccgtgctgctggccctggctgtgctgctggccgtggctgtcaccggtgccgtgctgttcctgaaccacacccacacgccaggcacggcgcccccgcctgtcgtcagcactggggctgccggtgccaacagcgccctggtcactgtggagagggcagacagctcccgcctcagcatcctcatcgacccgcgctgccccgacctcgccgacagcttcgcacgcctggagagcgcccaggcctcggtgctggaggcgctgaccgagcaccaggcccagccacggctggtgggcgaccaggagcaggagctgctggacacgctggccgaccagctgccgcggctgctgacccgagcctcagagctgcagacggagtgcatggggctgcggaaggggcatggcacgctgggccagggccttagcgccctgcagagcgagcagggccgcctcatccagcttctctctgagagccagggccacatggcccacctggtgaactccgtcggcgacgtcctggatgccctacagagggaccgggggctgggccggccccgtgccaaggccgaccttcagagagcgcctgcccggggagcccggccccggggctgtgccactggctcccggccccgagactgtctggacgtcctcctaagcggacagcaggacgatggcatctactctgtcttccccacgcactacccggctggcttccaggtgtactgtgacatgcgcacggacggcggcggctggacggtgtttcagcgccgggaggacggctccgtgaacttcttccggggctgggacgcctaccgagacggcttcggcaggctcaccggggagcactggctaggcctcaagaggatccacgccctgaccacacagactgcctacgagctgcacgtggacctggaggactttgacaatggcacggcctatgcccgctacgggagctttggcgtgggcttgttctccgtggaccctgaggaagacgggtacccgctcactgtggctgactattccggcactgcaggcgactccctcctgaagcacagcggcatgaggttcaccaccaaggaccgtgacagcgaccactcagagaacaattgcgctgccttctaccgaggcgcctggtggtaccgcaactgccacacgtccaacctcaacgggcagtacctgcgtggtgcccacacctcctatgccgacggcgtggagtggtcctcctggaccggctggcagtactcactcaagttctccgagatgaagatccggccggtccgggaggaccgctagaccggtgcaccttgtccttggccctgctggtccccatcgccccatcgctgaccccacctcactccttcgtgaatgttctccacccacctgtgcctggcagacccactccagcagggaggggctgggccatccctgacacgaagcccccggggctggtgaagtcacacatcaccttctcaccgtccccacccgctccatttggcagctaactgatctcttgcctctgttgatgggggctggcaaacttgacgaccccaactcctgcccgcccccactgtggctcccgtgctgtttgccgtcccctggccaggatggtgaagtttgccccgggcaaccctctgctctgcccacccaaacacctggcattatggggacagagagcagggaccacgtcactgggcaaatggggtcgaggggactggggcaccagacgaggcctggtacgggagcgtcgctaggagaggctgtgggtgcttggtgtctgtgcgttctgtctttataataaagtctcgtggtgacccggaaaaaaaaaaaaaaaaaaaaaaaaaaaa

SEQ ID NO: 2801 - DNA, 2844 bp, Macaca Fascicularis
  misc_feature (1)...(2844): n = A,T,C or G
aattcactcaggacctaagagctttgggcagttatatccccctccccaacaacagactaacaggtcccattttgatatcaagggctggagtttcaagacggggaactgtacgggccacgctgtcctggcctccccggaggcctggctgccctcacgccaggaagggagcttccatttcctgtgggcctagaatggccgccccgctgcccccagtgctccctgggtgggggtggatcctggccagtcccccagacacgcagtctgctaaccagaagcagcgaccttcggggagagccagccaccagccagccactgctccagaggcaggcctggggccacccgggaggctttcctcaggatggaaaatatttgcctttggttgtcggctgctgccttgtcttgtgtctgaatggacaactggctgacttctctctcttccgaacagccatgaaatgcgaaggtgtttaagagtaaaaaccaggcgagggcagctgggcctggcgtctggctgttttgaacaacactcctgtttttctcctagagtgaacagaatactttctgcggttcagaatactccgtgcgctggtccctcttcccaggccccgccccagcccccacaggcctcacctccggctgctccagaccattccagaactccctccctcttggcttctagtcactcagcatctgggggagagagcctcttccagctgtacatggctagcttggcctggccccagaactgctgtgttctggaaagttgtaggagaatccctcttggcgggctctccagcatggagaatcgcaggcctctgctccggaaagggaggctcttgagaggtcagattcaccacggccaggacaaccaactgtgggggctcacaggggctggggctctgctttcagggtgagaggagccaccatctgcccccatgcccaccctgactgtaaatggctagactctggtgctggggacagctctggattcatatcccagctcctgcatacgtatatgctgggtgaccttgggcgatttacttaacctctgtgtgctttgtgtgcctaagctgcaagatactctaaattaaacagcaaacttccagtgctgttgcgagactaaatgggataatgtgcttggtagctggcagaggctcaataaagggtagcaacttccagggccaccagttcatcgcgagccaggtccaagtcttgtactttctgtgcctcccagggagccgcgtgtgtctgcgacagagctggggaggacattctggggctgggggctgaggtctgcccacagagcagtggcctgtcccttcaggcaggcagagtatcaccctggcggggtctcagtgctcctcaaacattaacgtgtacgtcttggtgacacagattctgatgcagcgggtcgggtggacagggcttctgtagctgtaaggaactcccaggtcaagccagtgtggcaggtctgtgaccgcagctggtgtggcaagatctcagctctggaagactctgggttgtgctgaggctgggctcagagagataatacaggttctgtcctgtccaaggagggccctccaggatttcaggacaaggctcaggctctgggtccccaagccctcagtctcaaagctcgggtcccgcagtggcctgggcaaccctccggactctccgtttagcatttgttcctggcagcaatgcacggacaaagagcagtttcatgctgctgaacttgcaatcacttcaaggcctgggcccctctgggcctcagtttccccagtggcacagtgggaagctgggataagctaatcccaccctttccccttagtaattcccccacattgttcttcccttcccttcaacccttcccaaaaccctgagcatccatcctagggggttggcccccatcccatgactgcagtcatggcgtacaagactcatgcagatgcataagaacagccacttctcacctggggcctcgatgttccaggcactgtcctaggcatttgcatctacaaattcctcaccacaatccaatcaccactgttttacatatgaggaaactgaggcccacaggggtgaagcctattgcctgagatcttgcagttggtaaaggtgcagggctggactcaggcccccacacacatgcccttgagtatttgtaagggaagcagctgtttggttttcttggcacagagcatctgcctggccggtgagggcatgaggaaagcggtgcccaatctagttggggatgggagggtaaaccggtactacctctttggagagttttctggcaatatggacccaaatgcaaattacatgtgccctctaacctgggcccaaagtcatctgcacaaggctatcaattgcagtgtcctttgcagcagcaaaacactggagatcccctaactgtccatccaagggggatgagggagatacacctgggaggttctactggctgagtactgagagaatggaagcaccacatagattaattggagcagtcttcaagttggtgaaaaaaagtacagtgcagaaagtgtgtacagggccnnnnnnnnnnnnnnnnnnnnnnnnnnnnnnnnnnnnnnnnnnnnnnnnnnnnnnnnnnnnnnnnnnnnnnnnnnnnnnnnnnnnnnnnnnnnnnnnnnnnnnnnnnnnnnnnnnnnnnnnnnnnnnnnnnnnnnnnnnnnnnnnnnnnnnnnnnnnnnnnnnnnnnnnnnnnnnnnnnnnnnnnnnnnnnnnnnnnnnnncacgaagtcaggctacagtgagctgtgactgcaccactgcacagtgtaggtgacagagcaagactctctctcaaaaaaaaaaaaaaaaaaa

SEQ ID NO: 2802 - DNA, 722 bp, Macaca Fascicularis
  misc_feature (1)...(722): n = A,T,C or G
gctgaggattcataaannnnnnnnnnnggnnnnnagggaatggccatggcagccacagaaaaaagaatttttnnnnctgagccaaggttgttttttgtttttttctcttttcttttttgttttcatttcattggaagatctccaatgaactgaacagctccnnnnnnnnnnnnnnnnnnnactgtgaatctgggccccaccactcttcccccttaccagttctgtcagcatccccctctccagcggcacttccatggattggatttggagactctggccatgaacacccgtttcttcagtgatttgttttgggcttttggctcaaaaccccaggctcttgtttttgtctaaactcttactctttcctgagcagcaggaggtnnnnnnnnnnnnnnnnnnnnnnnnnnnnnngctggacatgttctcaagataggcggctgttcatgacttttgcaccagaatgaaattgttagagggagggtttctggctgtggttctaaatggagccccaggaaactgccctcccccaggggtttatgctctgtagagccctgtggatcaatctcgaggtcctctagcaggggtgagggagagcagcgacttcagctgagtcnnnnnnnnnnnnnnngcaagcaatggtttcaaaattcaaggtccccaaaatnnnnnnnnnnatgttctgacctgtttgtgttatatagtnnttttttgttttttcctct

SEQ ID NO: 2803 - DNA, 632 bp, Macaca Fascicularis
gcaggtagcagggctaatggtgatttttcttttcttcattttgagcacgttactgctgttatcatttcagtctgagggtaaaatcattctaagaaaatccctagccaggacttaaccaggaaatgtgtggaaaggaagtttttggcagatttatgtgaacacaagcaccctcttgcttcttaagggaagaattccaggacttggaaaaggagacgtagatacagcagcaataagcacacctcagagggaggcctggggaaagggggcgggtgtggtggccagcggcctggctgcaggggcacctgcgcaataaattgattgtctttcgcatctgatttttcaagatgccatccttcaaaatcatgagctctggctgttgatcaaaagagaatttggattctcctctaaaagtcaatataggacttggcaaaagcagctggcagaagactcaacctggcctcccacaaacaggacagattattcaggtgatggcaaaaatggattctacatcaacagaggctatgaaagccatgaacagattccagaaagaaaactcaaactgggaagccaacccacagaacagcatttttggaccaggctgtaatcggaattgttgtcgtacatgctgaaca

SEQ ID NO: 2804 - DNA, 388 bp, Macaca Fascicularis
gtgctttcctaatttcaagcaatgataacaaaactgctgttttcttccacactcacttgccggagagtcaaattgaaggtcacgtatgtgtctaggaacggaagttaagaggtaaattcaacacaaaaatgaattctaaactttctgaaataaactaacattgctggttggaaatattcaaatgctgcttaaatacttcaggaaacacggggtaaaattcatggaacttaaaaaaaaactatgtgaactgctttaccaaatatcactactgaggaaatgtataaaataccacatattataaattcacatgttattacaatgccaaattttaaataaaaacctttaattttcctcatggtgtagttttattgtttcttcgacaatattc

SEQ ID NO: 2805 - DNA, 269 bp, Macaca Fascicularis
tagtgacaatgtatgcctttcctctcagaattcaaggaagagattgttgctttgctttcttccattttagtgtgagaatcctgtgtgtcccttcccaccacatccaccctctccatttttgaactcaaactacgaactaactgtgccctggtcctctccccagcccccaattcaccctccatccctcaccttcctccactcttaagggatatcaacactgcccagcacaggggccctgaatttatgtggtttttatatgttttaataag

SEQ ID NO: 2806 - DNA, 781 bp, Macaca Fascicularis
  misc_feature (1)...(781): n = A,T,C or G
gagactttacatcggttccnnnnntctgtgcacagcagcacttgccgccgtgcaggcccacctcnctggctctttgggtgnnnnnnnnnnnnnnnnntttagatttttctaggttatggccatttcgtgtcttttggggttgtactgtgggggtttgggtttgagggaagggagcagggtggtggttgaggaatgcttcagccttagctgccacctttcagcagcagtgaaatacaagctgcaacctcggctgccagggctcccttttgacttagtgtcgccactgccccttggtgctgtgcggtcctggtggaaggaggggaagattttggaaacctggtaccaaccagtaaagtgattttctgccctgttggggcctaaatttgggggcttttgggcaacctctccctgtaccacctctgtccacactcgattgggtcccaggtgtgtgtgaggcactctggtaaggtgctnnnnnnnnnnnnnnnnnnnnnnnnnnncgaggcttttgatgtattgagctggaggtgagtgccctggggactgtgttttaagctgcttccttggcatttggcatcactgccttctgttcctgggggagcatggatcttttgtcctcattgctctctaatggggagggctgagggctccctgtccccacaggggctatgttgggctctgccgcagccccatgcttgctctgaaaaccaagtgtcagagccccttccccttgtttttattttactattataattattattaacttcctgtaaagaaataa

SEQ ID NO: 2807 - DNA, 2141 bp, Macaca Fascicularis
gcacaagatgttgtccctcccgccagccaaggagcccatggccaagacagatgagggggtggcagccccagtgagtggaggtgctgcacgactccgatttttctccatgaagaggacagtatctcaacagtcatttgatggtgtctcattggatagcagtggccctgaagaccggatttcagtggacagtgatggcagtgatagctttgtgatgctcttggagtctgagtctggtcccgaatctgttccaccaggatctctttcaaatgtcccagataatgctgctgttcaagggagtcctctggtggatgattatggccaggggtcaccagcagccaacagttcagtttcacccagtggagaagacctcgtcttgcacccggtctcagtcgtggtcctgaaggtgaacgaggtgtcttttgggattgaggtacgtggtgaggacttgaccgtggccctgcaagcagaggaactgaccctccagcagctgggcaccgtgggactctggcagttcctgcgtggacagtgcccaggtacctgctttcaggaatcctcagctttgaagactggctacatcaggccagctgtgggccttcgctttgaggtggggcctggagcggccgttcgttcccccctggcctcacaaaatggcttcctacatttattgcttcatggctgtgacctcgagctgctcacttcggtgctcaatggcctggggcccttcttggaggatgaggagatcccggtggtagtccccatgcagattgagcttctgaactccagcatcaccctgaaggatgatatcccccccatctatccaacatctccaggccccatccccatcactctggccatgcaacatgttgtgctgaagaggactgatgatggtgtgttccacataggcgctgctgctcaggacaaaccatcagctgaagtacttaaaagtgagaagagacagcccccaaaagaacaggtgtttttgatgcccacaggagaggtttttgaacagcaggtggaagaactgcctatcctacaaaaagaacttatagaaactaaacaagcattggccaatgccaaccaggataaagaaaaacttcttcaggagattaggaaatataaccccttctttgagctctgaaaccagtggctcagccatctgtgccaaggagagaggccatcaccagcagtagcaccacctaggacagagggcactgtccagtgctgaataagtcactacggatgccagagggactggggagcatgcacttcacttgtgctttccactggctgttcttacttggatggaggacaagggcaaagcatgactgtatcccaggaaactggggcttgccctgtgtgtggcacaagcatcatgtcttgcctgtatgaagccttttggccctctgtgtactaggtggaatcttctcaacactgtagggccatttcacctcatggtttcatggcagggacatttgcttccttcacaagcctgtgtgaacaagcaaaagtacccacctcttcggtcacccacagagccaccaaagattccatgtcccagagcttcccatagcagacctgaaaagtccttggcctgagctttggccatggtagtggagtggaacaggaaatagcccagcagaggagtgtgggggaagggggcaggagagatccaagaataagggagacctggactctgcctttttgggaaaaggaaccaagcccatatcaatttggctgataacacaatcagacttttccaggttaagcttcctttctgttatactttcatcattgtgatgctgtggtagaaagtaaacaacagtagtggctcagtcatttaatctttcccctctgtaatacaacttatttgaaatttaaatcaagaaaaaatttctgactctgagctcggttggtggcatgctatgccaggggtcagtgggggagcttgcttctgagccccctgttgtccacctggagtcctgcttgtcttccccagctgtgctgagtggctcttctgtctccctggggtccttggcacatctgctttcccagctctgtgaccttaccagttctctcctcagcacttggtggtctgggagctaaaaatgtgttttaaacttttacataaacaactcaacctg

SEQ ID NO: 2808 - DNA, 718 bp, Macaca Fascicularis
  misc_feature (1)...(718): n = A,T,C or G
tcagcagtcaggcagggagagcagaaatgcaaaaatacagatgtgtctattttnnnaaactggggggtggaggggtgcnnnntgatagcttccaaaaagctgaccatggagnnnnnnnnnnnnnnnncacccctgcccaagagtctctctcctttgggatccccgggttcccagagctccgaggaaactgatccttcatgtttcaatagctgttgttgtttttctcttctgcgccggccagggaagggccgagcaggctccagggggcctccagggtcagctggaccccgctgtgttgcnnnnnnnnnnnnnnnnnnnnntgagtgaggtgggataatttcaggaggtcccagcctgggactgcccgcccctctgccctgggaannnnnnnnnnnnnnnnnnnnnnnnnnnnnnntttttgttgttgttgtttttgttgtttatttgttctccttttaaggaattatgaagctaagaaaagttttgtgttttgggggttggtggacaaagttctagctgattaaatatggtctaacttattgatactattttttttcttttaatgttgtactgtggagaaaaactattttgagccatggggttggtgtttacaagaactttccacttttgccaaaatgttacaattgaaaggcatctgcgtcttcagtttcctaatattttcttaaaagatctagtgtcctttttgtacactaaacag

SEQ ID NO: 2809 - DNA, 705 bp, Macaca Fascicularis
  misc_feature (1)...(705): n = A,T,C or G
tcctgtgagccaggaggataatcctcacatatgaggtacttagtagttgcttgttgaatggatgtgaaaaataggaaaactttggacaaatgtaatgatagaaactttttgggtttctctgacctggcagttccacagtgcannnnnnnnnnnnnnnnnnnnnnnnnnnnnnnnnnnnnnnnnnnnnnnnnnnnnnnnnnnnnnnnnnattgttatagaaatctgcttctgtttttggcttctctgatggaaggaaaaggatgtctgagtcctggatgtattgtatgaaccttgactatacttacataaagcataaaataactaagaaatatgctcaccctataaggatttatgtggagctcagtcacannnnnnnnnnnnnnnnnnnnnnnnnngcacggtttggtgctatgttaagagagaagnnnnnnnnnnnnnnnnnnnnnnnnnnnnnnnnntggtggctcacatctgtaatcctagcactttgggaggctgagacagacggnnnnnnnnnnnncaagagttcaagannnnnnnnnnnnnnnnnnnnnnnnnccgattttactaaaaatagaaaaattagccaggcatggtggtgggcacttgtaatccctgctgctcagaannnnnnnnnnnnngaatcgctnnnnnnnnnnnnnnnnnnnnnnnnnnnnnnnnnnnnnnnntcactgcactcnnnnc

SEQ ID NO: 2810 - DNA, 770 bp, Macaca Fascicularis
  misc_feature (1)...(770): n = A,T,C or G
tgatgataatatanttcagtaagatttgagnnnttggacattttactctcataacctatgcagtactgaaatgaggcctaataaatataaccaatacatgtgaggccataagttctcaaatttagctacctgttcacctcaacttgagagctcttaaaaccctcagtgtccaggttgtagcccagactaattaagtaatgttttattcctagaaatgttttttttttaaagccacccagatgattccaataggcatcaaggctgagagccactgattcaggcctttctattcaaaagtatggtccatagacagcagcatccccgagagcttgttagaaactagaattcagggatcttttgtagacctagtgagacagacgctacctgtaccaacatctctggatgattcctgtgcataataaaatctgataaaggcaataggttatttttcctatgctggtaaatatctggcaggggtccccagtcaggaaaaagattggagtattaaggtctttcaaaggagttaactggccatactcaactataaaacctctaaaaatttctgtttttatgtctatgaattaaattttaactgatttttaagaaattacatttctgttatcaagaatacaattcttactagatcataggtgaaaatgacaaaatgatagcaaattaaaaattcaaataattatttttgacttttctagaagacataatggtctctggaaagcatatacagtagtctaattccaactgctactcattaa

SEQ ID NO: 2811 - DNA, 658 bp, Macaca Fascicularis
  misc_feature (1)...(658): n = A,T,C or G
ctgcaaagatggctcccaatgcttcctgcctctctgtgcatgttctttctgaggaatgggatttaatgacctttgatgccaacccagaggacagcgtgaaaaaaatcaatgaacacgtccggtctaagaccaaggttcctgtgcaggaccaggttcttttgctgggctccaagatcctaaagccacggagaaggctctcatcttatggcattgacaaggagaagaccatccaccttaccctgaaagtggtgaagcccagtgatgaggagctgcccttgtatcttgtggagtcaggtgatgaggggcagaggcacctcctccaggtgcgaaggtccagctcagtggcacaagtgaaagcaatgatcgagaccaagacgggtgtaacccctgagacccagattgtgaattgcaatggaaagagactggaagatggnnnnnnnnnnnnnnnnnnnnnnnnnngaaagggcaacttactcttcctgacatcttattgtattgcagggtgaccaccctggggatggggtgttggcaagggccaaaaagcttatttcttttaatctcttaatcaacgtgagaatgagatgagtagagtaagatttgggtgggatgggtaggatgaagaatattgtccaactctgtttctttgattctaacacaa

SEQ ID NO: 2812 - DNA, 685 bp, Macaca Fascicularis
  misc_feature (1)...(685): n = A,T,C or G
actaggcttactgacatgctattggtaaanngcattaaagnncnnctgaaccttctgtctgttgacttcttagtcctcagacatgggcctttgtattttagaatatttgaatttgagctattgggccccactccctgttttttattaaagaacttgagcctgggatactttcagaagtatctgttcaacgaaaaaaagttggtttccctatcaaatatgaataaaattatctatatattttcatcgtattttggttatcagcagtcatcaataatgtttttccctcccctctcccacctcttatttttaattatgccaaatatcccaaataatatacttaagcctccattccctcatccctactagggaaggggatgagtgtatgtgtgagtgtatgtgtatgtatgatcccatctcacccccacccccattttgggagtcttttaaaatgaaaacaaagtttggtagttttgactatttctaaaagcagaggaaaaaaaaacttatttaaatatcctggaatctgtatggaggaagaaaaggtatttgttaatttttcagttatgttatctataaacatgatggaagtaaaggtttggcagaatttcaacttgactatttgaaaattacaaacccaagtaattccattcaaagagtggtttccgttttgttttgttttaattat

SEQ ID NO: 2813 - DNA, 695 bp, Macaca Fascicularis
  misc_feature (1)...(695): n = A,T,C or G
tgcatgcagtcttccttctccagcacctccccgatccctttttcaggcaggacacacaggacacagcccgatcaggacactcaggaaccagcccagggccacacacacagaagccgcgcccaaatcaaggagcacacaggccccaggggaccacacacagccacggatgcacacagccaagacacacgaaggagccgacagacacaggagaaaagacaatgaaaggccacctaggacacattaccaccctctgtaggtttccagagcaacctcatccacagtcatggatcacctgccaccaacaagcctacaactcctattttacttcaagtctgaccactaccccgaatgtggatccgtctgctgaatgggcctatagctgcttcacagggacctaggagtcaatatgtccaaaaacccgaacttgggccgaacatgnnnnnnnnnnnnnnnnnnnnnnnnnnnnnnnnnnnnnnnnnnnnnnnnnnnnnnnnnnnnnnnnnnnnnnnnnnnnnnnnnnnnnnnnnnnnnnnnnnnnnnnnnnnnnnnnnnnnnnnnnnnnnnnnnnnnnnnnnnnnnnnnnnnnnnnnnnnnnnnnnnnnnnnnnnnnnnnnnnnnnnnnnnnnnnnnnnnnnnnnnnnnnnnnnnnnnnnnnnnnnnnnnnnnnnnnnnnnnnnnnnnnnnnnnnnnnnaca

SEQ ID NO: 2814 - DNA, 694 bp, Macaca Fascicularis
  misc_feature (1)...(694): n = A,T,C or G
cagagtgctgggattacaggcatgagctactgcatccaacntgaaccaaatttatcttataacgtagaagagaaacatttttggcttgttggttttatagaattaaacctaatttttgttctaatagcagttccattgatttgcagatttaaggtagtaaattattttcttgcagtgtctataaaagtaaatgaaattatgtcctatcataaaaatcctctatagataataaattatttacattttataggagagaaaaatacatgttaaagtttttgaacagacacacaggcagaaaataaatggcagtggatttgaacttggacttattttggacaagctgttaactggtatatattttgtcaatcttacgtcatgcacaagaatgatatttttataaatggaaagagtgagtgtggaagtgtcttcatttacctaacaggttatatgtggttgggcgccgtgactcatgcctgtaatcccaacactttgggaggctgaggcgggcagatcacctgaggtcaggagttcaagaatagcctgaccnnnnnnnnnnnnnnnnnnnnnnnnnnnnnnnnnnnnnnnnnnnnnnnnnnnnnnnnnnnnnnnnnnnnnnnnnnnnnnnnnnnnnnnnnnnnnnnnnnnnnnnnnnnnnnnnnnnnnnnnnnnnnnnnnnnnnnnnnnnnnnnnnatt

SEQ ID NO: 2815 - DNA, 767 bp, Macaca Fascicularis
  misc_feature (1)...(767): n = A,T,C or G
ggagcaagggttacggcagagggagaaagcactgnnnnagtcagcaaacaaaaataaaattcaagaaattctaataaaaacttttaaaaaatgttattaaggattttcacagnnnnnnnntgggctagaaacaagctgaaacagagatgcggtccctgctgctgtgaggcttccattctagaggcaaggacaggttatgatgagggctctgaagaatagagaccaagcagagagggtgttggggaggcttctgcgagacccgaaggatgggaagccaggaagtgggagggtggggatcgaggctggaggggccacagggcaggtgtagagggactgcagctctgaggggctgctccatgtagcatgcttggaggtccaagaggggcagccccaccttgggccaggctcctctccagcagccttggtatggggtgggggcgggaagacccctgatgcagcccggcctctgggtatgggggtggaagatagggctccggggacccagccagtcttgaccctggaggaaagtcaggtgggcacagagggagccctcaaatctgggccctgggtcagggtggggatcaagtccaaccttgaagagaatggactctggaatnnnnnnnnnnnnnnnnnnnnnnnnnnnnnnnnnnnnnnnnnnnnnnnnctttgagcaagataacttatccccttgtccccatgtgtcacggagataaactacccacnnnnnnnnnnnnnntaccacgctgggaaacaataagtgcttaata

SEQ ID NO: 2816 - DNA, 1051 bp, Macaca Fascicularis
  misc_feature (1)...(1051): n = A,T,C or G
accatggccatgttgtcactgtggcttcggcagctggacatatttcggtcccctnnnnnnnnnnnnnnnnnnnnnnnnagttttctgctgttggatttcataaagcttnnnnnnnnnnnnnnnnnnnnttgcaaataactggagtcaaaaccacatgtctctgtcctaattttgtaaacactggcttcatcaaaaatccaagtacaagtttaggacccgctctggaacctgaggaagtggtaaacaggctgatgaatgggattctgactgagcagaaaatgatttttattccatcttctgtagcttttttaacaatatggaaaggatccttccggagcgcttcctggcagttttaaaaagaaaaatcaatattaagtttgatgcagttattggatataaaatgaaagcgcaataagtgcctagttttctgaaaactgatttaccaagtttaggttgattcatctaatagtgtcagaattttaatgtttgaacttttgttttttctaattatccccatttctccaatatcacctttgaggctttggcagtcttcatttactaccacttgttctttagctaaaagctgattacatatgatataaactgagaaatacctttagaggtgactttaaggaaaatgaagaaaaagaaccaaaatgactttattaaaataatttctaagactatttgtggctcacctgaaggctttgcaaaatttctaccataactgtttatttaatatatatttttatttttgattgcacttaaattttgtgggatttgtgtttctttttctgttctacataaaatcagaaacttcaagctctctaaatataatgaaggactatatctagtggcatttcacaatgaatatcatgagctctcaatgggtaagtttcatcctacccattaccactctgtttcctgagagatacctcacattccaatgccagacatttctgcacagggaagctagaggtggatacacatgttgcaagtataaaagcatcattggatttaaggagaattgagagaatgtatccacaaaggc

SEQ ID NO: 2817 - DNA, 590 bp, Macaca Fascicularis
gttagaattcacagagctagttcaacaaagaaaagtagcattgtttgaccgcagagtatgcccatcctgttctccatgatgccaaatcatctttgcaggaaattcagggaagaattctgttgcttctacacccattccagaaaactacaaatggcaaaactgaatccaacctgtgctcatgagtagccttggctcttctccggttgtaactgttcaacaggttctccttgcctgtagcccagatagagccaatttatcgagacaggagtcttgcttgacaagtcctcaagcttcgaccatgtgtagactagtcagctgccggtgtgtgactagagcagggcttgttgtctcctcaagcttcagccgtgcgtggactggtcagtatccagagtgaccagagcagggctgtcatcctcagcagcagcttggtctcgtctcaggatcagcctggttggatgatctgtgtcctgctggctggtccacttgtcctgagctgccggtgttagctgactgtggtggatccaagacacaacacctgcaactttactgagttctagggcccgaattaatgcaatgagctcaccttatcg

SEQ ID NO: 2818 - DNA, 1800 bp, Macaca Fascicularis
cctttacctctgctggtgacaagaaggctgcatttctgcattctgcttaattccctttccttagatttgaaagaagccaacactaaaccacaaatatacagcaagaaggccattttctcaaacaagagtcagcctttaacaaaattaccatggttgacacagagatgccattctggcccaccaactttgggatcagctccgtggatctctccgtaatggacgaccactcccactcctttgacatcaagcccttcactactgttgacttctccagcatttctgctccacattatgaagacattccattcacaagaacagatccgatggttgcggattataagtacgacctgaaacttcaagagtaccaaagtgcaatcaaagtggagcctgcttctccaccttattattctgagaagactcagctctacaataagcctcacgaagagccttccaactccctcatggcaatcgaatgtcgtgtctgcggagataaagcttctggattccactatggagttcatgcttgtgaaggatgcaagggtttcttccggagaacaatcagattgaagcttatctatgacagatgtgatcttaactgtcggatccacaaaaaaagtagaaataaatgtcagtactgtcggtttcagaaatgccttgcagtggggatgtctcataatgccatcaggtttgggcggatgccacaagccgagaaggagaagctgttggcggagatctccagtgatatcgaccagctgaacccagagtccgctgacctccgggccctggcaaaacatttgtatgactcatacataaagtccttcccgctgaccaaagcaaaggcgagggcgatcttgacaggaaagacaacagacaaatcaccattcgttatctatgacatgaattccttaatgatgggagaagataaaatcaagttcaaacacatcaccccgctgcaggagcagagcaaagaggtggctatccgcatctttcagggctgccagtttcgctccgtggaggctgtgcaggagatcacagagtatgccaaaagcattcctggtttcgtaaatcttgacttgaacgaccaagtaactctcctcaaatatggagtccatgagatcatttacacaatgctggcctccttgatgaataaagatggggttttcatatccgagggccaaggcttcatgacaagggaatttctaaagagcctgcgaaagccttttggtgactttatggagcccaagtttgagtttgctgtgaagttcaatgcactggaattagatgacagcgacttggcaatatttattgctgtcattattctcagtggagatcgcccaggtttgctgaatgtgaagcccattgaagacattcaagacaacctgctacaagccctggagctccagctgaagctgaaccaccctgagtcctcgcagctgtttgccaagctgctccagaaaatgacagacctcagacagattgtcacggaacacgtgcagctactgcaggtgatcaagaagacggagacagacatgagtcttcacccgctcctgcaggagatctacaaggacttgtactagcagagagtcctgagccgctgccaacatttcccttcttccagttgcactattctgagggaaaatctgacacctaagaaatttactgtgaaaaagcattttaaaaagaaacggttttagaatatgatctattttatgcatattgtttataaagacacatttacaatttacttttaatattaaaaattcccatcctaaaaaaaaaaaaaaaaaaaaaaaaaaaaaa

SEQ ID NO: 2819 - DNA, 2374 bp, Macaca Fascicularis
gttgctagcaaccagcctgcggtctggaggtggtgcggagggagccgcctaggtgccggggactcctgccatgaatccgccggggtccctagcgggcctggacccgaacctggacgagcacttgtccacccagattctcgcgccctcggtccactccgacaaccctcaggagcgcatccaggcccggcgcctccgcatcgcggcgcgcctagaagcccggaggcgggaagcacttggagaatatttagatgggaagaaggagagtgaggaggatcaaagcaagagctacaaacagaaagaagaaagccgattgaaattggctaaacttctgctctgtggcactgagttggtgacaaatatccaggtggctatagatatcagagagattcacaggagagtcgaagaagaggagataaagcgtcagaggattgagaagctggagaatgaagttaagaccagccaggacaaatttgacgaaatcacctcaaagtgggaagagggcaagcagaagagaattccccaagagctgtgggaaatgctcaatacccaacagctgcactgtgctggcctcttagaagataagaacaagctcatcagcgagttacagcaggagttaaaaacaaaggatgaccagtatgtgaaggatttgaagaaacagtcagatgacatctgcctgcttctggagcggatggaagaacaggtgaagaacgtgatgaaaacctttcgtgaggagctctataacatcgagaaagcatttgaggtggaacgccaagagctactggccagtaataagaagaaatgggagcgggcccttcaggctcataatgccaaagagctggaatatcttaccaaccgcatgaaaaaagtggaggactatgagaagcagctgaacaggcagaggatctgggattgtgaagaatacaacacgatcaagatcaagctggagcaggatgtgcagattcttgagcagcagcttcagcagaggaaagcaatttatcaactaaaccaagagaaattagagtacaacttgcaggtgctgaagaagagagatgaagaaagcacagtgattaaatcccagcagaagaggaagatcaatcgcctgcatgatatacttaacaatctgagatcaaaatatgccaagcaaataaagcagtttcaggaggagaaccagtctctaaccttggactacaaacgtcttgtgttgcaattcaaggagctacagaaagccatgcggcattttgctcttattgatgatgagaagtttcgggagatttggctgatgaatgaagaggaggcaaaggatctaatagccagagcctttgatgtggacaggatcatccacacccatcatctggggcttccctggacagcacctgatttctggttcctgaagaatgttgggcctatttctcagcagccccagaagtccgccacgcagatagtagaagaaatgctcatgcacacagaagaggaggaggcagaagaggccgcctcggaaccagagtcctacctggacctgccgaagcaaatttctgaaaaaaccaccaagaagatcctgatgctcctgtgtgacgagtcggggttcctcatagagagcaagctgctgagccttctcctgcccctggagcagaatgaatgctatctgttgaggctggacgccatcttctccgcccttggaattgaaagtgaagatgacttgtataaactggtgaacttcttccttaaatatcgagctcaccgtttatcttccagtctccagatcaagtcctgcagtcaggcgagcatggagaaggcgagcatggaggagacaagcatggggtcagaattggagctggcagagcagacggagatggagggagcaaaggaagaaagcctggtggaaggggagaaggaggaagaggaggagaccccaccctccccctgggacatccaccccaatgatgtcctcaagattctggaggcctttgtcatgggtctgaagaagcctagggactcgcgggccccgccaagagtgcagaagaatatgcgcaacaactccaaggactcagagtactggcaggccctgaccacagtaatcccttcctccaagcagaacctctgggatgccctctacacagccttggagaagtaccacattgtcttgacccagagggccaagctgctgctggaactccaaaggccgatgtgttagggctggcctgatgctggtgtctatgcgggagccagctcatatcacccactgggacgcacctgggccggctctctggattttccagggctgtctttatagcctgtcgaaataaggagccagaggagttacctgtgtcctgcattatgattaaagccttttaaaagttaaaaaaaaaaaaaaaaa

SEQ ID NO: 2820 - DNA, 709 bp, Macaca Fascicularis
  misc_feature (1)...(709): n = A,T,C or G
gtacccatgaacataaaatcatacagtattttttttgtctctggcttgtctcagcataatgttttcagtgtttatccatgctataggatgtgttagannnnnnnnnnnnnnnnnnnnnnnnnnnnnnncattacatgtatataccacattttgtttatccgttcattcatccatgaacgaatgggtttccaccttttggctatggtgaataatgttactatgaactgtaaaaaagataattcaaaatcaaagctgttaaaactttaaattattctgagccttgaaggaaggtaattgtgggacctgagtcacttacaggcagctgtgaactttgtttccctaattatggattactccttttcctcttagctgcattgttttgtaaaatgttataaaagactgaagggtgccacagaagtttcctttcctcttttctgttgaacttcattatagattaactttcctcttccttctcctactcaaagacctcaggactgtcacactgtccaagatgtgttaagtgtactcttttaaattgaaaaaaagaaaataagctattattaatcaaattgctgtaactcataaaccaaacttaaatgggaaatgttgtgattctacctaatttcttagttttctgactataaagtaagaccttaaacttctcaacttcagagcacggacgccatttcttggagccagtgagaagggc

SEQ ID NO: 2821 - DNA, 733 bp, Macaca Fascicularis
  misc_feature (1)...(733): n = A,T,C or G
ttcctcaannnnnnnnnnnnnnnnnnnnnnnnncaactacgatgatgcagtccaggtatctaatagctcaatcaccaacaccctgtgagaattgttcctataccagcaaaaagttcaaatacaataatctgggcaatgccaatagaagacacttaatcatttnnnnnnnnnnnnnnnnnnnnnnnnnnnncggcaaaaaacaaactggtgaaaaatgttcaaaaatagatcgttttgatgttcttgttnnnnnnnnnnnnnnnnnnnnnnnnnnnnnnnnnnnnttgggggaaaatgtctgttaagactaatcttctgagtggtttgnnnnnnnnnnaaaccaaagggaaacttgttataagttattttaagccctggtttatggctagttccctattgctcaggaaaaatactactactttatggtttatgaaaacaacctatgatttatgtnnnnnnnnnnnnnnnnnnnnnnnnagtaccaggagctgaatcctacctgaaattattaatacttaatagcttctgtttnnnnnnnnnnnnnnnntaattgaaaaaaaaaaaaagcataatatactttaagtaattactnnnnnnnnnnnnnnnnnnnnnnnnnnnnnnnnnnnntaatacagaatgtgtcagttctcctgttgtattttactcagttatgagagcaaggctattttgtcagttcagatttcgtgtcttttttctgtcgagtatgtatggc

SEQ ID NO: 2822 - DNA, 213 bp, Macaca Fascicularis
ttcttccctgctcctttgccttccaagacctcacccaccgtgggccccagggtctccacacacacgtgtggccctgccaataaaaagagtccagcatctttctcatcccccacggttaaaaataagagggtctcctcagaccctatctctttggcaatgatattcgtgaactcagaatcaccctccttcgtgtgtaacaagaccacacctccc

SEQ ID NO: 2823 - DNA, 1643 bp, Macaca Fascicularis
aggctgttttacaaagatatccccacaaatcctccttaatgatttgccagaatttatttattacattgaaaagattttgtattttcttcccccttagtagcccccaaactttgtattaactctaatatgaagtgttcgaagagctacttgcagacaacttgtcagattgagcatggaggaaatgaagaggttgggcgaatgttgaatatttgctactcttttggacttgacatgaaagcaaagcaaaatgagacacagtcaaagaaccagcagagctgagcaaccatgagcgacattgttcaaggaaagcctagccgttctcttcctttaacctccccatctccctgggtgcgatcatgtcatttctcttatgctgtctgcatcactcatcttgaatctcagtaattgtttatgttcctggataggcaaaaaaatctaactgcatttctaatcaacatctgcagtaagctgaagtcttttctagtctttgttggtttgctcggcaggaaaacaatgacctgatggactcctgctgtccaaaataaaaaagaaagaaaaaaactgaaaaaatgaaagaagacattaaataaatattttactcatatagacgtgggcctgcttcagaagagataacctagcatttgttaatatttactttcctttagaaaatctgaatcagaatttctgataaaattactttataatgatactgctatttaggaaacactgataggccaggatatctttgtatttatttagtgcattctctatgccagacactatgagaagaaattgaaaggtttttatctacactgtttacatagaagatcatatgaagaatttcattaaatgaatttcataaaaatgcagaaatgcatttctttaatcttgttccctcattaagtcatatgaaatctcaattaatggcacatattttgataaatgcaataagtgcttcaaaattttccagatatttcattaagtcatatggaatctcaattaattgcacatatttagataaatgcaatagtttcaaaaatttccagatatttcaaaattggctaagcacagtggctcatacctgtaatcccagctgtttggaaggctaaggctagtggatcacttgaggccaggagttcaagaccagtctggccaacatggtgaaattccatctctactaaaaatataagaattaaccgggagtggtggtgtacacctgtaatcccagctacttgggaggctgaggcaggagaatcgcttgaacctaggaggtagaggttgcagtgaactgagatcgcactactatactctggtctgggcaacagagcacagctagactgtctctcagaaacaaaaacaaaacaaaatatcaaaatgtaggatcagctcccacctctttcacttgttagctctgtgaaattgaacaactggcttaacctccctgagtcttcactgtcccatctgcaaatgtgggaaatgcctacctcaatgtgccaggtgtcaaaagtaaatgaaaagacatgaagaactttacaattgtgcccaatacatagtaagcactaaataagtaagagctaccattgtttttcactactatattttattattgttccccacaccttatactcctcagccattttacc

SEQ ID NO: 2824 - DNA, 705 bp, Macaca Fascicularis
  misc_feature (1)...(705): n = A,T,C or G
aaaatgaattcaatatgatacttgcagagtaagtatacaaagaatgaggggactatgaaagaaggnnnnnnnnattggataaatttctaaatggcaattacttttaaatttgcctgaaacattttgtataaggcggaaatgtagaactggtgaagttgggttctcatatcattatttggataaagttcgattcactattcaatatnnnnnnnnnnnnnnnnnnnnnnnnnnnnnnnnnnnnaaaatgtttaactaacatatttttccttctagctccatagagaaaattaacatctgttgcataagtctctggaggaaaaaatatatatattctgaaatgctgactttatccnnnnnnnnnnnnnnnnnnnnnnnnnnagagaggtttgtggtaagaattagtgttggtataaaatccctattcctttttcaagtgggattttgcataaaaagaaaatgaggccaggtgcgcannnnnnnnnnnnnnnnnnnnnnnnnnnnnnnnnnnnnnnnnnnnnnnnnnnnnnnnnnnnnnnnnnnnnnnnnnnnnnnnnnnnnnnnnnnnnnnnnnnnnnnnnnnnnnnnnnnnnnnnnnnnnnnnnnnnnnnnnnnnnnnnnnnnnnnnnnnnnnnnnnnnnnnnnnnnnnnnnnnnnnnnnnnnnnnacccagnnnnnnnnnnnnnnnnnnnnnngagatagcaccac

SEQ ID NO: 2825 - DNA, 735 bp, Macaca Fascicularis
  misc_feature (1)...(735): n = A,T,C or G
agccccagctgcagcttcgggtctcgcnnntcggcctccgcacttctccctatggcagcagcctggacctcagcactggcaggtgagtggtctgggggattgatgcagtctggaagggcctggnnnnnnnnnnnnnnacccttgctttctgtggcagggacacaggatggtacctgtgggtaacacaggatggtacctgaaaaaggattctgaggctgaaaactttgagaaaaacaaatagaaagagatgaacgcnnnnnnnnnnnnnnnnnnnnnnncattcccctgccggggaatccaggctgtgctgtttcccagttgtatttgctggtnnnnnnnnnnnnnnnnnnnnnnnnntctgctcggaatagtgttctttggaacatactttggnnnnnnnnnnnnnnnnggttaagagcgctggctttggtgtcagacccagattcaaattcttgctctgatgcttcctggctgtgtgatttttgacaagtcacttaacccctctgagcctcgatttcctccttctgtcaaatggaataatcatactattttcatcttaaagctgttgtgaggattaactacgagtgaatgcagtgtttcccaaagcgtgtnnnnnnnnnnnnnnnnnnnnnnnnnntgatttcaggttttatgtgagtaaactttaaaaaaaagtnnnnnnnnnnnttttttgagctttagaaaattaagtatcatgcctcagcccctgattca

SEQ ID NO: 2826 - DNA, 411 bp, Macaca Fascicularis
ggttttgaacatcagccctgcttcttactaattatatgacccctgagcaaagttacttgggttctccaagcgttagttctccctactagcacctttgtaggaatggaagatgcttacacagtgcgtgccctgtggtggaagagccagtctgtgcacgagataagtgaggcacccatctctgtgtgtacaccattctgcacacccacgaggcttgtggagaggaaactgccttttgcatcagcctcaaacactttaacacgtcagatcaggattcatcttttaatcaatcaaaggtaccctaagataatatgcagccacttttctctcttaatggtatgtaaaacagcatattctcacagatattatcttaatttactgaaacagcactgagcaggagtggtggtggtgtgc

SEQ ID NO: 2827 - DNA, 713 bp, Macaca Fascicularis
  misc_feature (1)...(713): n = A,T,C or G
cgaattaaacgacttctcacaannnntgcttctaccacctgacggggtttggggcatgctacccaagaatatggcacctagacatactgaatactttaaactgaaggaatttgagaaagaacatatgcaggaatgtctctaactttcttgcacctttctgcnnnnnnnnnnnnnnnaataccctaatgtgagagttgccctgtctatacctggaataaaagtaacatctttatcnnnnnnnnnnnnnnnnnnnnnnnnnnnnnnnnnnnnnnnnnnnnnnnnnnnnnnnnnnnnnnnnnnnnnnnnnnnnnnnnnnnnnnnnagccccatcacattttcccacaattcttcattcttcttcaaacctactctaaagaacactaaggttaactatttatttgggtctttatttctttatgaagtttgcatgttatgtaaaactaacaatatttatgcttttctcttgttaatttgtcttttgttacagcatcccaagccaatgagcctaaaatgggtagaaggaaaagataattcttaccctacacacccaggtgcaagccatcattattttgtctgaaattttagcttcctaactggtttctctgcttccccattgtgcctttagggttagttttccacagagcagcctgcgatatcttttcagatcattatatccctttgcttaaaaacctctgacagctttctattaggct

SEQ ID NO: 2828 - DNA, 1734 bp, Macaca Fascicularis
  misc_feature (1)...(1734): n = A,T,C or G
atttgaaagaaatggataatatgcatccttccagagctagtatatattacagctgtccctttggactcactccagaaacagctcagtgactcttagaggaagagaattttagaggccctaactggggtccagaaaattgtactgaaggatacttgcttcccatgcatctccactatagtgaaatttgtttaaaattatgcttcttatccctcaaatccaaatttgagtctctgagtgcttttgatttttctttaaccatccatttcttactatttctattgctgtctctctttgtttaggcgcttgttacattttcactgtagtaatttcaacaatttagtttttctacctgctcttctatgctctaggattgtagtgacacccccccccacaaccccccacataaaagaccctatcctgaaaaagttcgtagcctaataggaggtcaaacataactatagataattttaatgagtatgttgaggtatggttatagaaatacatataaaaggctgtggtaacatttaaaaagggagtaactgactctagaaatatttaaagtaagtttcaactgcagtaataagaccatcgaattattaacccagatttgaatcatgttgtttctgtagcaaatgaagagggaagttttgttctgttccaaatcagcctaaagattcatttggtaatttaaaaatcagaaaagctttttttttttttcctcctagttaatgagttgtaggggggtgaaggaaccatctctctctctcctctggaggctcagtatttgggtctgagaaataaacttgacagtagacagattaacaggggaaaaggtatgtaaatgtatcgtatgcatatgcataggggtcctacaaagtatgagactcagataagggccagagagctgaagcttaaatagtacttttagctacagaaacaaatatggcttaaggctcctggagggtgaggggaagaactgcactgtaaacaaaaattgtcttgctgtgtggataaagtctctcaggtagtagccctcagaagactaggtgaaaagtctgtatgggcctggtgtcttgggtgtgcagacctctagtctcctcttctgtgataggagttaatgtagattccagagatgggattcataattacattccttctggagaaacttccctcttgataagggaaacttcagagaaagccctttcttcactttaggagagaagaggatggagagacagaggtacacgggaatgtcagaccttggttctgttgctacttttttagttcaaagaactcatcatgtcaaagcatcatactttggggtatagtttcctgacccctaacatgagcaaataaagagatgtaactgagttagccacaaaactatttttttcctgttggctctatctaagaatgagagtggaaaacattttgtcaacatatatctaaaagtatgggtaaaacttgttttacaaactgttggtcattcagcaaacatttaaacagcttctatatttgtggaacataaataactagaaaatagaagctgcttattttagcaaattgtggctgtttgcattgattgggctgccagttgtgccattgtgctgaggcaggagaattgctctaacccagtaaacaggnnnnnnnnnnnnnnnnnnnnnnnnnnnnnnnnnnnnnnnnnnnnnnnnnnnnnnnnnnnnnncaaaaaaaaaaaaaaaaaaaaaaaaaaaa

SEQ ID NO: 2829 - DNA, 722 bp, Macaca Fascicularis
  misc_feature (1)...(722): n = A,T,C or G
gnnnnnnnnnnnnnnnnnnnnnnnnnnnnnnnnncagtggggacagaaatctgactcctcgctggacgctgaggtgtgacaagccctgccaagacagacctgcaagtcttcatctcaaggggcctccctcatgccaggcctctgcctctcacagcagcaccccttcctctcattgcctctgttccctttttgcctctggatctgtttggccagggccctggggtcaggaatatttgcaagactcagccagttccttcccagcccagcctcttggggctgggaccttctcaccctgcagnnnnnnnnnnnnnnnnnnngacccagcctctgcccacggcacagcacaggtgcacatcagcactatggggcctacgtcctgcccagagacctctgctccttcctgctcgcatccagggtcagggcacggcatccctcaagaactccagagtcacctgtctcatctgctcccagcaagtgcctctgtgtctgtgatgtcacccttcactgaggcctggacccacccatctttgtccctggggcctgctcccagccaccgaggcccactctggccagatggggaaggagctgccatgcatcttccccgtggcatctccctgcttggttctcccctcccttccctggcctgctgccctggccaggaattaagtgcctttttgtgtgcaaccacttcccctttctctgaaaatcctattctcaggaag

SEQ ID NO: 2830 - DNA, 678 bp, Macaca Fascicularis
  misc_feature (1)...(678): n = A,T,C or G
annncattcatcannnntcccatcagnnnnnnnnnnnngaagcatccagactgcaaacgtgcttcccgctgcatggctgcacccccgccccgtccgggactagccagcagcctcccttttgacttctctggaatgttctgttctccacacagcagccacagtgatcccttcagagcacaaatctttccatgtcaattcctgttccctccagtatcttcccaacacagtggaaaggaaacaccaggttcttacctcaggcttcaagtgctgatacggtttggctgtgtccccacccaaatcttgtcttgaactgtaattgccataatccccacgtgccgagggagggacccggtgggaggtgattggatcatgggggaggtttctgccacgctgttcttgggacagtgagtctcatgagatttgatggttttataagcatctggcatttctgctgcttgcactcgttctctctgctgccaccctgtgaagaggtgccctctgccataattgtaagtttcctgaggcctccccagccatgtggaactgggagtcaactaaacctcttttcttaaattacccggtcttgggtatttcttcataacagtgtgagaaaggactaatacaaagggcctacatctgaaagcagcaaattacaaccctagggccaaatctggcccc

SEQ ID NO: 2831 - DNA, 1274 bp, Macaca Fascicularis
taacaaacacacaaactaagataaacatggatgagttgtttaagagaattcactatatttttaggatctaaataagcaatatatgcttcaaaataggaatatatagagttatgatttgattctatttgggctaaatttttaaacttaaagcaaaattacatagacactaattttggagtagtaaaaaatatagaaaaaaaatgcctgcaaatgttcttttattttggaaggacagtgctacttaattcgtattcactgtatatttttcactttcaaagtataacaattgttgtttagttgccttctcttaaaataaaatatcattaggtaaagccttgaaattgtgatgattttattgagacaaatagaaacagtctttgggtataaattctaaatttgcatttcaattcttccctccttcctcaagccacattaactgaaacatacattctttcacttgctcttgaagatctaaatatttgaggtgttaaattattaaaagttgattccttatttcctttcactgactcatattaagaaatgacaccttaaaaatatgtttgtttgtttcatcataaatttcatcatgatgcattcatttcactattaagtgctttgatatttacagtcataaattgataccactcttgtcagttgttcctaataagacttaaagaaacaatggaaatacacattaattaggtttgagtcttttttagtatggtcaccatagatgaaaaaatgatattttcttctctgtttatagttctgtaaaagtaatagcagagaggtcagccttgaagtactttaggttgatgttcaaaccacaacatggacaaatattgccttggtccagtggttagatcaaggggtgaaaaagaggtcttagatttgaagtggactcactttacttctttaatattggacaagtaaatatatatctgacctttctgtgatataattttttcatctattgaactaggataataactttccaagtaacttgttgaaatgattaatgaggtactattcaaaaaccactctgaactccaccataaaaagcttcagtgtaaataagaatgattattaaccataagccctactgtttactgaaaaatgcaaaatataatgtagctgtattattttcattgttattattagttacaatgctggttataatactccctgatgtagaaacaagtgttatggttacatttttactaaagtgaataataaacatgacctttctgtcaaaaaaaaaaaaaaaaaaaaaa

SEQ ID NO: 2832 - DNA, 673 bp, Macaca Fascicularis
  misc_feature (1)...(673): n = A,T,C or G
caatataaaaatatttattttaatactgagtttcagttaagtcataaacagtgttaaaactcttgggaaggtgtaggggttttttgtttgtcatttttaaaattgaaactgtgnnnnnnnnnnnnnnntgtctctnnnnnnnnnnnnnnnnnnnnnnnnnnnnnnnnnnnnnnnnnnnntactatgtggtaatgctattttgnnnnnnnnnnnnnnnnnnnnnnnnnnnnnnnnnnnnnnnnnnnnnnnnnnnnnnnnnngtatgttattcaatttaaacttttaaaccnnnnnnnnnnnnnnnnnnnnnnnnnnnnnnnnnnnnnnnnnnnnnnnnnnnnnntacaattaatatgtggttatatatatatatatataaagacacaaattgccatgttatggttctgccttgaaacagcacaatgaagtgtatcagtatattctgtgattatgaaacttccatgttgtgttgttttgtgtctgctgttgcctgtcctttgggccagatgtggcgcagttannnnnnnnnnnnnnnnnnnnnnnnnnnnnnnnnnnnnnnnnnnnnnnnnnnnnnnnnnnnnnnnnnnnnnnnnnnnnnnnnnnnnnnnnnnnnnnnnnnnnnaagctgttcctacctcaccatgaggctttatggattgttatgtattataaa

SEQ ID NO: 2833 - DNA, 488 bp, Macaca Fascicularis
  misc_feature (1)...(488): n = A,T,C or G
gctgagagaataaatttctgttggtttaagccactcaatttggggataactatggcagccgtagcaaactaatacatactaaagatacatactannnnnnnnnnnnnnnnnnnnnnnnnnnnnnnnnnnnnnnnnnnnnnnnnnnnnnncaggcaagtgctctttttctttgcttggtatcctacctcactttctgtctggtaaaattacactcattcttttagatgccactgaaatagcacctcttcagcacagccttcactaaactacccctctctccatcttggtaaatttagttacttcctcttttgtgatcacatactttgtagtatctctacatttatgctataggacttgctacactatattgtattacttgtttatgtcttccccacttttttgtgagcatctggaaatatgaggatgtcttattggtctatttccagaacataagcacagtgcctggcgcatattaaagacttaataaa

SEQ ID NO: 2834 - DNA, 752 bp, Macaca Fascicularis
  misc_feature (1)...(752): n = A,T,C or G
caaagtgcttggattacaggcttgagccaccgcgcccggccaaaacaagacnnnnnnnnnnnnnnnnnnnnnnnnnnnnnnnnnnnnnnnnnnnctttccacannnnnnnnnnnnnnnnnnnnnnnnnnnnnnnnnnnnnnnnnnnnnnnnnnnnnnnnnnnnnnnncctgtctgcccggagacagggagcatctggcggtggccatgcctcctgcagcagaggggtggtgagggggccaggggacatcagannnnnnnnnnnnnnnnnnnnnnnnnnccagtgctctggtcacatttgagggtcttcctgacaaggggacacagctgtgacacggtaannnnnnnnnnnnnnnggcnnnnnnnnnnnnnnnnnnnnnnnnnnnntcacccccggnnnnnnnnnnnnggnnnnnnnnnnggcatcaggtgaaaacgttctgttcctggtacttgcgccggcgggcacagtgggggcagcccttcttcaccacagccnnnnnnnnnnnnnnnnngatggtcttgcactcggcacacctggggagagagcagcacgcctgctggtgccagctgggctggaggttgccttgtggccacgnnnnnnnnnnnnnnnnnncagaacccacgatacgtctgtgacatactgtgtaacccacgcacgcatgccgtgcctctnnnnnnnnnnnnnnnnnnttctcgaaagagtgcttactgatatgtcacacaatgcacaatgatttcctctgtactatgc

SEQ ID NO: 2835 - DNA, 2061 bp, Macaca Fascicularis
  misc_feature (1)...(2061): n = A,T,C or G
tagggacatgcatagaatctgtgtgtctcgaaacacagcagcttcccttatgggggaagacatccaccctcttgggaagctgcaggtgagaactcggaagggctgatatcatcggaggccctatcaagggcagctgagagttggataaaaccgtttccaaggaggaggctgagtaagccagttcaggacagccaagcgcattgggcttgattggggaaggtggcaggtggagctgggaggttggggctgtccaccgtttgcaccacgggtgcctttccctcgctgtgccactcctctggggcaggatcaggtctgctctctggagtggggctgcctgcggtgcagctgtgcacgcctggacgtgctttttatcactcgtttagaaatgatgtgattgaagatttcaaacaggtcattggaagcttttctgtactggcactgaatgtttgcacgaggaagttgcaaacgacttctataggctgagattcaaggtgagtggtattggggtccctcagcccacctgggccctgacctcagtgtccgctgctgtgtgtgagtggctttgcgggcctggtggcgggagaacctcaggctcccttattccttgttcctgaccatgccctgggccccttcggtctggctgtggctctgtggtgtccctgccctgacactgggcacctgcatccctagcaagcccatctggcacacgagggggcgggggcggccgtggccttcctctagtcacatgtcctgctggccgctccatttcagctttgtgcagaaccaggttggagctggaggtttttctctgggaacctgcatttgtgctgcagccgcctgcgagggccctccagccactggctctggcttccctgactcctcagggcttgttcacccccaggctttctcgcctgcacatggttaggccattttcagtgctcgtgggagtcacggacagcagcagaacctcctcagccccttggttacttcagaacgcctgcccacatgcatcttccaagctcgtgttgtcctcatggctgtggggtctcaggtgcgaacaggagacactgagctgtggtccaccatccgaggcgctgcagaaagcagctagactcttctaggatgtttccattctggttgctaccttcatggtgtaacttttaagaacacgtatgggaatgtgctcatagaaccaccacctgccctgagaagaaaactccttgaatcacgatcaagtccagtgttaacgtgacccagcctgtctttactctggggagagaccagggacatcatttgactacgcatcctcagaattatttagagaagaaagcagcagataatttccattcggctggtagttttttgttgtttttttgagacagggtcttgctctgtcacctgggctggagtgcagaggcatgatcactgctcactgaggccttgacctcctaggctcaagccatctgcccacattagcctcccaaatagctgggaccacaggtacccaccaccaccacgcctggctaacttgtttttgtagagatggggttttgccatgttgctcaggctnnnnnnnnnnnnnnnnnnnnnnnnnnnnnnnnnnnnnnnnnnnnnnnnnnnnnnnnnnnnnnnnnnnnnnnnnnnnnnnnnnngccttggcctgcactttgaatgggaatgagactgtgcaaactgtggaataacctgtgtcacccacagctcagtggcttgcgtgccagccctccggggctgctggccgggagactagccagagcacgagggggtcagagctgtgtggttttggcctgattctgcatttggttgttcctggaggccatgtagcctgcctgcgttaggaaagcactgtgccatctgatcgtgagcccctccgcgccccctggtaaggtgaccttgcagcaggagctgtgccctgcccgggtaggcacccactgggtaggaccggagcaagcctggcagccgccacctgcacccacacacttgtgtttctcctcgcagttttaagtaaatctgtttttgaaggctaaaaaaaaaaaaaaaaaa

SEQ ID NO: 2836 - DNA, 748 bp, Macaca Fascicularis
  misc_feature (1)...(748): n = A,T,C or G
agcggggcgagaagaccaaggcccgggccgaactccaagnnnncggccccagcacccgtgtnnccccggcagtgttcttccctnnccggccaggcgttcctttccgtgccttggactcgggccccgcactccagttccccactttaaatttaggcctatcnnnnnnnnnnnnnnnnnnnnngctgtcnnnncccgannnnnnnnnnnnnnncctcaccgcacacannnnnnnnnnnnntgtggcccgcagccttagccccaagctgtggcctagtgccaggtggcccagcggttgggagggggaggccgagctgctgggcgagctgtggactggccggacccgtgtgcctccacagggtctggagctggcagacagggagggccaggatcctggcagatggcctcgaaccacacccccggtccttgaagccacttcccaggtgatgtggannnnnnnnnnnnnnnnnnnnnnncctgaagctggcccctggtgtgagcatgtggaaccggagcacccagatgttgttcagctcgggtgtgcctgaacaagaggacaaagaaggtagcacctttcctcccgttgagcaacaccccatccagacaggtgccccaaagccccaggtgaccgtagcacagctaatgaagaactcaacccccaaagtgtggtcacactcctctaagcccgctgcctcactctgatcccttagcctctggcagtggtaacaggcccctccctatgctgccagaa

SEQ ID NO: 2837 - DNA, 1680 bp, Macaca Fascicularis
aaactatatttgggcgaactccggtggaaaagtgccccaggctgtcacggcctagagatcttggggctgcagccctcgcggcctgccgacggggcagagggcgccggtggaactggctccctgaagctctgcggcggcaggcggacctcggctgtgtgcgaggtggcggaggaggctggcgggatgcgagccggacctcggcgccagcatcttttacctcctcaggacaaccgcgcagccgtgggctaccagaggcaggaccctgtcatcccaccgcagagagatctagatgacagagaaacccttgtttctgaacatgagcataaagagaaaacctgtcagtctgctgctctttttaatgttgtcaactcgattataggatctggtataatagacttttccctcattttattgataaaaggaggggccctctccggaacagacacctaccagtctttggtcaataaaaccttcggctttccagggtatattctcctctctgttcttcagtttttgtatccttttatagcgatgataagttacaatataatagctggagatactttgagcaaagtttttcaaagaatcccaggagttgatcctgaaaacgtatttattggtcgccacttcattattgggctttccacagttacctttactctgcctttatccttgtaccgaaatatagcgaagcttggaaaggtctccctcatctctacaggtttaacaactctgattcttggaattgtaatggcgagggcaatttcattgggtccacacataccaaaaacagaagatgcttgggtatttgcaaagcccaatgccattcaagcggtcggggttatgtcttttgcatttatttgccaccataactccttcttagtttacagttctttagaagaacccacagtagctaagtggtcccgccttatccatatgtccatcgtgatttctgtatttatctgtatattctttgctacatgtggatacttgacatttactggcttcacccaaggagacttatttgaaaattactgcagaaatgatgacctggtaacatttggaagattttgttatggtgtcactgtcattttgacataccctatggaatgctttgtgacgagagaggtaattgccaatgtgttttttggtgggaatctttcgtcggttttccacattgttgtaacagtgatggtcatcactgtagccacgcttgtgtcattgctgattgattgccttgggatagttttagaactcaatggtgtgctctgtgcaactcccctcatttttatcattccatcagcctgttatctgaaactgtctgaagaaccaaggacacactccgataagattatgtcttatgtcatgcttcccattggtgctgcggtgatggtttttggattcgtcatggctattacaaatcctcaagactgcacccacgggcaggaaatgttctactgctttcctgacaatttctcgctcacaaatacctcagagtctcatattcagcagacaacacaactttctattttaaatattagtatctttcaatgagttgactgcttaaaaaaatatgtatgttttcatagactttaaaaaacataacatttacatgttttagtctgtctttatattatataaaattgttattttggcaaaaaaaaaaaaaaaaaaaaaaaa

SEQ ID NO: 2838 - DNA, 2927 bp, Macaca Fascicularis
  misc_feature (1)...(2927): n = A,T,C or G
gatgcaacataaaaatttccgagacagaagaaatcttcctttgagggcaggattgaaatgctatttttcttccctggtacaatgttaaagctttaaactcttgtcaatgatgtgatgtttcatctgcaatgatctacactagaaaaataaaaatgtagttactgacaaaaaagcaggaactactgctgtaaggaaaaaaggagagctacatgaggaccacacaactcctggaggaggtttccctggcaacacaacttttccattcatctggttgcagtgttttcatccagtagcctgtcacctcactcaaaagcaaggcagatttataaaggaagctgctggagggaattcattcccttttcgctgttctgccttccacctttcactgtgtgaggacactgcaagaaagtcctcatcagacaccaattgccagcacctagatcttggaattctcagcctccagaactaacctaactgcagcatggagatggctacttcaagctataatcaaagctttgcgtcttgatccattgctgtggctggagtgtgggagtgtaatcaaggttcactgtattcttgacctctcgggctcaagtggccctcccacatcggactcctgagtagctgggactacagatgttcatcaccacacccagatactttttgtatttttatatatacttggtgccttgtgttgcccaggctgctttcaaactccaggattccagtgatctaccttcctcggcctctcaaagtgctgggattacatgtatgaaccacctcacctggcccattattgggtcttatagatattatgttgacatgtgtaattttactaacaggtgatattcatttccttaggccattaaatgcttttaaaaaatcaatgcgctcggtgatagaaaggagtattgaaacttccgactaaacttgtggatttctcaatttctcctagcagtatccacttttgttcatgtattgtgaatctctttaattcggtgtatattgtgggatctggccagcagcctgcaatgcaatggggctctctctttgttcccaggtggatcggcaggtcgaaaaataatagacacacacaagatagtgaaagctggatcccgggggtggctgccttctggtcccgtgatgccaacaatgcactggatataccagcatttaccattaagtttagtgagggcaggggtaggttagtgagagatttagggtcatttgattatgaggtgagatggtcacatggggatgaagtaattctttaacataacatctgtatgcagaagtatagtatacagatataagaatttacagtatagtgtgtgcatcagtaatttctaacagagccttgaaacagaaacacagtctttccataacctatgattagcaagatattaatcagcagtaacagttgcaacaaaagttagttacaaagaatccatagaaacaggtcatgaaactagacaattggttaggctagaaattctcagaagggagtatgccttaacccgaaagaggcctagaagagccgtggcaagatgagggcatttatagccctatcttatccatatggacaggtgcccctcatgtgtccttttataggctctcctcaagggtggcattccattcccagagctatgaacatctgcttttctgggacaggaatcttggtgatatgaaacctccctgactgcacgtccattcataggccctctgcggggggaagcacatcacgcgctgttggctccttctggcagtccaacctggcattgtctttacacaatcctgcatgcaattttgtgtttacaataatcaggagcatttcatcttttattccgtagcaatagtttcagcgggtcaccctcaggtgtataaacatttagaattgttatgtaatcataaaaattgacccttttatcagtatggaatttaccttttcatctcagataatatgttttggctttttgtctgataagaattgttccctaagctcttgtgggattcttttttcttgagacttgggtagttttcttatacacttgtattgataaatactcagataaagactcaagagagaccatctggagattcctggatctctctatgaagatctcttctcccaatactctacaaattctagccaatttatcctttataaactgtcaaatccatctgttaactttgtgagttttccaggctccacttgggttttcccacctttactctcccaaataagtaagttggagcaatcatatggcttacttgacttctttctttttgttcagtaatagttgtcacatgttgcctgatgtctaattgtgaaaatcatagattggataatggggaaaataagcgctttctactacctgagaatttgtaagaaataaagcagactaagaataataattaacaatacttaatttaggaataaaatgtatgtcttcggatagcaaagtatacatggtatacttttggcaaataattaatctgggaaatttgttctgcattaggcaacatttccgggatttgtggtgtttataaatgtcagctgaattacaaacgaaaacaattatcaatgtcggttaaggtaacactagatgctctaacagataaaaattccatctcaaggcctggcgcannnnnnnnnnnnnnnnnnnnnnnnnnnnnnnnnnnnnnnnnnnnnnnnnncatgaggtcaagatacagagaacatcctggccaacatggtgaaaccccatctctactaaaaacacaaaaattatctggtggccgcgcctgtactcccagctgctcaggatgctgaggcaggaaaatcacttgaacccaggaggcagaggttgcagtgagccaagatctcaccactgtactctagcctggtgaaacagctagattccgtcttaaaaaaaaaaaaaaaaaaa

SEQ ID NO: 2839 - DNA, 684 bp, Macaca Fascicularis
  misc_feature (1)...(684): n = A,T,C or G
tggatacttgannnnnagacgccnnnnngtgctgctctgtccggaggccagaggggccttccatctgcctgccgacccggagctctttccgccggcgcagggtccccagcccgcctcctgccctcagtcctgcggtgtgcgtctgggcacgtcctgcacacacaatgcaagtccgggcctctgggcccgcccgcccacgcgagccgtacctgccgccaactctgttatttatggtgtgacccccctggaggtgccctcggcccaccggggctatttattgtttaatttatttgttgaggttacttcctctgagcagcctgcctctcccaggccccaggggacagtggggaggcaggggagggggtagctgtggtccagggaccccaggccctgattcctgtgcctggcgtctgtcctggccccgcctgtcagaagatgaacttgtacagtggctaatttaaggggagtgggtgaccccgacacttccaggcactgtgcccggggtgcgggttttaaattattgactttgtacagtccgcctgtgggctctgaaagctggggtggggccagagcctgagcgtttaatttattcagcacctgtgtttctgtgaatgcggtgtgtgcggccatcgcagatgggggttctttcagttcaaaagtgagatgtctggagatcatattttt

SEQ ID NO: 2840 - DNA, 706 bp, Macaca Fascicularis
  misc_feature (1)...(706): n = A,T,C or G
actgtggctcaggacccagtccaggcnnnctacggnnnnnnnnnnnnnnnnnnnnnnnctgctttcccttccctagtgggtttttccagggannnnnnnnnnngctgctcctgctcccaaagcaagggcatcattcccattcttcagtggatgccagccttccctgcccccactccctccccagcactgggtcagtggtgtcctggcagtgaggctccgtgagaggaaccggggtgggaggtggggcaggcctcaccctcgggctttgctgccnnnnnnnnnnngctacccatagtccattttttaagggcagtgggaacttctgtctccacatcctgctttagtcccttccctttgctgccaggtattggggtaatagttcctccttttccaagaccaaggccaggaggctgggtcnnnnnnnnnnnnnnnnnnnnnnnnnaactggggtcaccctgggatctgctgctctggtctaagtctggacctttctgatccttgggtctgggttttttgaggaggggacatagtggcctctgggnnnnnnnnnnnnnnnnnnnnnnnnnnnnnnnnngagaaggaacccagcatctcagggccactgctccactgctctgggggctgggatgcctggctaagcaggggctgacagcaggtgactttccaagggtcagcacctgccttgtgttttgtacctgaacctaag

SEQ ID NO: 2841 - DNA, 738 bp, Macaca Fascicularis
  misc_feature (1)...(738): n = A,T,C or G
tgttgttatcatttaaatgagataattnnnggtgaaataaagtttcagacaaggttaaaagcccactttatagatattagacactagcttaaaatggatgacaggcatctacacggaaggcctgcacagcatcagttgcagaagcggtggtgcggtatgtttagagtgttctttcttcaaagtggactgacccatttggaactacatacacagaggccccagtgtgtgatgttccccttcctgtgtccaagtgttctcattgttcaattcccacctatgagtgagaacatgcagtgtttggttttctgtccttgtgatagtttgctcagaatgatggcttctagcttcatccatgtccctacaaaggacatgaactcatccttttttatggctgcatagtattccatggtgtatatgtgccacattttcttaattcagtctatcattgatgggcatttgggttggttccaagtgtttgctattgtgaatagtgccacgataaacatacgtgtgcatgtgtctnnnnnnnnnnnnnatttataatcctttgggtatatacccagtaatgggatggctgggtcaaacggtatttctagttctagatccttgaggaatcaccacactgtcttccacaatggttgaactagtttacagtcccaccaacagtgtaaaggtgttcctttctctccacatcctcnnnnnnnnnnnnnnnttcctgactttttaatgattgcattc

SEQ ID NO: 2842 - DNA, 120 bp, Macaca Fascicularis
aggagcagtgtgtcccccaggacagggacccttatcttccttactggttggctccaggccctgcctgacgtgactactccttcgagagcactagatcagggacctcgacgtatctctttc

SEQ ID NO: 2843 - DNA, 742 bp, Macaca Fascicularis
  misc_feature (1)...(742): n = A,T,C or G
agagccnnnnnnnnnnnnnnnnnnnnccccagctggggctccgggcccagggaaacagccnnnnnnnnnnncaacccctctcagagcctcaagaggggtggctcggctgccggcaagagaggggtgctctgtccctggcaacccctccacgttgcataccccagcacctgccaccgcctttgccatttctttgagcttgaagttaactctcttaagagtctaactttggttcatttctgcacaggtacaatagatgactttatttgtttaaaatgtttaatatatatacatacatatatatatatttgtctgtaagaattatgttnnnnnnnnnnnnnnnnnnnnncctttttttaagtaaatnnnnnnnnnnnnnnnattttttaaagcacaaaattggtgccaagactgggtgagaaatgtacattacccccttattattttgaggtttttgttttttttttccagggcaggggaccttatctgtaagactttcaaagattttcctccctcctgtttcaggtgggtcacattctggtgaatgtttccctnnnnnnnnnnnnnnnntatggccttgactcagccgtccccacggatgctgggtgaccctctatctctctctgcatctcccaccccctgatgccctgggaccctcgaccccacccttctttcctaccagcccagagccttgtggcttgtacagttttgaaactcccattctattttatgatggttggtaata

SEQ ID NO: 2844 - DNA, 2833 bp, Macaca Fascicularis
aagatgccaaatataaataaatgccatatctttttgtatgataggttggacagcacttcatgaagctagtgtaggaggattttatcggacagcaagtgaactattaaaaggtggagcagatgtaaatatcaaaggaatgtaccagattactcccctacatgatgcagtggtgaatggacattataaggtggcagagttacttcttttgaatggagctgatccattatttagaaatgatgatggaaaatgtgctttggatgaggccaaggatttatgtatgaagcgtctccttgagagatatatccctaaacatcaaaaatgcctgacatcagctcaaaggagtagcattgacccactagacatagaggatgtataccaacacaaggaatgaaaacaggtgggatcaacaagaggaatgccagaggggaaagccggcttcatttagctgccagaaaaggaaatctctccctagtgaaagccctgatagaatctggagcagatgtgaatctaaacgataatgcaggttggacaccacttcatgaggcatctaatgaaggatctattgatataattgtagagttattaaaagctggtgctaaggttaattgtgcaaatatagatggaactctgcccttacatgatgctgttgcaaacaaccatttaaaggcagctgagattctactacaaaatggagcaaaccctaatcaaaaagatcaaaaacagaagagtgctttggatgaagcagatgatgaaaaaatgaaagaattactaaaatcttatggtgctattgagactgataatagagatgagagagatgctatagtcaatgaaaaaattcctgctgtccagtctaaaagacataaacagtgtttttgtgatgatggcaaaactattgattcacctttcctttcacaccaagaaagatcaagtgaaagcctttctgtgcatcagaccctcagtgccattctacaagatatagaagaaaaacaagaaaatttattagagtttgaaataagaaaccctgaagatgcagaacaatacattgagaagatgttaaatataaaagagattatggataatgtgcttgccaagcagaaagcagaaagggatgatctggctaaaaaatacaggatatccatagagtcatttaagcatggagccctgagagaacaattggccaacttggtggcaagacagaagagtcttttagttgtggcaaaaaaacagaaaagaataagcctgaaaattcaaaactataagaatgttacatcattgccttgtcttagtttaaggaagttcccacccaggtcagaaaactgcagtgaaaaggacaaccaagaactcactagtctggaaaatttagagcatccccaatcaggtttactttctcctgtttgtggaagcatgcaggaaacacaattgtctctggaaacttggaactacagccaaaataccaacatttgtctaaattcagaggcagtgagaaggggagaattttctggaaatgatgtgaattctaaacaaaatgtcagtgattgtaccttggatggttttccaaaatcccaacattcagatggcacagagaataataaattaccatcccaacctgttgcttttattggtcaaacagaatattcacagaaagagaaagagaatgatcttacagaagctacagacaaagaccatgaattctgtattccttccccagtaatcggcaaattaaatatttcagaaactgcaagtgtccttgccgaaaattctgcccatccatcaaatattatttgtgatcaggacctttccaattatcatcccaaaagaggaaacaggaaaacaacttcccggcaatcacctacaggggcatcagaatccctggcacatcaaggggttgctgtcttaggcagtgatacagtgcatccgatgaaaccatgtcgtaaaaaatcagtttctgctgttccacgtgcagatgacagtcagatctcctcttcctctggatctgggcaacaagatattataaaaaagcctttaaactacagtacagctcctaaaaagaaatgtattcagataaaagatttgatattactaggaagaattaacccaggaaataacattctggaattcaaaacacaggagactacccacaaagccagcattttattgaatggtaaacttaaggtagaaagtggtcagatttataaaagcccagtcacctggctcaaggatcttctgggaggcaacagttatgtgacctggaattatgcttggagtaaggttacatatcttgggaaggagcttttaaagtatgtttctgaggatgcacccatacttccagaaccaaactcagtacctcagcaatatcaaccttgtcttccagaagttgcttgtttagatgacccagtacaggaaccaagcaaatcaatgtttgagaaaacaaaatttggacaaggaacttccagagagccgatgcaaagcatcccacgttatctacaaataaatgaaatactattaatcagtgatcaagaatttctcccatgccacgtaatggatcagcattggaagttttatgtgggatgtgaggaactaacactctaaaaccttggtttcttaatattttattaggtatttgttccaattgtcaacaaacatttatatttcatcttgtataatctggtgggcctattttaacatacactttatgagttgctatttaagatgtatgcttactattcttaagacatatgtaactgttcaacaattatataagattaatgcttttttgccattgaaataaaggcatgtttgaactagaccataaaaaaaaaaaaaaaaaaaaaaa

SEQ ID NO: 2845 - DNA, 746 bp, Macaca Fascicularis
agcacacactcatgagatgacacagcctcaggaggttctgacaacacgtgctaaaggtggtcgaggcacagcttgattttatacattttgcggagacatgagacatcaatcaatacctgtaagatgttacactggttcagtctggaaaggcgggacaactcgaagtggtggcttccaggtcataggtagataagagacaaaaggctgcattcttttgggtctttgatcaatctttcactgactacacaatttacatggagtggggagtaaaggaatagtcacactgatgccttagtctggctcagtgaatctgcatttttgcataaacaatagggcagaagaagcaattagatatgcatttgtctcaggtgagcagagggatgactttgcgatctggccattgtactgcacctgtgaagataagctatcagtttacattgtcagggtgaaattcaacacaaccgtcttaaggtaaagatcttgaggcccacaaggaatttccctgtggaccaattgtgagggaggtaagtagtttatttttatctttgtagttatctctcttaggaataaaatgagaggcaggtttgcctgacacaattcctagcttgactttccccttggcttaatgatttgggggtcctgagattcattctcctttcacaatgtcaatatccaggtccaagtatgaacctgagactgtacatatgccaaatggatgtgcccttgtgatgactgtacatcctgtg

SEQ ID NO: 2846 - DNA, 638 bp, Macaca Fascicularis
ctcgacccacacagccctgtggtgacgcctcaaaacaccacttaggtttgggttcatttagttagaattcggggttttcatttgaacttgtttgatgtatgcagtcgctgccatgacctgggtagaacctatgggattacccgtctcctggaataagttcgacgttttccaaagttgtagagttagtttggcccctgttgtaaagtggctggggacaaaacatgggattagttattatctcctaaccttttaaataagttttgtaaatcactaagaaaattaagtttgcttggaagatataagttgaattggaaactgattactatttatttctgaactgctaagaaccctttcagttttcatacagccaagacgcattttaaacagccggcaaatgttatcataatgaatatttgattgtgttttttctcttcacttccccttaaccactttagaaattccagagattttttcccctcagaatattagttttcgaagattgtacccagctatatattttttcgcagttctattggtgcccatttatcgtgacgtaaccagttatttaaataattttttaaaccaccacgaataataaatggcatgtgaaactgatctgttggtaacggaagaaactc

SEQ ID NO: 2847 - DNA, 687 bp, Macaca Fascicularis
  misc_feature (1)...(687): n = A,T,C or G
acagcatacacaaaaatttgttctaaagtttgactccacttcctctaactccagtggattgttggccatgtctcccaactccacagtatctctgttgtgggaaacacctgggtttttgcactacatgggagaaagacccggaaactatttgggttgttttcaacttttcannnnnnnnnnnnnnnnnnnnnnnncacatccacaggtggaagagacgcctggcgannnnnnnnnnnnnnnnnnnnnnnnngtgaggttgaggtgagaggtttgccagagtttgtctacctctgggtatccctttatctgggataaaaaaannnnnnnnnnnnnnnnngatggaatggatgcaccgcaaataatgcattttctgagttttcttgtttaaaaaaagtttttttaaaaaagtaaaaaaaaaaaaaaggtaataacatggccaatttgttacataaaatgactttctgtgtataaattattcctaaaaaaaacctgtttatataaaaaatcagtagatgaaaaaaatttcaaaatgtttttgtatattctgttgtaagaatttattcctgttattccgatatactctggattctttacattatggaaaaaagaaactgtctannnnnnnnnnnnnnnnnnnnnnnnnnnnnnnnnnctcttactctgcttttttctagtaaagtactacat

SEQ ID NO: 2848 - DNA, 760 bp, Macaca Fascicularis
  misc_feature (1)...(760): n = A,T,C or G
ccccaagcaccacctannnnnagcagctgtgatggtgtgtgaannnngcagtcagagactgctatacatttctgtgggcgggggtagggagtactggctctgtggccctcctcagagctgggaggcaaagggttcactgggcttgaaccctctctgagcacctaacccattatggcttaaacctcctcagtggaccacggaaaatcatgttggaccaagggtttccatgttcaaacagagtcaacaaggccctcccctaggttgagctcccggccagcacgcagcaaggattctctcgtgggtaacgctgtagcaggcagggccagcctcttnnnnnnnnnnnnnnnccccatgtagggtttgtgtagtgctctcacatcctgctcattgcctcccacctgctcctcacctggacctcttggtactccatgtgcaccatgcttgctatttcttgcctctgtgccnnnnnnnnnnnnnnnnnnnnntgggataccttttattttctttatttctttttttctctctctctctctttttttttttttaacatacaactaactctcagttcaggcactgtctgaagccccaggctgggttaggtggtctaggataccaactccccctcaacgtttcaccttaatnnnnnnnnnnnnnnnnnnnnnaaaagttgcctggtttttcctactagactgtaagccctcaggggacagggannnnnnnnnnnnnnnctctgtgttcttagtgcacagcctggcccgct

SEQ ID NO: 2849 - DNA, 693 bp, Macaca Fascicularis
  misc_feature (1)...(693): n = A,T,C or G
ctatgctgtagatactgatcataattctgggtgtntcacaaacactcctagtgcctctttttttagcccgttgaaagtgttggtattactactttcactacagagcctttggccctctaataatgctgaggtgggctgatccttcctgtttctgtcttcggatcattctggtaggtctcctcctccactgtcaggtaagcaatcaggtccatgacagggattggacataggaacaaattaagtgggtacacacagtgagaaagatacatacattctgtggtaacaactactgtcaataacatctgatgttacatgcacatttatatatatataattttaaaaactgaactatgagaagccatggtataaatgaatattgtagacatcatggacttgatatgatagaaatcaattgtcaggttgagatagttgtttttaatctgtctaaatagtttatgcattactacagttaaaaataatttaatttgtcttctatagacttaattttattccggttcagtgtaatctctgttaacagagtttcagcaaactgattggtcaaggtattaacataacttctacttcctttacttaaaaagatgtggttttatgtaagttcttgattactgatgatcatcccaaatttgacaacaaaatcatatgtataaatttatttcttccctcttgctcatc

SEQ ID NO: 2850 - DNA, 702 bp, Macaca Fascicularis
  misc_feature (1)...(702): n = A,T,C or G
cagacccgaggaggtctcccagtgaggagtttgccaagagggggactcataggaaacaaggcttggtgcttgggagggaggccccgctgcgtgctcagactcagccaacctggaaggtagccgaggagatggcaccacccacgcgcctccacaccccagactcccagtaaagcgggcagcagggcaggagtcaccccttgtggcagtggccgccgctgtactccatcctcccatcgggaagatcannnnnnnnnnnnnnnnnnnctcttcagagcacctgtccgcccaccgcccttgctgttctggcctcgtcgctgcagttcacgggaaacaagcctgagtctgcccgcatccgcgacggctccgcccggccgcctctgcctccggccaccgggtggcgctgccgagccagagccgccgcgtcccgagctttccaggagccccaggccccgaggaggcgaagcccgcaaaggtggaaacacgtgcctacgctgtaaagnnnnnnnnnnnnnnnnnnnnnnnnnnnnnnnnnnagacactgttcctaacgagaggagtgacgtattttcatcaccgtttttaatttgttttcttacgggtttacgattttgaatttttcttatttggttgaaagaattttgannnnnnnnnnnnnnnttnnnnnnntaaaaaggatgttaagctgtgggtaaaatatgcaaa

SEQ ID NO: 2851 - DNA, 711 bp, Macaca Fascicularis
agcagcgatgcatgcggctgtttgtccgacctctgtctcccaacaccagccccatcagacacaggctcatgggtgaccctgaacaggagactgggccataccctccgctgagcaccagaaggcaccacggggccaggggtggctgagacatgcggaggtcacggggccgtgagtgttggccttgcccaccaccccaggtgcccagcatgtgccccagcctggccagctcagtggcagggcctctgcctgtggaggaagggaggccgaggcacctttcccgagcaggaagtaagaggaacagctctgcacacactgggccccacataggcacaacctgaaggcagacggcggctcctctgtacctggggaaactgaggcccagagagccggggcttcctgagaccagccagtagcagctgccccttcctggggtgccatctccccatccctcctgccctgcgcctgcccagccctcctgctccggtgactgaggaccgctgggcaggggacctgaaggcagacggcggctcctctgtacctggggaaactgaggcccagagagccggggcttcctgagaccagccagtagcagctgccccttcctggggtgccatctccccatccctcctgccctgcgcctgcccagccctcctgctccggtgactgaggaccgctgggcaggggctggtgttgggcgggggcggcgggccc

SEQ ID NO: 2852 - DNA, 726 bp, Macaca Fascicularis
  misc_feature (1)...(726): n = A,T,C or G
ctacacatcaggaactcactgcttnnncagaggggcagcgacnnnactgctctggaaccgcgaccacccccagcgaggctcctctctgccgttcccctcaccctcctctctgccattctcctggtggagctccaggcctggacagagccactccaggcaagaactaatgagatgccagcccaggagcagcctccagcaaacgaccaagatgtggtcatttacttatcaggagatgacagctcctctcttcgggttccagattccaaccggcccttgaacacttatccaatatgtcctgcaaatggcctatcaatccctgaccacaagaccctggggaggcgtccagcgtcttcaagaacctcagctctttaacaatgagactccatgttttcctcactgctctttttgccatcttccaggtactacccggcatcactagggcactccattttgaaagaccctgctaccttagaggtgggatctgtctgaagcgaggaacaccgaattgtgagcctttcagaggaccctgnnnnnnnnnnnnnnnttgctgtaaaataaggagaagctgatggagaagcctggcaaggaacataggcgcaggatctgaagcgtggctcctttagtccaaatgagagcaaacattactcaagtccacataactgattattgtcattaggactgattaaagaaagagatgtttcccatgaaggggtaagcattaggtag

SEQ ID NO: 2853 - DNA, 746 bp, Macaca Fascicularis
  misc_feature (1)...(746): n = A,T,C or G
atatgcatatatgtgtgtgcgtatgcatatatctttcatctgtagtttnnnagagttcagctgaggcagatggagtcctgcagcccaggagacacattgcatccctgctaatagtgtttgcnnnnnnnnnnnnnnnntcttccttattaatgtttttatttcagaagacnnnnnnnnnnnnnnnnnnnnnnnctgtttccatggcagctannnnnnnnnnnnnnnnnnnnnnnnnnnnnnnnnnnnnnnnnnnnnnnnnnnnnnnnnnncagtattagccccctttttgcttggtggtactcttgtctgtgcctgtgtgtgtgtgatagtcactcttgcatggcttccatgtctgggttgtggcatttggggataaggtgctggagccagagcattttcagtttgtttgaggcctcgnnnnnnnnnnnnnntcactcccgttgacctggtatgcctgcttgcttgctgcttttccttgctttctcttggatgaggaagggactctggtcagnnnnnnnnnnnnnnnnnnnnnnnnnnnnnnnnnnnnnnnnttcttggagcggagagagtggtctctcattttactaagttcctaaacaaacatttatacaggcaacactccttgcacatccagaaactgaggcacagtagggttatgacttgctcaagaatacgtagcttctgggnnnnnnnnnnannnnnnnnnnnnnnnnnnnnnnnnnnnnnnntnnnctgtgaattgctag

SEQ ID NO: 2854 - DNA, 729 bp, Macaca Fascicularis
  misc_feature (1)...(729): n = A,T,C or G
agtactgtgnnntcaggctgntnnnaggcctcaggtgttgtcttttgtgctgtgtggggatgcattgctgcctgtatttatgatcttttgccgtggttctgagcattcacctcaccatgtttacaaagaactgttttgtatatagacattttcaggcacgtgctttgcaccaaccctgcgtggctcctgtctgttagctgtcacagtgtgcacactaatctctgttaaagttgtctatggctgttctacttgtaagatagttttctatttccttcagtaatgtgtccacagtaccctgtatttcgagttctattatactgatgtactcttgttttaatagtgcctccccaaaggcctcaccttggacagaggtcagtccttgatgccccagcacnnnnnnnnnnnnnnattgtcactttccagtttgtttttctctgttaaggaagacattttctaattgcatctccatgggctgtgagactgtgtgaagccgtttgtgtggtctccatgtaggtgctgtgttcccggcaccgccttgctctgaacactggtaattccaggtgctgcgcttggcagaggggtctnnnnnnnnnnnnnnngtgtgcgtgtgtgaatgtatgtgtcctttgcatggtcgggcgtggctgnnnnnnnnnggcatcagcaggacattgtgtgtatagttacaatgcttccaaactggaactctacattttgtatcttttaaag

SEQ ID NO: 2855 - DNA, 658 bp, Macaca Fascicularis
  misc_feature (1)...(658): n = A,T,C or G
aatacagttctgttttgaacaccaaggtccgacacagcccccttcacaatggtaaatacacnnnnnnnnnnnnnnaggaaatcaaaatacacagcacaannnnnnnnnnnnnnnnnnnnnnnnnnatcctggctatgcggagcccctgcccccagcctggcagtcagcagagaccctgtccgggctgagggccagcacagcatctcctttaccctcctgtgccacctctgccctctctgatctttcccaaaggccagttcacacagggtcaccagaaatatcatgcacagaaaaagagaagnnnnnnnnnnnnnnnnnnntcatgatcataactcccaggagaaggaaatgctccctgaacccccagccctggaatcccctgtaaggaaacaggaccctcggcatctcatagaccaggcaaacgnnnnnnnnnnnnnnngccctggctgtgccttgggcccatgtgggcccatgagannnnnnnnnnnnnnnnnnnnnnnnnnnnnnnnnnnnnnnnnnnnnnnnnnnnnnnnnnnnnnnnnnnnnnnnnnnnnnnnnnnaaggtaacaaaaaaaaaaaaaaagaagaagaaaaggtagatttggttttaagagtaaagtnncacagaagttaccactcagggcatttgtttgctttc

SEQ ID NO: 2856 - DNA, 793 bp, Macaca Fascicularis
  misc_feature (1)...(793): n = A,T,C or G
tggctgtcttgcctggactggnnnnnnnnnnnnnnnnnnnnnnnnnnnnnnnnntgcggccacgtgcagannnnnnnnnnnnnnngctcagcatnnntgctcnnnnnnttttaggtcatnnnnnnnnnnnnnnnnctacacgagagttttaaaagactgagcaggatccccttccccgggcagctgctgcttccgtagcgtttaggaacaagcctgcagacactgagaagagagcttcctccctcctggggctggtggcgaggctgcctgttgtggaaaacacggcacatctcctgtgaatgcgaaccgcaagggttgccagaggctcccttccacaaaacttccttaggtgtctggtgaccacagagcagacacttctcccgnnnnnnnnnnnnnnnntgcctgcctttgtttctttttcttttttgtccttttacttattcttgattttgtatgtttgtttgtttgtttttgctatgatgcccaaaaaactaagcaagattaacttgggacnnnnnnnnnnnnnnnnnnnnnnnnnnnnnnnnnnnnnnnnnnnnnnnattactttccaattgtgtttcaaagatgtttagacttttcccaaggccagcctaatccttgtaatcagcccaaaagttcctctctggctctgtctgtcccctttgagggtgttggctcagagaacctgggcgatatgagatgttaaaataannnnnnnnnnnnnnnnnnnnncaaacaaacatacannnnnnnnnnnnnnngtccaacgtctggcgccnngtcccaagcaatc

SEQ ID NO: 2857 - DNA, 773 bp, Macaca Fascicularis
  misc_feature (1)...(773): n = A,T,C or G
atgaggggtgtggctgnnnngccaccaggcagggatgggacgggcaagcagggtccggcttgcatcctctctctccaagtttatctcatcctttatttttaatcacttttttctatgatggatatgaaaaattcaaggcagtatgcacagaacggacgagtgcagcccagccctcatgcccaggatcagcatgcgcatcttcacgtctgcactctggagctcaccctcccagagctggagcgggccaggcagtctgcgggcaagctcccgggtctctgggtggagagctgacccaggaagggctgcagctgagctggggggttgaatttctccaggcactccctggagagaggacccagtgacttgtccgtgtttacacatgacactaacctcccctggagaggaagcaggaagccaggttgaactgtggcgaggcccccaggccgccgggaatggaccatgcagatcactgtcggtggagggaagctgctgactgtgattaggtgctggggttttagcgtccagcgcagcctgggggcctcctggaggctctgctccttagggcatggtagccgccgcagagccgggcatcgtcccacagcatctcctagaagcagccggcacaggagggaaggtggccaggcttgaaggagtctctgttcctagcactgcaccctcaggaagttgcccgccccaggacacgcagggaccaccccaagggctgggtggctgtctcaaggacacactgaatacgttgtgaccgtccagaaaaa

SEQ ID NO: 2858 - DNA, 680 bp, Macaca Fascicularis
  misc_feature (1)...(680): n = A,T,C or G
aggctccaggaccatgagagaaggnnnnnggactatgagacggaacccttccacgtagggctccaggaccgcgagagagaacccaggactgcgggagagaacctttggacctacggctccaggaccgtgagagagaaccctcgcacgtagggctcctggaccgcgcgagagagcccaggactgcgggagagaacctttggacctacggctccaggaccgtgagagagaaccctcgcacgtagggctgcaggctgtggtgtttggtggcggagtctgaaaggactaagacatggctcacatgtttatttaggttgcttgcagcactttgtctttatctaagcaggtgtgtgataaatgcactggctgggttaggcttccaagtaccctcctaatgggttcttggaagtacagctgcccaggtagggattgaggactgggcagaggacctgggcgctgccagccatggcatctctgccagcccaggagtgcacgtttttgtttgcacttctcagagcactactgggatagctagaacatcttgtcttacgtttgttaacagctttgtgtcttgtgtatttttctattaggtgtttgtcttttaatcaacttctgattcttatccaagaacaaagtttgagtctccaattcggtaaagtttttctttaccttcagaaaaatta

SEQ ID NO: 2859 - DNA, 3123 bp, Macaca Fascicularis
ataagcaaacttccgcctgcagagacccgctcccttcctcgcccccacagaaacgccccccgccaccccgcggcgtaggccttcacgctgtcgcctcgactcgtttcctcgaatccccagggaagggtgggcccctggcgcccctacggtcccctgcccccttaccactgcggtcggagctcgggtctcactctcctgccgctgtttcgggccacaccttgtgtccgtgcctccgcagaggaatagaagagtgggtcctcgctctctgcggcgcaccgcttgtcccttcacctcctctccatctacaaagcctatttcatgttttccaaaaagaaaacgttttctgtgtctcttgagtactcgtcgccatacgcggagccagactgatctacgcaaaagatcgcaagagaaacaactaatagagcatcgcccatcatgaggctgctctcccgatggtcactgagttgtgttgtggcactgtctttgtaccaagacaccaattttgtgcgaagggtgacacgcatgattcaacgctctcacgcctaggtcccagcagcaggagcgccgattttccccagagggttagaagatagaaaactcttcggatgtaagtcagagtacagtggaaaatgtccactgaacgaacttcttggacaagcctgtccaccattcagaaaatagccttgggcctcgggatcccagccagtgcaacaattgcctatatcctataccgcaggtatagggaaagcagagaagagcggctgacatttgttggggaagatgacattgagatagagatgcgggttccccaggaggctgtgaagctcatcattggccggcaaggagccaatattaaacaactgcggaaacagacaggtgctcggattgatgtggacacagaggatgtaggcgatgagcgagtgctgcttatcagtggttttcctgttcaggtgtgcaaggccaaagcagcaatccatcagatcctgacagagaataccccagtgtctgagcagctttcagttccccagagatctgtgggcagaatcatagggagaggcggcgagacgattcgttctatctgtaaggcctctggagccagaattacctgtgtcaaagaatcagaagggacattactactatcaagacttataaaaatctcaggaacacagaaggaagtggcagcagccaggcatttgatactggagaaagtttcagaagatgaagaacttcgaaagagaattgctcattctgcagaaaccagagtcccacgcaaacagccaatcagtgtgagaagagaagacatcacagagccaggtggagctggagagccggctttgtggaaaaacaccaattctagcatggggccggctgcgcccctggtgactcctccacccaaaggaggaggcgacatggctgtggtggtgccaaaggaaggttcctgggagaaacctagtgatgacagctttcagaagtctggagcccaggccatcccagagatgtccatgtttgaaatccccagtcctgacttcagtttccatgctgatgagtacctagaagtctacgtctctgcttctgaacaccctaaccacttctggatccagatcgttggctcccgcagcctgcaattggataagcttgtcaacgagatgacccagcactatgagaatagtgtgcctgaagacttgactgtgcatgtaggagacattgtagcagcacctttacctacaaatggttcctggtatcgagccagggtccttggcaccttggagaatgggaacttggacctctactttgtcgactttggagataatggagattgcccactgaaggacctcagggctctcaggagtgacttcctaagccttccatttcaagcaatagaatgtagtctggcacggatcgctccctcaggtgaccaatgggaagaggaagctttggatgagtttgatagactcactcattgtgctgactggaagcctctggtagccaaaatctctagctatgtccagactgggatctcaacttggccaaagatctacttatatgatactagcaatgggaagaaacttgatattgggctagaattagtacacaaaggatacgcaattgagcttcctgaagacatagaagaaaacagagctgtcccagacatgttgaaggacatggccacagaaacagatgcctctctcagcaccttgctcactgagaccaaaaagaactctggagagataacacataccctgtcctgcctcagcttatcagaagctgcttccatgtctggtgatgataaccttgaagatgactacttactctgaagtctgggcttcagcttgctcagccatctgctttgctgtgatttggcataggaactggtgcctggaggagaggagtatatgataaaggatccatgcagtccttcctttattatacatacagtctggcttgctgtggaccaaattcatgttctcctcccattggactaccaaaaaattggactaccacactacaagtgtgtctcccccattccacctcctgatccctccccaaccctccagtgtttgaatactgctgtgttacttccaggccattcagcgtcaggctcagtccctctaccagtcatgatacacattactgctaagctgtatccttttcaaggctgggaaacagtcaggctttggtcattggaagtgatgattctgcagacttctgactcaccttatcaggtgactctggttaaggaaagcttttgagtggtgaacccaaagactccagttgaatcaggaggcaaaggcaaaaattagcataattatatttaaaagcctcaggaagtgggaagagaacactgcctcctagcctcaattgctgatatgttattggagacaggcttttgaaactgcttcggctatttctccgtaacctttagttaaaatacaagtagaaaggagacaggaggctcaggaaattttctaaattgctagtataatatctatatgtatacacacatatacacccgtgaagagagaggaagagtatacagttctgtttaaatcattcggaggatttttttgccgaataaagttctcaagaaaaaaaaaaaaaaaaaaaaaaaaaaaaaaaaaaaaa

SEQ ID NO: 2860 - DNA, 3315 bp, Macaca Fascicularis
aagaacaagagtgatgaaggccttcagggggaataaagagaaagtcttgtggtttttcaaggattcagatgacgttgcagacagtgcgaataaacaggttgggaaatgaaaaatgatagagaaaggtatattagaaaacaaaagggaaaggggcatatgtgagacatatttataggacctctcagaataggtgcccaaggcttcaggcccaatacacagaggtttcgaagagtaattaaaaaataaaattagagaagagtcttaaaaatcaatcagaatgttttggtggtttgctgaatacctcacaaaagcattggatttaaacatttagaaacatttcccacacctcactgtcacaagggatgaatactcaccactcagagtttctattaccctaccatatcttatttttaaatagaaagtctgagtcctcagtaattatattaagcttcttaagctgcacatatcaattgcatataccattttaagcatttttcagtctttttaaagagagagtagaggaaaagacagagagaaatcacttagcagctgattcacttattttaagcagctttcttcattttaaaatataaaaaattcaggttctggaacattgggtgatttgaatgttctataaagatttgaaaaaaagatttttttttaaattatatgttctacattcagggacctggtttttcagtttagtccttaaaaaaacaggtttgtgaagtaaaggagttttcaatctaaacactttttcttcttccttttcatttatttattattattattactattctcttttgtcaaagcatatggtatgaaaagcatttatgttggtctcactactgacagagcttaacctaataatccagacttggaacttggtgtttcaataaaggaaacactgtttgaggtattttccattcaaaccagcatcaaaagtttttaattaacaccatcagaaattaatggactgaatgaatgcaagacagggttcctacatacccctttactgggaacaagacagcaagtgggatccattgtgtatgtttgtattttataacgtatttttatttacttattgaagcagagtcccagctgcacgttgcgtagcagagctacaagagtgaaacctgccgagggctgcttcactccagcagtttcattttgctcactgattgttgtcctgagttctttgtgattgtaattggttagaaagtttgaaattagcaagtccttgtcagctcatgaaagctttgaaatcatgaggcttgatacagctatcaagcctgctgatgcctaatcacttttcgggctaagaacctccagagcggtgaacattctcagtccccaggctttacctcaatcaccaattcaccaccctctggagctccttgtcttggatggtggctttgtttggggccctttcttttccatcactgaagcctataccgggatgaacagattttggactgactaatggggatgggggttgttaggaaatgagagcaaatgggaaaacagaatgatgtaggggatcaagggaatagggaggaaggaaaagggatagaaagagaataaaagaaaaaggaagcgggatataagatggaaagagttttgtaaatattgacatttagattctgtgcaactggatttgatatctcaggatagaactcactgatagaacctaaatggtccccagggctctttatttttttagacctttttttttaaaaagcttgcccactcattgtcaaagggaagacatgtgtgttcatataacctacttaccctgccaccaccccatttgtgaggaccaggaatacaatattttcctttatacattatgttagaggaatgaggggtttatcaactcttctcctgcaaccataaaagtattcattgtttatccttatgctcggagcccccaaaccaattttctccagaaaactctttcacagcttggtacatttttaaataaccccaccttcatccttgtagcaatgcaggagctgctcaggcagggtgaactaaagtagatagatattgtcagcaatgatgaaatgtttccaaatgcttaaaggtcttaataactttctgtatatctaactcatttatgttcaaagacctcaagcttcatacatttaggtgcaactcttaacctttcccagtttctcctgtactttaataaaaacaaaagtaaatgcaaaccagatacaaaaacaacaacacaaatcttaatgccatgaattcagaatgtcagaaaaattttcaataggccccattatggcaaaacactgcaaaaatgcatcagcatgttgggaaaagctccctaaagtcgttcaaccatttcttccctgaaatatgggaagatgaaatacatattagactcctagaagaaaataattggtgaatgagtgtcaggattttcgtaagctctgctaaaaatctgatcttgccatcatagcaagagaatcagttaagcctattaacaacacgtcattttttcttaggtggacagtgtaggatttactgtcccaaagtttgacttcatgcaggagtcagaggagacactttgtttggaatatcatttagtaaagaagaggcagcctaactttccccagaccatacgttaatggatgcaatatcagactacacagtatattatacaccactgccccccaccccaagtctttataggcttctgtagcagatatgtctgtcaaaatcctgtcatggtccctcagagatgtcaggcagtactgccatggtcccttcagctgcacctgaagccgttctctgctaacctggactcccacctcaagtatgcttttccttctgccccaggaccttatccaatgctgggagatctcaaaaagtctaggatggggagagcagggcttacagaagtcgaacttaatgccctggggaacctctcaactaaaggaggaatagaaccaaaaaaagagatgttccagcctctatttctttataatgtctacctctgtagccattttgtacaaatctcagagatcctggccattctttgttattgtcttgccctctgagattaccttctaagttactgcctgcacccaagcctttggagagaaccttaaatgagccaggtactcaggttggtttgtttgtattaatcaatttgcatcaacttcttctctactgttgactgccccaaaaaaaaaaaaaaaaaaaaaaaaaaaaaaaaaaaaaaaaaaaaaaaaaaaaaaaaaaaaaaaaaaaaaaaaaaaaaaaaaaaaaaaaaaaaaaaaaaaaaaaaaaaaaaaaaaaaaa

SEQ ID NO: 2861 - DNA, 2176 bp, Macaca Fascicularis
gacgtcagcaaggaaggggaggaacgggaggtgagactgaagtgcatgttctgctgttagtgggcggtgaattccccggcgctaagtcggaagccaagatccgatccactgagagctgcgagtgcacgagcatagctgtgtctcggaaatggttggctttgggcagttcaggaggaggactccatctcattcagaaagaaggttggaagcacaggctttttctttcacacagggaaggtgcaatttctcaagttgcctgttgtttacatgatgatgattatgttgctgtagctaccagtcaaggtcttgtagttgtttggggattaaatcaagagcgtcgtgggaaaccagaacaaatttatgtgtcttcagaacacaaaggccgaagagtcacagctctctgttgggatacagctattcttagagtttttgtaggtgatcatgccgggaaggtttctgccatcaaactcagtacttctaaacaagcaaaggcagctgctgcttttgtgatgtttcctgttcagaccataacaacagttgactcctgtgttgtacaattagattatttggatggaaggctacttatatcttcactaactcgatccttcctgtgtgacactgagagagaaaagttttggaaaattggaaacaaggaaagagatggagaatatggagcttgtttctttcctggaagatgttctgggggccagcaacctctgatatattgtgctcgcccaggctctaggatgtgggaagtgaactttgatggagaagttataagtacacatcagttcaagaaactcctctcgttgccacctctccctgtgattactctaagatcagaacctcagtatgatcatacagttggatcctcccaatctttgtctttccccaaactcttacatcttagtgagcattgtgtgctgacttggacagaaagaggaatttatattttcattcctcagaatgttcaagttcttctttggagtgaagtcaaaggtattcaggatgtggctgtctgtaagaatgaattgttctgcttgcacctaaatgggaaggtctcacatctctccctgatatccgtggagcgctgtgtggaacgcctgctaagaagaggcctatggaacctggctgctcgcacctgctgtcttttccaaaattctgtcattgccagcagagcaagaaaaactttgactgcagataaattggagcatttgaaatctcagctggaccatggcacctacaatgatctaatttctcaactggaagaattgatcttaaaatttgaacctttggattcagcttgtagcagtagaagaagctcaatttcatcacatgaaagtttcagcatcttggactctggtatttatcgtatcattagtagtagaagaggcagtcagtcagatgaagactcttgctcccttcacagccaaaccctctcagaagatgagagatttaaagaattcacctcacagcaggaagaggacctgccagatcagtgctgtggctcacacggaaatgaaggtgatgaatttgtctgttgttggttcctgatgtgaagccattattttccacaagctcttgttaccaggattatcttgtgcacagaagttctctgaagtgttaataatttttaacatgttgatagaactttccatccagatccacagatatgctgcttactagaagagttggtttatgtttagtatttttttcccctcatgtttggactaacattagggcctatttttgatcatgcatcaaaatgctggaaaagttatgaaagaaaagtcattaaccaaaagagtgggaagattttatcctgactaaccaaattatttttcatcaggaatgaaaaattactgcagttttgggggtcattgccttcctttttcgatgtgcgagtattcctatggctgaactattgagaagagaatactagagaccctaaactccctttttgacttatggggactcagggttagtaggcaaatgaaggtacctgcctctgttttatgtggaccatcccgtgcattttgtaaacctgtgtttcgctcatttgtttctgggtcaattgtgattttggtgttgaatccttcatttcttttggtttattcatttcagaatttttttgaagattaaaacaactcccacatgaaaaaaaaaaaaaaaaaaa

SEQ ID NO: 2862 - DNA, 864 bp, Macaca Fascicularis
  misc_feature (1)...(864): n = A,T,C or G
ctaggtaccctnnntcctcgttgaccactaagaggtcttagaaacatagtctgtaaatgtgtcttataactggcacactaagaagnnnnnnnnnnnnnnnnnnctgttggtgaggaagnnnnnnnnntgcggttcaggaaactcctccaagaggagnnnnnnnnnnnnnnnnnnnnnnnnnnttctgttttcctagccaacttgtgttctgggtttgaaaaagacccaccacaaatgcttttctattttctgatttaaaagttgcttttgaatatgaccatgagaannnnnnnnnnnnnnnttgtgtggtgctctgcttcctgaggatttgctggaagggcattctccgctggnnnnnnnnnnnnnnnnnnnnnnnnnnnnnnnnnnnnnnnnnnnnttgctctcacttgcnnnnnnnnnnnnnnnnnnnnnnnntcctnnnnnnnnnnnnnnnnnnnnnnntactaagcagcccaggaagagtcactcagacccaaatgtcttgaccatgttgtttttaatcactgtgacccttaattttaaagcataggccaagtgttgtcaaataccttggctaaaacagtggagggtggtgggtaaagcaatagagggtgctttccctcaacccnnnnnnnnnntgactgaactgccactgccacaatgaaccnnnnnnnnnnnnnnntccccattttcctttttttgtatctacacccacacgattcccaatgttggatatttctacatgaataaagaaaggatcggtgcctcttgtgtaattagcgctccattgcttttgtgtatgtatgtgtgtttggtttatttatttagtgggaccccttaggggaaggaatgatactcttcagt

SEQ ID NO: 2863 - DNA, 2652 bp, Macaca Fascicularis
  misc_feature (1)...(2652): n = A,T,C or G
tttatgctttcctctcactttctctagagtttaaacatgaaaatatgttccatgataaaaaccagcacatatcccctttcatcagggaacatattccaaacaatgaaaggaaggggaaggggattattttcacaagtccagcaaggatacttggatgttggaggaatcatttgtagaaccataatttcacaacataattattcacaactatcacattttatagatgaagaaactgagatcgcagggaattgttataattgttctcatatgtgctgcatcatcgacttgccaaaattcacatcagcttaagttttcacccaacatgcctggtcctcaattgttccacaatgctttttgctatccactgatttcagaaagcgttcttttggctactgggagaggccaaatcaccaggcaatggataattgacctggaactcagtaaatgcactggagtgaaaaaaaaaaaaaaatgcaagactgagtcaagacacctgggttctagttgcaaatctgttactaactacccatcagactcacagcaaaaatttttattaatactcttgctccacaaggagactagatcaaacgatctctaaatttacttccaactctttgactcttgagttttcttcgttcaattttctgctgactcagagtgtatagccttggccaagttatttactgccataaatctcattttttccaagatcaaagggagaataacacattcccccattttcccagcatatagatactatataatcttgcattaaattgactatctttggaaatcacattaaatcctttctatctatagacattggattagtcactaaagctagaataagacatgggccatatcattaggcaatgtctctggctctagttacattagcaaacactgcattgacgcttgttcatccttgcttccatcatacctttttatataagctgttctaactcttacatgactgtagcatggagcactgtatgtcacgacatctcttcctctcgttgcatctgatcatattctagtatctcctgtctcaatgcctagctcttcacccattttactaatgcaaaatagaaaccttcttactgcttttttatttcttacttttcttttgaatgattcaccaagtccttactgattttatctccccgatgtctttcaaactgatacatttttctctcttccatgatatcctagtccaagctaccatcactcctcaactgaactacagcagtcaaaaggattgtttcgggtgctaaatttggcgatgtcacccactgaatggctttcatctggtcttaaaataaagaccagattccagaacaaaacctacatggtaggcagctccatgtttttagtgtcgtagtacatgcttctgaccttttgccctctttgagttcctcctcctcaccatcgtttcttggatattcaggctctgtagtttcctgggtttagaatgctcctctaggattcatgtaattgctgcttattcttctggttttgtactgatggtcacattctcagacccaggatggtcacattcttgacctccctgggtcagttgcctctatcatgcaccatcattgtgccttgtatccttgctcttattatgcttatcacagtcgtaatattacatttgctaatgtcatgctttttagattatgctttgctatcttctccctcaccagagtgtaaactctatgatactatgtctatttttctgtcaccattgtaatcgcagtgcctggcataatatctaatgcatagtaggtgcacactaaaattctattgaataaatagtacattaatgaatgaaaagaaagaatagaagcgcctgagttcaggtcctgtatccccattccctcatgtatgtggttggaaccatagaaggcaaaatttggtattaaaagaatagagctggcaagcgctgatgtgcctaacaggataggaagttgagaattcttttttaaaattatgcaagggcccaggagtgcctggctaacatggtgagacccagtctctacaaaaattaaaaaattacacaggcgtggtggcatgggcctgtattctcagctactctggaggttgaggtgggaggattgcgtgagcctgggaggttgaaggcttcagtgagctgtgatcataccactgtagtccagcctagtcaatagagtgagaccctatctcttaaaaaaaaaagttctaggatagttggagttgataatgttcataaggatcaacgctaagatagcctccaaccgagtctcaatatgctccaaaaagaaatacttcaaatatcaaactaaaactcgtgtgtgtgtgtgtgtgtgtgtgtgtgtaaggagcgnnnnnnnnnnnnnnnnnnnnnnnnnnnnnnnnnnnnnnnnnnnnnnnnnnnnnnnnnnnnnnnnnnnnnnnnnnnnnnnnnnnnnnnnnnnnnnnnnnnnnnnnnnnnnnnnnnnnnnnnnnnnnnnnnnnnnnnnnnnnnnnnnnnnnnnnnnnnnnnnnnnnnnnnnnnnnnnnnnnnnnnnnnnnnnnnnnnnnnnnnnnnnnnnnnnnnnnnnnnnnnnnnnnnnnnnnnnnnnnnnnnaaacagagtgaaactccttctcaaaaaaaaaaaaaaaaaaaaaaaaa

SEQ ID NO: 2864 - DNA, 967 bp, Macaca Fascicularis
  misc_feature (1)...(967): n = A,T,C or G
gactaaaaggaagagatgtgtacagagcaggaattgctacacactttgtagattctgaaaagttggccatgttagaggaagatttgtnnnnnnnnnnnnnnnnnncaaaagaaaatattgcatctgtcttagaaaattaccatacagagtctaagattgatcgagacaagtcttttatgcttgaggaacacatggacaaaataaacagttgtttttcagccaataccatggaagaaattattgaaaacttaaagcaagatggttcatcttttgccctagagcaattgaaggtaattaataaaatgtctccaacatctttgaagatcacactaaggcaactcatggaggggtcttcaaagaccttgcaagaagtactaactatggagtatcggctaagtcaagcttgtatgagaggtcatgactttcatgaaggcgttagagctgttttaattgataaagaccagagtccaaaatggaaaccagctgatctaaaagaagttactgatgaagatttgaataatcactttaagtctttgggaagcaatgatttgaaattttgaggtgacaggcttttaaggtatatttcgtagcatgggttnnnnnnnnnnnnnnnnnnnnnnnnnnnnnnnnnnnnnnntgtttttatataccctgcaagctaagaatggtttctgcgtttttaaatggttgggaaaagaaatcaaagactcatatttcataacatgaaaagtatatgaaatgtcagagttcacaaataaagctttactggaactagctatactcatctgtttatacattatctgtgactgctttgaaatgagtagttgcaatagagaaggtaaagcctacaaagcctaattatttactgtctggtttttgtcagaaaaagtttgtcaatccctgttttagaagatggaaaaatgtgaaggtctttagagattctctagagtagtatatctaattgaaa

SEQ ID NO: 2865 - DNA, 693 bp, Macaca Fascicularis
  misc_feature (1)...(693): n = A,T,C or G
cgagtagctggaattacaggcatgtgccaccatgcccggctaatttttgtatttttagtagagacggggtttctccnnnnnnnnnnnnnnnnnnncaaactcccgacctcaggtgatctgcctgcctcaacctcccaaagagttgggattacannnnnnnnnnnnnnnnnntggccacaaattcatttctaaagtaaaaaatgaaacacacaattttacatttgcctcctgaagacaaatgagatggctgttcttagagcatctctgaagaaaaatgctgtaaaatctcaaatgattatctagaattaggaaagccaagcctcaaagaaaaattcctcttaatcatttgttcatctcaaagtattataagtaaaagtgtggaaaagcttgccaggttatcagagaatctgactttcttatgtcctatcagtttactgtcctacagtttactttttataaaagtaagcttcacaaggactcatctttctgcaaaagagatattgagaagatcagtacaatatatttctcaccatggtcttaaaaataattgtgtgattatttgttataacaaaaaccagactcttagaatccttgattctgaaataagnnnnnnnnnnnnnnnccttcactggaggtatttttaaaaataggacaaaatttggtgtctttagattgatagaggaatagtactac

SEQ ID NO: 2866 - DNA, 697 bp, Macaca Fascicularis
  misc_feature (1)...(697): n = A,T,C or G
gtgcccggcgccctngactacaagtccnnnnnnnnnnnnnnnnnnnnnnnnnnnnnnnnnnnnggccccggagacacccggacccaacacccgccacggcctccgggaggggccggggcagccccacagtcccttcctccactctgtatctatgcaaagctctccgcagtcctccgggtgggtgggcgggcagggagggnatggggcaggctctatcctctctctaagggctggccaggaggttcccccgaccaggttgggactggggagacttggggccagtgcttnnnnnnnngtaaatatgtatgatgtgttgtttttttaaccatagtggaggggccagtggattcccacagcaaaaccagtcccttccatgccctggggatgccccaccacacccaggtctcttccttttgccatgaggtcccttcaaggcctcccccatccaggccaaagccccatgtgccttgtccaggaacctcctgggccctgcgaggggccagcagagggcgccaccgccacccgacggctggggacccacccagcccctccctccctgctccagagtcacttgccattgccaggagatgggggccccaaccagcaccccactttcgcagcagagcagctgagttggcagaccgggcccccctgaaccccaccccatcccaccagctccggccttgcttggcctcac

SEQ ID NO: 2867 - DNA, 308 bp, Macaca Fascicularis
agcctgatcctattgttgcactatttatggagcaacatctttgtacaaagaacaagctttgtgtagagagcaagcttggctttttctcccaacgccaaggataccgttgatgctgccatgtaatagcataattttaggtgtcctcaaggacagaacttccacgttgaataatggaagttagaacaatgaatttcacaggggaataaatattaatgactgatgtgaagaaaatatgccattgtttattccctcctgcatcatttccataatttgcttttgtactgtgaatttagaggaatatgtgtggt

SEQ ID NO: 2868 - DNA, 673 bp, Macaca Fascicularis
ctaactccccatccatctgcctgccgagagctacttccattcaataaaaccttacactcattctccaagcccatgcgtgatctgatttttctgttacactaaggcaagaacctgggatacagaaagccctctgtccttgcaataaggcagaggatctaattgagctgattaacacaagctgcctgcggatggctaaactgaaagagcacactataacacacacccactggggcctcaggagctgtaaatattcacccctagatgctgctgtggtatcaaagcccgcgctccccacaaccggcctgtctgcctgctccccttagggatatgagcagtggggcaccaaagtgagccacaccccagtggcatgccctgtgaggaagataaggaaactttttccatttcacaactcacctaataaagctcaagtggtgactaaatcaggaaatagaagtacaagatcttgtgtggagtaggaatttaactaacagcagccattgctgttattatttagagcagggattggcaaaatatgacccttgggccaaatctgttccaccgcttgtttttgtacagtctgtgagctaaaaaggattgctgcatttttaaatgttttagaaagaaacaaaagaagaatactatttcatgacacatgagcattgtatgaaattca

SEQ ID NO: 2869 - DNA, 768 bp, Macaca Fascicularis
  misc_feature (1)...(768): n = A,T,C or G
attttaagtacaggacataagcatatacacatgtgtgcaaccctcaccanngtccactnncagaactttttaaatctccaaggctgatgtttttcaaagcaggcaactttaattccctacctggtacctggattccttttccttttcatgctatcttttcatcatacccttctgagtatttcctctgggcttaaagatcctcagtggagaagtacaacctaagagggagttaggtgaccaaatggatcaggaaaatcgtgttttatctccaaagtaaaactataactgtgggtggcttctggacgcaacttagaatattatcatcgaaaagtccccaagaaactattaattcagaaccaccctggtgacttgaatttcttgagtgtcctcatggtcttgaaccaaagtcatttccacccaagggagagtcaggtgaaagtccccagggaatttagtctaggggacaggagacctccagactaagctggtggaggatgggcttaacctccaagagagaggagcagcctggatcagggggcattaacatgaattttcccaggacttttctgcaagtgggtattggatggaaatatttgttgttctcagtcagatgagtttctcctattttagtgagaccaaagaaagacaattttaattctgtccaagctggtcttgaggatgggaaaaaaatatgtaacttttctgaatgctctggaaatgttggaattctacatcaaagtatgtgactgttttaaactgatgactaac

SEQ ID NO: 2870 - DNA, 734 bp, Macaca Fascicularis
  misc_feature (1)...(734): n = A,T,C or G
ttccttttctctctctgattgttttaattgttctgtggtggttttaatggatttgagaccctggagcggcagctgcctttctgatttccagctgctttttgtgaataatttaaaaagaaaaaaaaaaaaaagaaactttacattttggagacaaacctgtgtgagttttttattggtacaaacgttgtatttaacactaggggttttgtacagttttttgccttttctactagaaaacaatgtaaagtgatttcacaatgtgaagagaaannnnnnnnnnnnnnnnnnnnnnncgcacagtctgttctgcagcaacaacgggattcaatcaactcagtcgtgattcagccgtagaaatgcttttcctttatgcttgtttgagcttttctcttctttcctgttctgatttgcaaaagaaaatgtcttttttgtgtgaacttgtgttgtactctgtagaaaattatggattttactttaatggtttaaaaaaaggcaagaagagctctagtcgctttttttacctaatcacagagtttgtgtagtgaatttaaaaagaaaaaacaaattgttacagagttttgggtcacagggaggtagtgtgtttcaaaggtatctccttccttttttctgtgtgtttttctttttgtcccactggggaacttaaatgctgttttaattgccacagacacnnggacaaaaagtcattttgtatctgccaagtgtggtaccttcct

SEQ ID NO: 2871 - DNA, 705 bp, Macaca Fascicularis
  misc_feature (1)...(705): n = A,T,C or G
cccatcacatgtcactttaaaaatcataagaactacccgttattgacatctttnnnnnnnnnnnnnnnnnnnnnnnnttagcgtcatttaattttttaaaatagttatcttnnnnnnnnnnnnnnnnnnnnnnnnatcttctgcctctcacagatgaagaaactnnnnnnnnnnnnnnnnaagaaacacacaggggataaatggcagcaatcgagattgaaatcaagcctgaccagggccttttgcgggagcgcatgccttttgtctgtaattcgtgcgtttttttttttttaagannnnnnnnnnncttnnnnnnnnnnnnnnncagagcaaaccaggcggccatgggccctgtggtcttttcttacagaaggcttcctttttggctctttgcctggttctttccgagatgtagtgtgcctcttactttcggttttgaaaacatgagggggttgggcgtggtannnnnnnnnnnnnnnnnnnnnnnnnnnnnnnnnnnnnnnnnnnnnnnnnnnnnnnnnnnnnnnnnnnnnnnnnnnnnnnnnnnnnnnnnnnnnnnnnnnnnnnnnnnnnnnnnnnnnnnnnnnnnnnnnnnnnnnnnnnctggcgcctgtggcccaagctactcgggtggctgaggcgggaggatctcttgagcccaggagtttgagttatcatggcgccagtnnnntccagtctgggcaa

SEQ ID NO: 2872 - DNA, 707 bp, Macaca Fascicularis
  misc_feature (1)...(707): n = A,T,C or G
tgtagtcccgctcccgtgacgtgccctccctccttccgctccccgttttgccttcactacccagggctggagcctgaacctggtggggccccccacgaatcggaagagcctgggccacgtgaaggtggaccccactcagcctccagccttgccctccgcgcctcagacaccgccgtcttcggaggcggctccgcggccgtgtggaaggggtcccatttggactccggggtccgcaggagtggcaggaagcgcttcgctcgcggctactgggagaggaggggcgcgctttctgccgggactccgtaaccctttagaagaagcaagtgcgtccaaatggtttgaaagtggacctttagtgttttccaggagtaagaagatagaacaattgaccagttttgtttgtaaaacttcttttcttgccttggacttctgctataaagtgaccagggcgtagtgagtacnnnnnnnnnnnnnnacgttagcacgctcaaccttaacgatctttttatagagannnnnnnnnnnnnnnnnnnnatgccacgtctttgtacgcatcagatctctctccgtgtagttactaagtgaaatcctctcggcgtacgcaaattacgttaaaaaatagctgtcaaacctgagtcaggagttggaggagtagagggtggcgcttataagtgaaacaatcaggaatggcattgtgtgccatcctg

SEQ ID NO: 2873 - DNA, 230 bp, Macaca Fascicularis
ctcaaggggatgagttattttcccaagatcacacagtgagtggtggtgccaggtcttctcactcaaccctagccttttctgctttgcagtaacggctaaagggaaggcttttccaggtggctgtgacttgagatgtcactttgcaggaggccaggactttctagtgtccctcgcgctcaggctgctgggcagtagtgtctaggaccttgggtgggggagggaaggcatca

SEQ ID NO: 2874 - DNA, 697 bp, Macaca Fascicularis
ggtaactgattaggtgaacttacagaagatttgtggacttaactcaaaagtaacctctcagtgttctatagaacatgtatttgtgtaactgaacctactaggagaaatgtttggaattctatatgtgcaatttttcagcaaatgcaaaaaaatacagcacacgtattgacgagcttctgtcaagcagcttgagttgaaatttaagaaaataaatcacgattgtttaaagctgctgggacgttagaattaggccatgagactggtctcattttaactatagtggtatttggcactagtctaaacttccatataaatcactcttttggaacaacaaagggggagggagaaaactaacggcctgttagatgagtaccaaagccaccaaacagtaatgaaatattctcattcttgattctcccagcctcaaacaacacaggttactttttttcccttgcttagaaagcacctgtaatgtaacaagcagactgcctgtaggtatagtgcaattacaaatgctctaatcattgtacatacatctctcttgatattgcagcatccatactggctttgtaatcattaattttttggcagattgaatgtgctgtattgatatgtatctatgtaattgtattgtatgtctatagctaattcacattttgaataatgttattttatttacttttttaagagaggagaa

SEQ ID NO: 2875 - DNA, 701 bp, Macaca Fascicularis
  misc_feature (1)...(701): n = A,T,C or G
gannnnnnntactatccactgacactggtttggcagttggtactgctgaacatttttatnnnnnnnnnnnnnnnnntatatatgttagtattgaagaagctaacgggtatactatcatttttgatgtgtgggctgattataatttcctgtacattgggatgaaactactttagcaaagtccacagatcagaaaccatacagtagtttttnnnnnnnnnnnnnnnaaaataagaaaaaataaaaagtcaattttaatattttctgcctctttcccaaattacccttcccacttgctcgacaaatctatgtaaagcagtttgtttttcatgttttaactttaccttgcnnnnnnnnnnnnnnnnnnnnnnnnnnnnnnnnnnnnnnnnnnnnnnnnnnnnnnnnnnnnnaaaaatcatgaagttcatcacttttcaggagtatagataaaatcaaatnnnnnnnnnnnnnnnnnnnnnnnnnnnnnnnnnnnnnnnnnactaaaatgagtgctgtaatgttacagggctttcaggtttgtaaaaacataaccataaattatattgacgtcagatatgagttgagtatctataaaatatcacgtgtatctcaaaatattggactgctgtttgactggatattgctgcataattttcttctattgtcccatatccttttggagagagatttaatgggatttgaaa

SEQ ID NO: 2876 - DNA, 705 bp, Macaca Fascicularis
  misc_feature (1)...(705): n = A,T,C or G
cnnnnnnnnnnnnnnnnacaccagcagagagcnnnnncagatggagatgannnnnnnnnnnnnnnnnnnnnnnnnnnnnnnnnnnnnnnnnnnnnnnnnnnnnnnnnnnnnnnnnnnnnnnnnnnnnnnnnnnnnnnnnnngagaaacccagcctgggnnnnnnnnnnnnnnnnnaggccccctcggctgcctcccagatgaagcgaaccggagcgatcaagcctcgggctgtcaaagtggaggagagtaaggcctgatggtgcctggctgccacctcatgtcgccccannnnnnnnnnnnnnnnnnnnnnnnnnnnnnnnnnnnnnnnnnnnnnnnnnncaccagatccaccgtccaaatgcctggcccnnnnnnnnnnnnnnccctcctctccactcccgaaagctccgttgtnnnnnnnnnnnnnnnnnnnnntatatggcaatgacccgcttgctttgatatgaaacaaaaaagcaaacgacaccttcatcccatctgctcccaccgtgaccgtggnnnnnnnnnnnnnnnnnnnnnnnnnnctgccctccctgcctcctccctgtcctgccgcacagccagggcgccttctcagcagtgcttccggcccagccgcccannnnnnnnnnnnnnnnnnnnnnnnnnnnnnnnttttactttgaggctttttgttttaaaatgtagccaaggtttttacaaag

SEQ ID NO: 2877 - DNA, 673 bp, Macaca Fascicularis
tgaatttcatacaatgctcatgtgtcatgaaatagtattcttcttttgtttctttctaaaacatttaaaaatgcagcaatcctttttagctcacagactgtacaaaaacaagcggtggaacagatttggcccaagggtcatattttgccaatccctgctctaaataataacagcaatggctgctgttagttaaattcctactccacacaagatcttgtacttctatttcctgatttagtcaccacttgagctttattaggtgagttgtgaaatggaaaaagtttccttatcttcctcacagggcatgccactggggtgtggctcactttggtgccccactgctcatatccctaaggggagcaggcagacaggccggttgtggggagcgcgggctttgataccacagcagcatctaggggtgaatatttacagctcctgaggccccagtgggtgtgtgttatagtgtgctctttcagtttagccatccgcaggcagcttgtgttaatcagctcaattagatcctctgccttattgcaaggacagagggctttctgtatcccaggttcttgccttagtgtaacagaaaaatcagatcacgcatgggcttggagaatgagtgtaaggttttattgaatggaagtagctctcggcaggcagatggatggggagttag

SEQ ID NO: 2878 - DNA, 723 bp, Macaca Fascicularis
gcagtgtttatcatggtaatttcattcttagatttcccttattaacattagaaaatttatactggggaaagtcgtatgaatgtggtgactgtaggaagactttttagcaaagatgtaggcctgtttgtttatcagacgttatactgtagggaaatcatatgaagaccatacatgtgggaaaatctttgtcagtgttaatcccttaattgacataagtgtactcacactagggaaaaaaccctgtacatgtagcaaatgtgggaaagactaggcaataggaatcttttacaaactcctacaggagagaagctgtatgaatgtagaaaatttagaaattgagggaagtcttcagttccaagtgtatcccttattctacagcagagaactcaaaatggagagaaatctcatttaagagatgtagcaaagtgttcactaagagtgttttatcttgctacacatcagaagattaatggtagaacaacctgaaggatttaggaattatgtgtaaatctttgcagtcatgctatttgtaaactggattctacaggagagcaaataaacattataatatgcatttcttagagcagtagctttcagtttcagttgagttatacttagaaattctttttagctagtggacatgtgaagatatttaatcacccagaggagccagtgttataatgttgaaaattaaagctgcaaaagaaataaagtgatgttaat

SEQ ID NO: 2879 - DNA, 754 bp, Macaca Fascicularis
  misc_feature (1)...(754): n = A,T,C or G
accaggtagaggcgagtgtgnnnnggacaggccacagggctccacagaaatacctcgcccagcttcagggctctccctcctgagcctagatttgccagggtcttggtgccacacacatggtttcacactgatctctatggaaaaatgctggtgttggttaaagaactgaaaaatgtgctcaacttttcatcttttctattttatttttgtaatttatattgtacacaacccgggaagtaactattttggacatgtatttttataaaccaggtaatttattattatcctggaatttagactaggtttgtttcatttgttgacttggttttcagtcaagaaggaaatgactgtctcccccatgttcaggttgtaatttcaagtgcagagtccggagaacgagttctgtcagagcaggagagagtctagaaacactggctgtgcacactgtgtcagccgtgggcctggagtggacacagggctctgctctggtctttgagatgtgagacgcagagccccagtgcggagaggggaatgcccacaccaggtccgtgtccaaaacactaagtgggtgctgcttcaacccgcatttcatgctgtgtaagtcacgataacgacgtacgagtctgtctggttgatttctaatgtaactcttctggtaataaatacaaatgtgacctttcagattgcatatctcaaaagtaacattgcctaatgttttctaataaaatatattacgtgtgttttnnnnnntccc

SEQ ID NO: 2880 - DNA, 740 bp, Macaca Fascicularis
  misc_feature (1)...(740): n = A,T,C or G
atgatatatatgtgtaccgcgacatataatccatttcactggctgagtttggcccctagccatgtgttaatataaggtagccatggcttctcagagggatgacttcccagtggaaatctccgagaatggcagtggagttgtgcaagcattatacgtcgccacataattgacttgccattttatggttaaaaatgacacattaggctgttgaatatgacgttaccttgcagaccaaaaggttgaaggcccgaaactaacttttagctaacaataagggctgtgccccagtggaaactgagttcattttctgagaaaggtttggatgactgaaatatttcctctacaatcaaggaccttgacatgtgatggctgaaactgagcttttttgtgtgggcttcggttctcactgttctgcaatgctcatggcaagttgaatggtgagctagcttagaaattaaaggtctctgagctgtattcagatcgattgggtatctagcttaccgttttaacatnnnnnnnnnnnnnnnnnnnnnnnnnnnnnnnnnnnnnnnnnttgtgcaaactgctcccttttctcgtgtttttgtaaagagcttctgtctgggccggacccagctcttgcacagacaagacaccgctgcagtcagctaggacctttccgccatgtattctgttctgtagtaaagcatttccatcaacaatgcccaattgtatctgttatttttggtttaaacacactg

SEQ ID NO: 2881 - DNA, 765 bp, Macaca Fascicularis
tttctgtcatgtaaaaatttctctttaataataagataatacatgcttgtatataaaattgaaatactatagagaaagggggagatgaaaagtgagtgtcactctctgatgttacctggacatcctcattctgttctccaggagcagtaactgctattactttttcttgggtatcatcaagataatttctatgcatatacagtcattttatgtatattattttaaacaaatgtgatcataccatacacacagatgagttgcacctttttttttagttggtctcttcggcatttttccattttttagtgtatctagactactacatttttaatggttgcatagtgtatttccattatattaaggaatcataatttaaatcacttataaattgatttttttctgtaaaattggctgtaagccagagtatatcaggtactataaatacatcactaatttgaaacaaataatggctcaggcaatcccctgtctggaatatttccagtagtggaacgggttttgctttggggtgtgtgcgtgcgcacgtgtgtcttcgctttactgtttttttgttttaattttgaggaagaaagattctcagaaataacctgtccagttcagttaaaatatttcattcatgtgagaatgcacacattttagagtgtttagaggtatatctttcaacgtgctttctattatgtttgtgggttaattgattttaggaaagggtttttttgtttgtaattttaaaaaattattcagaaacaa

SEQ ID NO: 2882 - DNA, 1670 bp, Macaca Fascicularis
atatagctctcattatcccaacatcctcctcatccactggggaccttgggcaagtcatttagcttctgtgggtctcagttttctcatttgtaaaaatatagtcatatctatggcctggttgttatagtaccgggtcatgtgaagatgtgcgctaagtgtttagtgcagggtctcacacttgataggccctaagtaaagagtagtaatcatttgccatcaccatcaccatcaccatcattattatcatcatcaattgtcttcatcctcctcctcatcatcatcatgtcatcaacaacattataatcatcatggttcttcttatcttcttgagagtagcctatccttttactgagaattaaatgtgtccctgatggggtttggatactctctgggaggccttttctgaatgaaagagaactggtgagccaatgacagcactgcgattacattattgatttgtgtctcccaaggccaagccctattaagatttgttaaatcaaacattaaaaatcccagcttccatacttttccaagcatggaccaaattcaatccatctctcctcagcttcctccagcctggtcatggttatttgtctctaactgtcacacaaggagaaggtcactaacagtcactaaatagatccaggaataatagcggctcccagagctttaaaactagaatatgttttacaaaaggaaaaatttgtcctgctgttaatacttgagcaatagaaagagacatagaagagtggcatctgccattttagggtcatctgctggttgcttaggtggactttattaatcccattttccaattgagaaaactgaacttcaaagtggttaattgacttgtctaacgataccagctcgtaaatggcagaggtgaaatatgaacctaggctcatctgactccgaagcccatgccattttgacaatgttctgctgcttttgtaaactcacaaggacttaccgacactatacactgacccatgatcttatacacattatagtttccccaaagacttctcacggcagtcgagtcagggttagttagatgaacttgcaaagcaagggactccaaggccagggccaccttcccttcccatgtggtatctttataggccagaaatagaaacttttccccaagccctgagccatggtcattatgccctgagaccttgagagcaaggataaagagtttggaaagtatgacttccatcttattcctatccctaggcaaatgtcttacaccatccactttactcatcttaagataggagcatagcaagatgatattctgtactgctaacctgaatggatgaatggacagcagacaaccaacactgggtatatttgaactatggccactctttaccaataaaacaagacaaaacatcaaagcctttcatttcacaccatcaagggcatactcattaccagagggtcctctaatccaatgcccacatcaaattctctgccctggggctggaagttggccttctcccacacttttttcctggcactatgtttggaggacatgtgtaatatgaggtatttacataagagaaggcaggcaaaatatatacctgcaattaaaaaaaaatgagaggatgctgcttttcccatgaagggccaaggattcattaaaaaaaaaaaaaaaaaaggccaca

SEQ ID NO: 2883 - DNA, 651 bp, Macaca Fascicularis
  misc_feature (1)...(651): n = A,T,C or G
ccagtggcagcctgcctaagactgttttaccttatgttaaggaagttaggtatttcaaatgttacatatgccggcacannnnnnnnnnnnnnnnnnnnnnnnnnnnnnnnnnnnnnnnnnnnnnnnnnnnnnnnnngtcaggagttgaaaaccagnnnnnnnnnnnnnnnnnnnnnnnnnnnnnnnnnnnnnnnnnnnnnnnnnnnnnnnnnnnnnnnnnnnnnnnnnngatccagctacttgggaggttgagnnnnnnnnnnnnnnnnnnnccgggaggcagaggttgcagtgagtcgagatcatgccactgcactcgagcctgggcgacaaagcaagactttgtctcagtaataataataatgaaatattacatgtgcatgaagttttaaattactcattaatgaagaaaataaaggtagtttagacattccaagagttaactgtagtttacaaaaatatattaagcaaaaatatgcttgatatattaagcagaaattttgtttgttaagcaaatgtaaaattcagcaattataaactattccttcagacaatgtacttgaagtctttcggtagttctgagaatatggtcattgaagttggatctaaggaaagtggttatcggttgctttttatttataaagaagcaaa

SEQ ID NO: 2884 - DNA, 2137 bp, Macaca Fascicularis
atttaaatgtgaacatttcttggtaggcggttatgtttctaccttgtggagagaaatgtaaagcagttatctttcaggcatctatttaaacaaactaaaaagtcatttctttctgggttttgtattcatcatctgtgatttgctggaagcatacaactgacttgtgaatcactgtcagatatagattcagttaacattttttataagccttctatatatttggtactctacaaggtgctttcatacaccttcactcattttatttactttcttagtaaccctcataggtgtcattgtccacatttgacaagtaaagctaagagatgttaaataactaggacaccgtcatattaatgaataataaaaccaggacttgaatacaagtcctagatctctgagcacaatgctattgttagcatcatttccccattgggtattaaatccttgtagtggatcttgcttggaagtttttattgagcttttcttccaatcagcatatcaaatagatgtatcagaaataattgtttaaatgacttgagtcatttaaatgaggaaattgccttttagagtcataactacctatctgtgtaatcatgtaataacagttatcaactacaaagtggggagtttctgtttatctctccatttttacttcagtaatagcaactacatgttaggatttgcagatttgttttatatttcagaataagttatttttctttttcagctggctgcgataaaacttggccgatatggtgaagaccttctcttctatctctattacatgaatggaggagacgtattacaacttttagcagcagtggagctttttaaccgtgattggagataccacaaagaagaacgagtatggattaccagggcaccaggcatggagccaacaatgaaaaccaatacctatgagaggggaacatattacttctttgactgtcttaactggaggaaagtagctaaggagttccatctggaatatgacaaattagaagaacggcctcacctgccatccaccttcaactacaaccctgctcagcaagccttctaaaaaaaaaagacttcccttttcttggggtatggctgtctcagcacaatactcaacataactgcagaactgatgtggctcaggcaccctggttttaattccttgaggatctggcaattggcttacgcaaagggtcaccatttgaggtcctgccttactaattatgtgctgcccaacaactaaatttgtaatttgtttttctctagtttgagcagggtctgaattttttcatttatttcctttttttgccagcagacagacttgagtctgtaaagacaagcaaatacactgacagaagtttaccatagtttctaaaatgtaaaaaagaaaacccacaaaagactcaacaaaattagaccacaaattttgcattgttcattgtagcactattggtaataaaataacaaatgtttgtgcatttttatgtgaggatccttctcgtatttcatttggaaagatgagcaaggtctgcttccttcattttacttccccttctgtttttgaaaggcagtttcgccaagcttaatgcaagaatatctgactgtttagaagaaagatattgccacaatctctggatggttttccagggttgtgttattactgagcttcatctttccagaatgagcaaaacactgtccagtctttgttacgattttgtaataaatgtgtacattttttttaaatttttggacatcacatgaataaaggtatgtatgtacgaatgtgtatatattatatatatgacatctattttggaaaatgtttgccctgctgtacctcatttttaggaggtgtgcatggatgcaatatatgaaaatgggacattctggaactgctggtcaggggactttgtcgccctgtgcactaaaagggccagattttcagcagccaaggacatccatacccaagtgaatgtgatgggacttaaagaagtgaactgagacaattcactctggctgtttgaacagcagcgtttcataggaagagaaaaaaagatcaatcttgtattttctgaccacataaaggcttcttctctttgtaataaagtagaaaagctctcctcaaaaaaaaaaaaaaaaa

SEQ ID NO: 2885 - DNA, 737 bp, Macaca Fascicularis
  misc_feature (1)...(737): n = A,T,C or G
gagtacagtccatatagtgtaatannnaaaacannnntacactgatgctnnngtggctcatggtttcctggtgtctttgatttaacacctggcttcctggtatctatggctggttagatatctaaacttgtattattagtgctttacaataataatttcctcgactgaagtccagaagtactaaagtacttcttttttattgctgtgaatgctttagacttatcttcaaaaataggatgcgttgtttctattgcgtatataactgaaatattttataaactcactgtaatcaaatcttataaaatctgaatcgacatgaaaagttgtcagtgcttgaatgaaatactaaaaatcatgccacaggatgctagataaggtaaatgaccatgatgtgtccttggaactggtgggcgcagtgttgcactgctcgcagggcaacaactttaagaacagaagagtggtggtgtggaacccaagattcttggcgactaggggatttaaaggttggggaggagtaattcaatgatttgaaaagaaatactttataaaaatttactccatatattggctaagaaaaatgtaataaaattttggtagtgaaaattatatcactaatgtttaccattattactagtatgaataatacacataaggtagtgacttggaagctggtgaattctttgttggtataacaaaatgcaatattttgttgtaaagcatcctaactacacatgtaa

SEQ ID NO: 2886 - DNA, 106 bp, Macaca Fascicularis
aacattatctcagctggtttatcaagtaggtgaaatgagcctttcgtgtacacacaggcacacgtggcacacacagtttgtgaacacacattttctgttgaagtta

SEQ ID NO: 2887 - DNA, 532 bp, Macaca Fascicularis
  misc_feature (1)...(532): n = A,T,C or G
ccaccccatcctcccnntaaaccctctnnnnnnnnnnnnnnnnnnnnnnnnnnnngatgctggacactacaggtatctgtccctgggccagcagggacctctgaagccttctttgtggcctggcttattttttttgtttttattttttttcgtcctgtggtttttctaatagactttcaagaattttgtaatctcataactttccaagctccaccacttcctaaatcttaagaactttaattgacagtttcaattgaaggtgctgtttgtagacttaacacccagtgaaagcccagccatcnnnnnnnnnnnnngaatgttctattaagaaaatgatgctggtnnnnnnnnnnnnnnnnnnnnctgttttttgatgcttggctccctctgctgatctcagagtttcctggcttttcctccctcagccccttctcacccctttgctgtcctgtgtagtgatttggtgagagnnnnnnnnnnnnnnncctccccccagcaccatatatgagtctcaagttttattatgcaaaaa

SEQ ID NO: 2888 - DNA, 770 bp, Macaca Fascicularis
  misc_feature (1)...(770): n = A,T,C or G
tatgtgtgatgtgcgcagacagcacntnnnnnattaggttttagcatggtcttannnnnnnnnnnnnnnnctcaatgtgaatacttcagccagtcttatgaataggaggccatgcatgggcacagaataggttagaacactcgtacaagatgaccacatatagaagcagaaagcccnnnnnnnnnnnnnnnnnnnnntttctctagtagctgaatataagcaaatatgtctaatggacaccagttaatactttttaaaactactcttaaaaaaaaatatatgttcccnnnnnnnnnnnnnnnnnnnnnnnnnnnnnnnncattttttcaacctttattaaaaggacaaataaactattttgaagatcagactcctacctaactggaagagaaatgtctattaaatgtctctcctcttnnnnnnnnnnnnnnnnnnnnnnnnnnnnncttcagagatgaggatatagtttgnnnnnnnnnagtttagtctttaggacatccaaaannnnnnnnnnnnnnnnnnnnnaaatagcaaaggacactagccagaaaatacgatgtatgtgtgtgcacctgtgtgcctgctgaataacttgacagtataacagataaggtaacagaagatggtggctatttgaattgtattagcttaatgtctgcatatctttggccannnnnnnnnnnnnnnnnnnnnnnnnnnnnnnnnnnnnnntgtttattagtttattttttattgttttctttttcatccaactaaaacaactgtaatgt

SEQ ID NO: 2889 - DNA, 606 bp, Macaca Fascicularis
  misc_feature (1)...(606): n = A,T,C or G
tagattgtcatatctgttatgtagttatcctattatcaagtcctttgatttttttttttcctctagaaaatcctcagactgtcaatcttccgtattctgaatattataatgctgtggccatttctatagaaagattacttgcaagtgtgtgtcttgaaaataacctcttgtatttgtgtgtttatgtgagttctgtctaagaggtcagataagctctggaagcttcatcgtctgtacctacacgtgactgtatctgggttacatgggcaggcggtaccaagtcctgctctttgatggggtggctgagagagaaaggttcctgaactctccttgctgtgtacgcaccacatctgtacttcagagcggtggaaaaccatctacaacactgcatttcttgtggttgtgctgttactggtataaagtcaagtgccttcaatgctaaaggctcagaaatttttcttaaactgatttcatgtcctatgcaagtgttttnnnnnnnnnnnnnnnnnnnnnctttgtaaaacttgtttacgcttcaattgtacatagtgatttttaaagaaatatatagtatttttatttaggtacctccaaacttgaattcgt

SEQ ID NO: 2890 - DNA, 736 bp, Macaca Fascicularis
  misc_feature (1)...(736): n = A,T,C or G
aagaatgaacagcttgtatcagtttttagccgcttaaaatatgannnnncaggaatatttgtaagtgaaaataacaatggtccttacactaccacaacatttggtggtgggagttcnnnnnnnnnnnnnnnnnntaacatagtcatttatttatgagggatcttacaaatagtgtgtaatggtatttatatttgtgagtgttgcactttttctatagatttagagcaactttcaggtttatttcagtaataatgtctttctcaccttcttacgttgtgaagtgtttacttgagtcagggagagagtttaatggggttnnnnnnnnnnnnnnnnnnnnnnnnnnnnaggnnnnnnnnnnnnnnnnnnncagccccattgctatgggggtggaggtggaaaacctcagacttgacaaataacctctgctagatagatgtatcttggaaatctagaaattacagtgaatatggaatgccggtgagcagacagcatttcccactttcctatcttaccttgagggtaagacttgagatatatatatatgtataaatttgaaacctagattcttcattgtttgatgtttgcagtatgatgtaaggcacattttatatctgagtcagtggtttcccttggattcattctcctacttgattgaacccatttaagtcattttagaaaatggtgatttgctattaaaattaactggagagaatactgaatgctgaatgaacaaagt

SEQ ID NO: 2891 - DNA, 2415 bp, Macaca Fascicularis
aaaacccttagggacctggtatagacgcggaatccatttcacacaacaactgctatttgaaggaaaaaaaaaaagaagcaaatgataccaagacaagctctatgcacagttctttttgtttcacctgcagtcctttcttctccaggatatgcacaggtctccagggtctttcatggctcagggtcagggtcactcaaatgccaacccacatgttgtcctccaaatattcccttctatccctggcatcctgttgctgagctcaacttttactttttgactttctcctttgtaattaatctctatctgggtttctctctttctctgtgccatttggtttccttaattagttccctgtgccagcccacagtcagagtcataattggctctggggaagatccaagttattttctgagtaagatattagactgccatatgatccagagatgcaaagaaatccctagagagtgtaggagttgtctaaatccatgtgtcagttgtagccagcgaattgtgttgaagcagagagaaaaagcatgaaaagcagccctctcccactcctcagggccctgtctccaaccttacatgaggctttttgaacatctcctcctggcccagctggggtgagagcaagtcctctaaggcactgcctttgagtcttgctcagcccatctgaatgatcccaactctagaattgactgttttcaaattgtgtgaccttgggaatgttatctggcttcaaccacaatgccctacctccagcccctctcccaagtgatcctaaatacatggctgtttcccccgaccctaccctacctcgggacacaggctcatggccttatggcacttcaccaccagaagggatgctcagagttcctatttccacatctaacccgctaattcctgggaaaatctgaggcctggtccccctagtgctttccctggctggcctctccacattttcatttgatggtggagtgagatcaggaaaaataggagaggaactttgccctgggggagaagagagttaagtgtggaaaggggtgagttataggaggttaagcagtccaagatttctctccctgtgcaggaggccatttcctgatgtgagggggtttgaacccaattataatgggacagggttgggtattgacttcccatctcttctctctgtttttctcccactatctgtagcccaaaactcttgcagaggactttgatctttagtatgcactcttggtcagggtcctaggaactaaccccgatcctcactccacccggatctaccacatcccctacacacaaacacatgctgcggggagggagttttcccctgggtcaagtggaggatccttagatcaccttgtgctcctgtggactggggtgtgtgtgtgtgtgtgtgtgtgtgtgtgtgtgtgtgtgtgttgggaaacttagctttcagagaatgtctttgggctctcactttctctctcacacacaaattctggggacttctccaagtccctgaggaacctgaccactgaagctgatcatgagatgattatatgccaacacgccgccttcagtggcctggccttgacttagggctgcactgtattctcagcagtggccttgcaggagcccttttgaactgctttccctattcaacccagagttggggtggtgggagaagaggggttggagtgaatccatctctatttaaattccagctgggattactctgggagtcttcctggcttgttttgggcccaaacttagctacattgtttattggctcccaaagtcgggattggagagtgaaaagatgcaggcggtgaatccttctgcactctcctccccaatctctccagtgcttttctacctaggaggccagtggaagggagaagaggccatgccgtagcccacaaggctcattgttcttccaggcttggttcactctgcctttgattcagaagctctttccctacccaacaagactacacttccttgccttctttctgttcttcctttttgtgcatataaacggtgtgttgtgatatattctcagtgcttgtgcctaccttggaactctgttcttgctgttcactccacatgtgatactctggtccaagatcttggccaggtgccttctgctcaaatatcatctcagaggtgcttcccttgaaaactcggtgctgtttccatagttactctatttgattactctaagttttgttgtcttcatagcacttatcaccctctggaactattctgttcatttatttacttgtttaatgcttggctcttttcccctcctaatgtaaactccatgattgccaacatctgtttacttgctccagttcccccctccccacttgttcctggcactagtaagaactcaataaacacttgttgacagaaaaaaaaaaaaaaaaa

SEQ ID NO: 2892 - DNA, 416 bp, Macaca Fascicularis
ggtgtcagcccccgagctatagggcgccgtactgacccgcgcgtgcactccccaccttcggtgagtggccgccatggtggagcggggtcggagccacgtccttcaggggacgtccggggcatttcctgttttgtggtaggaaacctccctgacctttcagaactgaacccaatcctgaggctgactcctctacagaaaatgagaggggaggaggggggtgagggaatgagtgggaggtgcccgcacctcctcgcccggctcctcaggaagaaaccgcgcgcccttcatgattgtgctggccgagggaccacggcgctcacgcctgatgctgagctttttaatgtcatcatcgtaacattatttatttaaacgtagttattctggtatttaatttttttttttcagagaggaaaaaa

SEQ ID NO: 2893 - DNA, 2702 bp, Macaca Fascicularis
  misc_feature (1)...(2702): n = A,T,C or G
actggcagttagtcacagcttttttaaaagtgacttatctgtaatatacaatatgactaatttagcagctaagcaatttcattgtgatcttggtgtcagtggaactcctgtcacctatccaacagttaagtcatattgcataactgtggggtgacatcaccatgctacaagattattggctgtagacaagaaaaaaaagtttcctggactgtaagcctttccggtatctgaacgaacaacttgtgctgttactgcggtacagccagagagaaaagtaaaaagggatttatagtggctggcttttggtgtgtcattggaaatcacagcctgtagcacacggggagattctccaatgtgcctaattatgagatcccctccctttgtgtcatattccacagtatcggtcattaaggtatgaagtgagacagccgacacaatggcattctcttgtaattagagcattttatttttctaagaactttgtagtcttccctttagaagcaatacttttaaaaaaatgcagtccaccatctgctatacacatcgaaactgaagagatggtcagctgggacccagctgaaaacctttcatggctgaaagcccgtttattttccagggaactggtagtacaagttaattaccacataatacatacattttaagtttatttaattgtataaaatatcaagctttaaaactacccacagaaatgcctaaaacctggagctatagctgactgaaatttgagaatataatggctaacatttattgtttactatttattgttgaccatcacagttctggctaaaatttattgtttactatttattgtttaccatcactgttctggctattactgtttactatttattgtttattatcaggttcaaagtaatttaatatattaattcattaaatactgtgaaggcaatactattattattcccaggttaaggatgagggaacggagacggtgagatcacaaaactggaaaagagtagaaccaggatgtgaatccaagtggttcagtaccacggcacacagtcttaactgttgccttccactgtatcttttgtaataataataacaacaattattactactactgctgttgatactaccagtgctactttcatctactgaatgctttttatctgacagactctgaattataaccatcatatctctttattaactctatgaggtagaagctgtactattattatccccacttggtagattaggaaaatgagacacatagaaaatcagtcacacagacagtaggtaacgaagcaaggattcaacccctgtctagatccagactccatgcttttaacgaccatactatgctgcttttcaatagctgccatttattgagtaccaactaatgtgtaatcttcacaaatatcctgcattgtaagtattattagtcctaatttatagatgagaaaatggaggttccaagaaatcaggtaacttgccagtttctaagcagcagagccagaattcttccgacttcactgaacaccactacaccacactacctctaaaaacttgaaataattctgatgcaggatgacagaatataagtctgtaaagggctggtatctcaggagtcacttagtgcaaagagtagtatcttggtctgggcatccccaagggtggggcctggtaaaaagatgctggaagtgtcttacaagtcagcagtcactgagggatggtgctctgatggaggggcagtcttcttgagtgcaccctgttcatctgtgaattctggatgatcctctgagtgtgggcagattcctctctctcccgtcaattctctctttcttttttcatttcccttgatatttccaaaacggcactcctctgccctccttcgtttagtaaggagtcttgcacatgctcagttctcttgccttgtaagggtttcctccccacccccaagcctcctctcctcttctagcacatattcagccctctggaatgcggccacccataagcatgacacacattttcaaagggctttagaaatgcatgtgattagtgaattacattttgttaaaggggaagtgtatcaatactgcacatatgtaacctgttaatttcacagtatgggcatcctgccttcaaaaatataataattttaaaaatctgaaatcacaataaaaagcaaaacaaacagacaaagactgaaaaacagtttgaattttgcaagagaatttactccagagtttttaagtataaagagcccctgtggtttatttaaattcttattctattaaaggaaatcaaatgtattcatttattcttggggacacagagaataaaaatatgtatgacacatccagcatgtacctaaatacttaaaaagtgaagtcaaggccaggtgtannnnnnnnnnnnnnnnnnnnnnnnnnnnnnnnnnnnnnnnnnnnnnnnnnnnnnnnnnnnnnnnnnnnnnnnnnnnnnnnnnnnnnnnnnnnnnnnnnnnnnnnnnnnnnnnnnnnnnnnnnnnnnnnnnnnnnnnnnnnnnnnnnnnnnnnnnnnnnnnnnnnnnnnnnnnnnnnnnnnnnnnnnnnnnnnnnnnnnnnnnnnnnnnnnnnnnnnnnnnnnnnnnnnnnnnnnnnnnnnnnnnnnnnnnnnnnnnagagcacaactctgtctcaaaaaaaaaaaaaaaaaaaaaaaaaaaaaaaaaa

SEQ ID NO: 2894 - DNA, 734 bp, Macaca Fascicularis
  misc_feature (1)...(734): n = A,T,C or G
tgggtggagcgnnntgggcagctgnnnaccatgcagagcgccgtgagtnctcagggctcctgccttctgtcctggtgtcacttactgnnnctgtcaggagagcagcggggcgaagcccgggccccttttcactccctccattgggaatgggaatcacagagacattcctccgagccagggagtttctttcctgccttcttctttttgctgttgtttctaaacaagaatcagtctatccacagagagtcccactgcctcaggttcctacannnnnnnnnnnnnnnnnnnnnnnnnnnnnnnnnnnnnnttggttccaagccccggagccaactgctgctttttgaggtggcgctttttcatttgcctcttcccacacctccacagttcagtggcagggctcaggattccgtgggtctgttttcctttctcaccgcagttgtcgcacagtctctctctctctctcccccnnnnnnnnnnnnnnnnnnnnnnnnnnnnnnnnnnnnnnnnnnnnnnnnnnnnnnnngtttttgtactgtaaagagacctacctcaggttgctggttgctgtgtggtttggtgtgttcccgcaaaccccctttgtgctgtggggctggtagctcaggtgnnnnnnnnnnctgctgtcnnnnnnnnnnnnnnnnnnnttgcatgtcgtgaccaacnnnnnnnnnnnnnnnnnnnnnnnnnnnnnnnnnnnnnnnntggnnnnnnnnatc

SEQ ID NO: 2895 - DNA, 656 bp, Macaca Fascicularis
accccctgtgctcaagtaatccgcctgccttagcctcccaagtagctgggaccacaggcacatgctacatacacgcctggctaattttttgaatttttgttgagacgtgaggtctcactttgttgccaaggctggtctccaactcctgggctcaagtgatcctctcaaagtgttgggattacaggcgtgagccactgtacccagcctttgcctgtctttatacattaccacactccattgattatggtagctttcatagtaagtcttgaaatcaggtactatgggtattctaactctgttcctctttttcaaggttattttggctattctaggtcctttatgttttcatataacttttagaatcaacttttcagtttctactgagatttggagtggaatggcattcaatgtatagatcaatttgaggtgaatcagtattttgctaataatcggtcttccaatccaaatagtatatgtgttactcaaagtagagggccataattattctatttgtgtgtgtatgatttgctcactttatttgacaatcagtggttagttcttgtccacaatgactttatcaatagatttttgaacgtggtgaccagcacataggtaatcaatgtatagagcttgtgaatgttcagcttcatcatgtt

SEQ ID NO: 2896 - DNA, 725 bp, Macaca Fascicularis
  misc_feature (1)...(725): n = A,T,C or G
ttnnnnnnnnnnnnnnnnnnnnnnnnnnnnnnnngacattttagatgtttatcaaaggtcttttatggggaagaaagtaaatgtatgaaataataaatgtgtgacatttatgggtaatgttggctctgaacaaacttttgaaaacttggttgacaaaattttggatcaactgaaaaaagcatgacttttgaaatctctgaatgccttggttctcagtattatcattctttattgaatttatttcttattaaaatatgtagtttttaagactttttttctgacagtattatgtaattttttagtgtgggtagatgggagtgtcgcttgtatgttatcgtacagctgacatgtatttttgtctattctttattatcttagtttcatgctgtgtatgtaccataaccaacctattgcctatgagaaacatgtaagataatgtatttacagccattgttacaagtttataatgtatttttctatcttgttttatatgtatgttatataacattcaaaaagaatttttttcttgattgagaaaaggatacaaaatgcaaaatccacaattttgataactgaaaattgccaattgttttgcagtactttattatattgggtgtcttgtcttttttgggcttttagttagctaatgaatgaatacattagacacttttgggttttagttgggattttacatagcttgcattttaattctttggttctttgct

SEQ ID NO: 2897 - DNA, 2330 bp, Macaca Fascicularis
aatcacaacaaaaccacagccctctgctctctctgatacctgcttgaggggcgtgtcccggtctccccagggtcctcattataagcaagaattccctgagagaaggaaccatggctgttttgttcacagctgaaggctaaggagagttataaccctgttcctgtaacttagaacagtacctggcctatggtagccatgagagacgggagttcagtggcaagtcaggtccagccacatcctaagaagcttatgaagggtgactctagtgaagactttagtgtcacggcccgagtggtaagagtgtttgtcctgggcagcttcagctccagatcccaactcagccagaattgctgattcatgcacccaatgaaccatgaagttagtggtccactgtgtctcaggaagatttagaatattaaatagaatgttcaagacactgtaagtcatggtgttaatatgcaggcatttagaaatctgtgaaaattttgtattttgtgttcttgaacgtgttaagaaaaatagcctactagaaaaagaaatcagactttaacaaatttagaatatagacttttactaaacataaggatattagttcattaaattgtaagacttatgaaaaaactaagaaaatgttatcaggcagaaatttgtatacttaaagataagatcaaatacattttacaaatgcagttaaaatgataactaagcttgtaaataaagaattcaattattgcaattgttaaaaattgctagattcatatttggaataagaggatttataagctgaacctaaaagcttaaagacatgtgtttttaaaattatgacctcaataactataatattcatttttacaaaccaaaacaaacatctaatttgtctttgctgtgttggaaactgatctgaggacttgaaaagcttacgtttgatacattttccttacagagacacaattagcagtggttgtcttctcgtagtgcttgactatgggaaaataacattctcatcaagcttagcaggtgcttcatttcatatatcaaggagagtgctcattgctaaagttaaataatacattagcattctggatgtacatattagtttaattgcctccattaatattattcgatagatagggaggtatctactctttttttcctgaaacatcttgacattggagcctggattattgaagtccatatttagttctctcagcactgtgaatgacattggcctaggctcaagggaaataatatatcggccttcataggacagaaatatatgcctttattatcctctgctcactctttggaaattttacagtgtgaagatgatgtttgtggcacttcctatttatattttaatttaaacttatgactgactttattaaaaaaaaacttctactctactgcagcaatactgaaaagccaacttacaactctgctacaatgttctttgggaattgaaggcgtgtgattaacgtccaaatatatgctcagtgtgtgtttagagtttaaccgttcacaatagcagtcaccattaaagaaaaaaaaagaaaagaaaagaaaaccatttttctacttgggaaaattaaagaggagtaaacaaaattaggaaacataaagaaaaaatgccataaaactgagctataatagaaagttgcccttcttcacatagaaaaggaataatatgtaaaggcaggcatcttttcagacaagaatggtgtttttcaccccctctttgtcagcctgtcatccagaggtcagcagaatctgaggccttcagatcctgagccccgagacgtctctcctgccagcctgtttcttgtctctgacctttatttgccttccccctgagctgctctaccatgcagaccagcctctgaagtgaagccctctttgtcatttatactttgtggccatgtaccagtttattgctgttcatgtaataaatttggcaatccactgataatgtcaaggcaacaaatacattttaagtggtgctttctaactgataaataatgcatacataataattttgtacgtaacagtaacagtctgtctttttcactaagctaatggaaaggtagtggatggtgctatatacatgtatcctatttatagtaagagcagcaatgtacacttccatagaaaataaaaagggtttttgtaccatgctttgaattgctcaataaatatatcacagttagtaggtgttattgtaaatactatcagtatgaaatgattaatgtcctgattaactttacgagtaattgtatgttatatactttgtaaatgccaataaattatgttgattgcaaaaaaaaaaaaaaaaa

SEQ ID NO: 2898 - DNA, 1917 bp, Macaca Fascicularis
agttaatgcgatctgaagaaaaggtttttgggctggatatctggtcctttttatactttttctttgggccacaaccttcctgaccctggatgggctttgtaaaaagagcaagacgtgtgtgccaacctgtgcagcactgagggcacaggcagcaccaggtcccagggtgttcgggtgctgccccagcttgcagtttggtttccttggtgctgaccacagctgtggggccccaggaatactgtgctgcaggccttagacagatttgggtgttactgattctctattcagcgtggcctgaacagtccacagatggcagtagaccatggggtgttgagatgcgaggagactccggcattctttcccattctgctttcgctcctgacagcttaggaaagctctctttgaaactttggtatgtgtggacctaagattgaatgtatctgaaacgttgctaatttctcactgtccttgcttcccaggacgccaggaaagcatgtgcagatgcaactctctctcaggtaagagcccactgagtcacgcagagccatctgcctgtgaggaggctggcacagcacccacacctggagcctcaggagggctctgctcagattctctcctgcgcagtgaggatgccaagcctctgtgtggagtgcttttgttaagaagtcgtactgatgatcacaaacaacatcgacccagtgggaagaatccaaatgcgcacgaggaggacactgcgagggcacctggccaagatctacgccatgcactggggcacagactccaggcttctcgtcagtgcctcgcaggatggtaaacttatcatctgggacagctacaccaccaacaaggtccacgccatccctctgcgctcctcctgggtcatgacctgtgcatacgccccttctgggaactatgtggcctgcggtggcctggataacatttgctccatttacaatctgaaaactcgtgaggggaacgtgcgcgtgagtcgtgagctggcaggacacacaggttacctgtcctgctgccgattcctggatgacaatcagatcgtcaccagctctggagacaccacatgtgccctgtgggacatcgagaccggccagcagacgaccacgtttaccggacacactggagatgtcatgagcctttctcttgctcctgataccagactgtttgtctctggtgcttgtgatgcttcagccaaactctgggatgtgcgagaaggcatgtgccggcagaccttcaccggccacgagtctgacatcaatgccatttgcttctttccaaatggcaatgcatttgccactggctcagacgatgccacctgcaggctgtttgaccttcgtgccgaccaggagctcatgacttactcccacgacaacatcatctgtgggatcacctctgtctccttctccaagagtgggcgcctcctcctcgctgggtacgacgactttaactgcaacgtctgggacgcgctcaaagccgataccaggaagaaatgatgaattacgttggcaagaggaagaaacggagaaagcgggatccccaggcacccagacggcctccatcatccttcctactcttctgccaagaccactatgctcagctgaagagggagaacccgagctggtcggtggtgcaggtggccaaggccacagggaagatgtggtcagcaacgacagacctggagaagcacccttatgagcagagagcggctctcctgagagctaagtacttcgaggaacttgaactctaccgtaaacaacggaaacaatgtaatgccagaaagaagtaccgaatgtcagctagaaagcggtgcagagggaaaagagtcaggcagagctgatggatccagtttgaaaaaataaaatgccattcaatcataaaaaaaaaaaaaaaaaaaaaaaaaaaaaa

SEQ ID NO: 2899 - DNA, 1473 bp, Macaca Fascicularis
atgtccactcccggggtcaatgcgtccacctccttgagccccgaccggctgaacagcccagtgaccatcccggcggtgatgttcatcttcggggtggtgggcaacctggtggccatcgtggtgctgtgcaagtcgcgcaaggagcagaaggagacaaccttctacacgctggtatgtgggctggctgtcaccgacctgttgggcactttgctggtgagcccggtgaccatcgccacgtacatgaagggccaatggcccgggggccagccgctgtgcgagtacagcaccttcattctgctcttcttcagcctgtccggccttagcatcatctgcgccatgagtgtcgagcgctacctggccatcaaccacgcctatttctacagccactacgtggacaagcggttggcgggcctcacgctctttgcagtctatgcgtccaacgtgctcttctgcgcgctgcccaacatgggcctcggtagctcgcggctgcagtacccagacacctggtgctttatcgactggaccaccaacgtgacggcgcacgctgcctactcctacatgtacgcgggcttcagctccttcctcattctcgccaccgtcctctgcaatgtgcttgtgtgcggcgcgctgctccgtatgcaccgccagttcatgcgccgcacctcgctgggcaccgagcagcaccatgcggccgcgacagccgtgacctcggttgtctcccggggccaccccgccgcctccccaggcttgccgcgcctcagcgactttcgccgccgccggagtttccgccgcatcgcgggcgccgagatccagatggtcatcttactcattgccacctccctggtggtgctcatctgctccatcccgctcgtggtgcgagtattcgtcaaccagttatatcagccaagtttggagcgagaagtcagtaaaaatccagatttgcaggccatccgaattgcttctgtgaaccccatcctagacccctggatatatatcctcctgagaaagacagtgctcagtaaagcaatagagaagatcaaatgcctcttctgccgtattggcggatcccgcagagagcgctccggacagcactgctcagacagtcgaaggacatcttctgccatgtcgggccactctcgctccttcttctcccgggagctgaaggagatcagcagtacatctcagaccctcctgccagacctctcactgcctgacctcagtgaaaatggccttggaggcaggaatttgcttccaggtgttcctggcatgggcctggcccagaaagacaccacctcgctgaggactttgcgaatatcagagacctcagactcttcacagggtcaggactcagagagtgtcttactggtggacgaggttggtgggagcggcagggctgggcctgcccctaaggggagctccctgcaagtcacatttcccagtgaaacactgaacttatcagaaaaatgtatatag

SEQ ID NO: 2900 - DNA, 1731 bp, Macaca Fascicularis
  misc_feature (1)...(1731): n = A,T,C or G
taaccaaggtaaaagcttttccacattacacgtaaggaaatagcaagtcagaacctgatggtgaaagctaaagctccccactaagatcaaactataccatgcatgggtttttaccagggtgctgtcatatactctcagcactccaaagttacatggtatcttagaagatcaggagatgtactgtttcacaatacatccagtgctgtctcacaaattgaattagaaagcaaaattaactgatattaagttgtttcactggtagtgttttccaagataagctaaagtgatttctagtttagagtcatgaaaatccttcatttagaattttttcatgtagatctagtacattaatatttatgacctctttttttttcagttcccgagaaatattgtttttattcttattttatactaaactcagaatgtgattcaacatttgctttatttttttttctaatttttatctgtgtttacttcagtgattctttctaagcaaaatgaataaatgttttggtataatgaatatttctgagaataaatgcattttctttgtcttgccctggttagagaatatttctagatgctgatgagcgaattaatggtatttcagacccctcatgatctaataaagccatccttctcaatggtcaattgaggttaggcttttttaaaggaaaaaaagagtacattatacactcactttcttaatctaatggctctaacattgctttggagaacttcatgactttccaaccattttctagtttagtatggaagcaagtaacgttctgttcattaatatgggaaggacagcgtatgggattaactcgttagtgtctccatcttccatttgccacgcatgttgcaatgataaatgaaaacattttttaatattttgaaagcttgaaaatctatttagtgaatacaaactggcaaattattgctatcattcacatttactaaagaacttgcagactattggaagtttctttggattgctgtttagtctgtttttgattacctacaggtcaaatcacatttttttcttagtgtcacatgatattgaactgttgttgaactttccttttaagattgtaagatttatctgagatcctttaatgaagttcttacttacatataactttgtaccagaaccccaggtaaggaaatttgaaagcataattaatgttttctcatctttattttctttcttttttggagggggatnnnnnnnnnnnnnnnnnnnnnnnnnnnnnnnnnnnnnnnnnnnnnnnnnnnnnnnnnnnnnnnnnnnnnnnnnnnnnnnnnnnnnnnnnnnnnnnnnnnnnnnnnnnnnnnnnnnnnnnnnnnnnnnnnnnnnnnnnnnnnnnnnnnnnnnnnnnnnnnnnnnnnnnnnnnnnnnnnnnnnnnnnnnnnnnnnnnnnnnnnnnnnnnnnnnnnnnnnnnnnnnnnnnnnnnnnnnnnnnnnnnnnnnnnnnnnnnnnnnnnnnnnnnncgtgcctggcctcatctttattctctttattggatattaatttattctgtttactcagttaaaatttattgaatcccttcttgtgggctcagggaaacagggaaatgaacagaccaaaatcatggatcgttgtactcacattttaatggtatgaaacaagcattaacaaaaacaacaaaagccaaataaatagtgtgtcagatagtgataccttctgtagaggggggaaaaaaaaa

SEQ ID NO: 2901 - DNA, 689 bp, Macaca Fascicularis
  misc_feature (1)...(689): n = A,T,C or G
tgacgcattgtggcgtgctggagtttgtggctgatgagggcatctgctacctcccacactggatgatgcagaacttgctcttggaagaaggtggcctggtccaggtggagagtgnnnnnnnnnnnntggccacctactctaaattccagcctcagagccctgacttcctggacatcacnnnnnnnnnnnnnnnnnnnnnnnnnnnnnnnnggaactttgcctgtctgaccaccggggatgtgattgccatcaactataatgannnnnnnnnnnnnnnnnnnnnnatggagaccaaacctgacaaggcagtgtccatcattgnnnnnnnnnnnnnnnnnnnnnnnnatgctcccctgggctacaaagaacccgaaagacaagtccagcatgaggagtcgacagaannnnnnnnnnnnnnnnnnnnnnnnnnnnnnnnnnnnnnnnnnnnnnnnnnnnnnnnnnnnnnnnnnngactggatggaaagaagaaaggggtggagcccagcccnnnnnnnnnnnnnnnnggagatattaaaagaggaattcccaattatgaatttaaacttggtaagataactttcatcagaaattcacgtccccttgtcaaaaaggttgaagaggatgaagctggaggcagnnnnnnnnnnnnnnnnnnnnnnnnnnngtcgttgcgtaagaagggaagaaag

SEQ ID NO: 2902 - DNA, 5642 bp, Macaca Fascicularis
  misc_feature (1)...(5642): n = A,T,C or G
aattcatgagaacatcacctggatgggacattgccgagcacatacaattactataggccagatcattgctatcttcatattgaggataaggaggtcaagagatgaaaaacagacttggcaccttgttgttatattaaaattatttgttagagtagagcttttgtaagagtctaggagtgtgggagctaaatgatgatacacatggacacaaagaagagatcaacagacatgcaggtctacttgagggttgagggtgggaagagggagaggatgaaaaaagtacctattgggtactaagtttattagctgagtgatgaaataatctgtacatcaaaacccagtgacatgcaatttacctatataagttgtacatgtacccccaaatttaaaataaaagtgaaaacaaagtataggagtggaattaattcctcaagatttggctttaattttatttgataatttatcaagaagttgttttccttttctcaccatggcattgctttataagccatgctcagtatgtctgaatgaaagggtgcatgtgtgtgtgtgtgtgtnnnnnnnnnnnnnnnnnnnnnnnnnnnnnnnnnnnnnnnnnnnnnnnnnnnnnnnnctgtgtgtgtgtatatgtgtgtgtgtgtatgagaaagagagggagggaagaacggaggagaggacacaataatgtgaatttgagtttacaaacatttttaaataaaataatttaatgtcaggataatttagcataataatctcttaaatcatccatctcttgagcttcagagcagtcttctaaattaatgcctacatgtttgtaaagggtgttcagactgaagccaagattctacctctaaagagatgcagtctcaaatttaactgaaaactgtacctctgctctccataaattgacacaccatggctcacttaatgaggttttaaaaaaagctaattctgaatgaaaatctgaacccagtagaggaaatattgatgaacaaggtgtagactgaaatataaatttctctgtaataattatgtatatactttagcaaagttgtgtctatgtcgactttattgctttttggtaagaaatacaactttttaaagaggactaaactatcctatttccaaactattttgtgtgtatgcaatttgtttctatgggttctggttttgttggggcatttttagttcattttaattaattaattctgagaagatgctgaattgtgtttactgagagactgtgtatctgggagagaagtctgcagcaagtagctagactgtgcttgacctaggaacatatacagtagtttgctaaaatgtttcacttggggaattttaggttaaacagcagagcatgtataaaaatactctagttgagtgctgcttttgaaacaaatgacaaaaccacactcccatagatgagtgtcatgattttcatggaggaagttaatattcatcctctaagtatactcagactaggcccgttctggtataaaatattaggacttaagaaagattaatagactggagtaaaggaaatggaccactgtttctctcgctgtctcttttttgaggacttgtgtgtgtgtgtgtgtgtgtgtgcgtgtagtggtaagtggggctggaataaaagtagaatagacctgcacctgctgtggcatccattcacagagtagaagcaagctcacaattgtgaagatgtcagtgagcttgagtagtttttcaggaactttgaatgctgatttagatttgaaactgaggctctgaccataaccaaatttgcactatttatctcttcttgaaacttatttttgtctggcatgcctgggcttttgatggtcttagtatagcttgcagccttgtccctgcaggattatgggtcatagaaagaaaagtctgcatcacactctagtcacactaagtaactaccattggaaaagcaacccttgccttgaagccaggatgatggtatctgcagcagttgccaacacaagagaaggatccatagttcatcatttaagcaagaaaacaaaatagaaaaacttaggaaaactatttctgagcataagaagttgtagggtaagtctttaagaaggtgataatttctgccaatcaggatttcaaagctgttgctttgacaagtttgatctttcagaataatataaatataatctatattataatttcataaggtctgtggattttctttgacctggaatatttgcaaaagacatattccaacttccacagaacactttatttcacatatacacgcctcttatgtcagggatgtgaaatagagtcttgaaaacagtctgaatctaaaacaatgctaatgctaatgcaggtttaaatttaatgagataaaatccaaaatctaagagtctaatgtcaaatctatatattttaacgtttaaaatattttaaaagacctcttttcccaggattcaacatgtgaaaccttttctcagggatacacgttgctagatcctcattgctttagttttttacagaggaatgaatataaaaagaaaatacttgaactttatctctcttacctctataatcatatataggcataattttttaacttaggctccagatagccatagaagaaccaaatgctttctgcatgtgtgagaataatcagagagagatttctttcacaagtacctgatgagggttgagacaggtagaaaaagtgagagatctctatttagcaataatggagaaagtatttaagagaatcaagcaatggaaataagaaatgtgtaaatttccttccaataaccagaaatagaggatcgagtttcttttggttaacctaaattttattttattttatttattttatattacctcattttattttattttgtgtaattgtagtttcagagtgttaaagctgaaaggaagaagtaggagaaacatggaaagtaaaagtataacactttccttactaaaaggacatgggcttccaggtaggggcaggattcagaatgactgacagagccctcagggaacaaggagtctccacactgacctcagaaatgcttgctacctttgctgttttctttacatcttttaacagcaggaagcagaactctgcacttcaaaagtttttcctcacctgaggagttaatttagtacaagcgggaaaagtgcagggggattggagaaaggagatcatgttggaaagctatagagatagaagagtaaattttagtaaaggaggtttaaacaaataaaacataaagagaaataggaacttgaatcaaggaaatgattttaaaactcagtgttcttagtggactagaggaagaaataatctgagccaagtctggaagaccttttcccttcctaccagtactttttaagtcacagaagcttctttgttccccgagacacttttgcagattagtccaagcagaaacagttagatgtccccagttaacctcctatttgacaccactgattaccccattgttagtcacactttgggttataagtgactttttctttatttgtattttttactgcattaaggggtctctaattttttatctctcatttcccaaaacctaataagtaattattgcacagaacacattgatttgtatttattctatttttagacataatttattagcatacatgagccaattaagaaaaacaaaacaacaacaaatgaatgaatgcacatatatgtatatattttcttttcttaccagaaggttttaatccaaatcaggagaagatatgcttagaactgagatagagttttcatccattctgtcctgtaagtattttgcgtattctggagacacaggaagagatcaatctatatatccctaagctgaattatggtaggcaaaattcttccacttttagtgcatcaatttcttatttgtgtaataagaaaattgggaaagcgatcttcaatatgcttaccaagctgtgattccaaatattaggtaaatacacttacaaaggaggatgtttttagtagcaatttgtactgatggtatggggccaagagatatgtcttagagggagggctgagggtttgaagtccaactcctaagccagtgccagaagagccaaggacaggtatggctgtcatcacttagactcacctgtgagccacaccctacagttggccaatctactcccaggagcagggagggcaggagccagggctgggcataaaagtcagggcagagccatctattgcttacacttgcttctgacacaactgtgttcacgagcaacctcnnnnnnnnnnnnnnnnnnnnnnnnnnnnnnnnnnnnnnnnnnnnnnnnnnnnnnnnnnnnnnnnnnnnnnnnnnnnnnnnnnnnnnnnnnnnnnnnnnnnnnnnnnnnnnnnnnnnnnnnnnnnnnnnnnnnnnnnnnnnnnnnnnnnnnnnnnnnnnnnnnnnnnnnnnnnnnnnnnnnnnnnnnnnnnnnnntgactctctctgcctattgggctattttcccacccttnnnnnnnnnnnnnnnnnnnnnnnnnnnnnnnnnnnnnnnnnnnnnnnnnnnnnnnnnnnnnnnnnnnnnnnnnnnnnnnnnnnnnnnnnnnnnnnnnnnnnnnnnnnnnnnnnnnnnnnnnnnnnnnnnnnnnnnnnnnnnnnnnnnnnnnnnnnnnnnnnnnnnnnnnnnnnnnnnnnnnnnnnnnnnnnnnnnnnnnnnnnnnnngatcctgagaacttcaaggtgagtctatgggacccttgatgttttctttccccttcttttctatgattaacttcatgtcataggaagaggataagtatcagggtacagtttagaatggggaagagacaaatgattgaatcagtgtggaactctcaggatcatttagtgtcttttatttgctgtttataacaattgttttcttttgtgtttaattcctgctttcttttttttcttctccgcaatttttattattatacttaatgtcttaatgctatgtataacaaaaggaaatatctttgagatacattaagtaacttaaaaaaaacagcttacacggtctgcctagtacactactatttggaatatatgtgtggttatttgcatattcataatctacctactttattttctttctttttaattaatacataatcattatacatatttattggttaaagcataatgttttaatatgtatacacattgcatattgaccaaatcagggtaattttgcttttgtaattttttaaaatgcttcttgctttaatatacttttttgtttattttatttctaatacttcccctaatctctttctttcaaggcaataaccatacaatgtatcatgcttctttgcaccattctaaagaataacagtgataatttctgggttaaggcaatagcaatatttctgcatttaagtagaatatttctgcatataaattgtaactgatgtaagaggtttcatattgctaatagcagctataatccagtgatcattttgcttttattttatggnnnnnnnnnnnnnnnnnnnnnnnnnnnnnnnnnnnnnnnnnnnnnnnnnnnnnnnnnnnnnnnnnnnnnnnnnnnnnnnnnnnnnnnnnnnnnnnnnnnnnnnnnnnnnnnnnnnnnnnnnnnnnnnnnn

SEQ ID NO: 2903 - DNA, 2286 bp, Macaca Fascicularis
tgtgggaagtatgtgattgcctcgtgtgtctgataacccaaagaagcgggcagattccaggaatgaagaattaggcttggtttcaggttacataaataatagaatagatggttgcctttgggtcttgaaccaaaataagacttactaaaggaagtgagtttttagaatagacctttactagcgtggcattatgcattactccacacccaccctttaagaattgatttattataaaattgtgttctgttttaaagtccagtccccccaaatgttgatttcttccatggattatttttatatgatttgtacaatttttttctgaaatttaaattgaaaagcaatgttataaaaatattgctaatcttctgcttatttttcagccttaaaagtctgaaatactgtaaaacactgagagtatctgtgtctttctgaatttaaaatgaaaaattcatctccatttgaagactgacatattccccaatctttccatgaattgcatttttttctaatactcatctctgttaagactccattgaaagttaaataaaaagctgatataatagtttggggtttgggttttttttggcttattttagtgttttgaatcagagaatacttggccaagctcgtatttgtaaactagacttattatttgtatcttctgcatttcagttttaatgtaagaacatgcattttgaaattatgaatatttttttcgtaaaaattcaatgctttaagaaatggagaaggaaaaatagcttttatcagtttttttcttcacttagaattctgtaataaacctcaaaatctggtatagaatggtattttcccatttgaggtcttggtagttttttgtttttgtttttaacatggtgccacttttaattaactaaatgttacaaaattctcagcatttgtttttttctggtagcattattgagtcttttcatacacttcttaaaatgccaaaatttatgttttcagtattacgacagtatctgcagatactataataatatgctttggccaaatttggtgtttatagagggaaccaagatgtcagttttgtattggggatatgttttacataaatagagctcatttaaaagtatggttcaagtactgctcttctttttatggggaaatagatttttaaggagcgattcttttcctgtataaaagctattgaggcttagctttgttcatacatgagtgatttggttataactcaatcaaaatttttatctttaaatctgagacaagtattatatttaaaactggatctgttaaaacattcatcactgcctgaaactttgctgttctaatgtttatgaattttcactcattatctagagtaaactcactacatattttcataatcagtcaaaataataaactaaaaacaaaaagtaaaaatgagttcccaagtaaatatatcaatatttcccatgtttgggcagaagtgcaaagtagtttcaatttgtcgcattgtagaaaaagaggccaaaaaggtcaccttagtctatttttccaaaacataactttaggtattctaatgatgtattttgttagttgcttagaaatggaaataaaatatatgtgcttattaaataatgcacagtacactacattatagagtttatttttgcttttatgcttaaaagagtgcatgcccaaaatacttctaccaccaagaggattttttaaaatcacagaattgatatttatctcaagcctatcttaagctaacgtacttctgttacataattaaactatttctgctattatttttaaagcagtattattttataaccagttctaaaattcagctttaaaaatattgaacataccttcctaccacttatgcttcaagtttcatttattgaataccagggtcatatcttagaattgtatataaaacaacatgtaacccattcatgaaaaacttctaagtattgctttttgctgctatgttctgcattgagcctagttttgccattgtcccttgaatgtagtattatccatagattatacataactacatctattgcttttggcggtaaatcaagatttagttgtaattttccagctgtgaaaatgttgccttgtatttaaaagggtttcatgaatggaaacctaagtaaaactaagctcattagtgacagacttgctttcttcatgttactcctccagcaactccctcaccaccatgcctccctgcctaccatccccggaagggtgcttattctttaacaaagagaatctaaaaaaaaaaaaaaaaaaaaa

SEQ ID NO: 2904 - DNA, 805 bp, Macaca Fascicularis
  misc_feature (1)...(805): n = A,T,C or G
tgcattgccaaagtttttgttagtcctgcatgcttaataaaagnnctgagactgttattaagtaaaaagctgtcaaacacttactgaaaatagaattggccccatggcttgatgtgaagacagcaaggaaannagcannnnnnnnnnnntgaacaagcaccaaattaaaagacctaaaccttactaaattgtnnnnnnnnnnnnnnnnnctggtcccttagggttaactaacacttgttaatgtctaaactttaaaatcagtaaatttaatttgagttcctactgttaagcatatttctcagacttaaatttgattatgtccccatcaaaaagaatctccattttctgaaggtctattagtcagagataatttgttatagacgagtatgtcatattactgaggctacaaggtagtcagcagatgagtgccattccaggcttttctggtacattattgtgttagaaatactgagttataatgttacatctgaggaagtacgtaatttgagaattgtaacttctaagggattcattgcatcatagctatgcctgtatagagtctaacatatgaccaatgccaacccataatccagctgaacaaagatactgtaacattatgatttgagtggtgcttttccttgctttgttaaccatcacaagagtctgcagcacaacttttcttttaacaaagctagaacagttttggcttcttaaacttcatatttgggtaggttaagctgccatacgtgttcagtgtgaatagcgtttaagttgaaaatattgtaaaaaaattatattttttaaa

SEQ ID NO: 2905 - DNA, 659 bp, Macaca Fascicularis
  misc_feature (1)...(659): n = A,T,C or G
ggctttggctannnnnnnnnnnnnnnngnnnnnnnnnnnnnnnnnnnnnatttctcgnnnnnnnnnnnnnnnnnnnnnnnnnnnnnnnnnnnnnnnnnnnnnnnnnnnnnnnnnnnntccnnnnnnnnnnnnnnnnnnnnnnnnnnnnnnnnnnnnnnnnnnnnnnnnnnnnnnnnnnnnnnnnaagaaggaactgctnnnnnnnnnnnnnnnnnnnnnnnnctacaggnnnnnnnnnnnnnnnnnnnnnnnnnnnnnnnnnnnnnnnnnnnnnnnnnnnnnnnnnnnnnnnnnnnnnttggtggggcaggagttgccttattcgctgaccnnnnnnnnnnncgagnnnnnnnnnnnnnnnnngcgctatggggtctcccgcagtgannnnnnnnnnnnnnnnnnnnnnnnnnnnnnnnnngcagcaggcgtgctggctgctgtaggccttgtggggttgctgctggccagaagcaagcgggaaaggcaataaatccaannnnnnnnnnnnnnnacaaccaattcttacggaggaatattatctagccagcaggagtggagtttggctnnnnnnnnnnnnnnnnnnnnnnncatgaatctttattttaatggagttaaaagcataggaaaatttatttggaaatgcagcttagtatgaa

SEQ ID NO: 2906 - DNA, 723 bp, Macaca Fascicularis
  misc_feature (1)...(723): n = A,T,C or G
tatttaaattaataggtataagacagagaaagaaactgggacttctcctgagctactcaggtgtcttagtccattttgtattgctataaaggagtatccaagccttgagtaatttataaagaaaaaaggtttctttggctcacnnnnnnnnnnnnnnnnnnnntcaaaattgggcgtgtgcatctggtgagggcctgaggctgctgccannnnnnnnnaaggtgaaagggagacagcctgtgcagagatcacatggaacgagaggaagcaagagaggggtgggggagattccaggctctttttaaacaaccagctttcttgggaactaatagaatgagaactcacttactcctgagggagggcatcaatctatccatgaaggatctgcctcccaggacgcaaacacctcccatcaggctccacttnnnnnnnnnnnnnnnnnnnnncaacatgaggtttacaggggacaaacatccaacccaaagcacaagatcatagagagtggagaggagagagaggccttcgtacccacatcactggactccaacatcaggatcacaacacagaataggttcacattagcattgaagaccacaaactccacaaagaggccttttgtgcgttggtctagccaatgcctctgttcaagnnnnnnnnnnnnnntgggtaaacagannacagggtcagcccgttttctccatacgggctgcagtactggagttc

SEQ ID NO: 2907 - DNA, 713 bp, Macaca Fascicularis
  misc_feature (1)...(713): n = A,T,C or G
acaaacacacnnnnnnttagcagaggtgacattccttaggctaaatctttggatccagggacataacagatttgttgagagaaaatgtggcagtgccttcacccaggacagtggtcaggaagccccgagcatcactgatggatttaaccattctcttctgaagtgctctgctctaggctgggtcccattttcacctgcctgtcctctgattggcttttgcaggagggcagcttacgtgtttgtcaaccagttagaaagccagttcctgtgggttgagtttaggccttcttggccatgattgagaattttgacttgggatactgggttgctggtgacaaataatgtcttcctcttcccccttcccgcctggctcgattatgggaatagccgtcagtacatctatgtctgtgaccaagacccagccagactaacgtacacagagagaaataacattcaaatggtgggtcacacatctcatctcaagataaggtgcttagggttcactgctttattcaaaagtattttcactgtagctccttcatatggaatatcaaaactgaagaaattcacacatggacatgcaaatagacattgattaatcaaggtagcatctttatgtaaatatataaataagtttgggcattgaaatgtaaactgtacagctaatacacttctctgcagtgttggttgctgtcatttcagtaatgtagatg

SEQ ID NO: 2908 - DNA, 747 bp, Macaca Fascicularis
  misc_feature (1)...(747): n = A,T,C or G
gaccacttttatttacacgtgacaagtagatgctcctagtatcagannnagctgatacgtagtgtcatgtgctcagtggttgccaaagtctaccaactttggggagctgcagggttctttttgggaggtgggaggaagggagatgagttttgttattttggggttttcaagcattggaaccaaaggccaaataataaacagcctttagtttttaaagtaaaattcattttatttgcagagtacacttgtatggtagactgttaaagacaattttatgactgttatgactatttatgcacattataatggttacatctgctgtttgtctttaaaattaaaaaaaaaaatcaaagaaaagcccaactttgaatacgtggctgagataacggccaggaattggtctttcctaaaaatgcaatagatatgctgctagattgttattttgtttgcactttttttgattggcattttaaaatcggtaaactgaagacattgtcgtgttttattaatttaacaaagttgaaagtgactgctctgtacatcatgaccttaacaatgttaatgctgtaagtgaaagttcactgttgtctgtatactaaatttattggtgtttctaacttaaaattaagactgcagattatcccccaccagccttagtccaggggtgtggctctgtccgggtgcagtatgcagtcatgtggaaccttgctttctagtcctgggaaaaaaagaagatgtctctaatac

SEQ ID NO: 2909 - DNA, 2186 bp, Macaca Fascicularis
  misc_feature (1)...(2186): n = A,T,C or G
actggttacatcacttgtttttcaattcttgattttctgttcccgtctaccaaaacccagcataggcctcggtgtacacttatgttaaaacaaaaactcacgtttcttagctgcaggtgatggcctcagtcattttaatacagcctggaatgagtttgctcattacccaatcactttcacagtgaatgttcaaaccccaaagcaaatatttgtatctccttgtccataaaggagaaagctgggttataggagaaagagagggaaaggtgcgtgtctgtttgcacagagagaggcaattttgtctacctttcaagaatcagttattaaacagaaggacctcttaggattttgagctctcctaacaatgaaggaaaagctctcttgagtatacaagtcccacactcattacctttcagtggtgagccatcacccactagaattcgttgaaggaagggagtgtcagagatgtgctttaaaattgtactttaggcagacattctctccatgtttggacctacagatgttgtgtacagaaccgacgcgtgtcagggtcaggaagctaggagggtgaaggcgcttatgaagacggccctgtagcgaatgaaacacgggagcctccgggaatgtgcttgtgtcaccagcagcaggcatttccctgtcctccccacccccagtctccacatcccgagcggcctcttccagaagcatgtcagggagacagacaggtgctgtctctctcgtgcaccacatccaagtccacccaccgtggacacagtatgactaaatgctggccttgaagagaaaccgtctagccagcttgtctgttgtccaggtccctcagtatctctggtttccctgccctgcataatttgagcattagtgctaaatacatctgtcattttcctctccctggagaccgtgaaatgtccagactttttcagactagtggagggaaggaatgttacgtaactaagtggaggcctggaactgtcaggacttgatagagctggaccagagacccttccgcctctacctagtgtgtctgtcaggcaggcagcagccatcagtccaagaatgagccacggcggcaagcaccgtgtggagaagggaacccagctgagttatgagtttcagacagaaactggggagttgggacatctctgtgccgggcttcattgacaccatcactccccacagcagctccttggggcagggtggtcacctgtgcagccaccgttactcacagtagcattccattcttcacactgcaacccctcagcactgtggacccttccaggaaggtgacaggagccagcagacacatggcattcccagagagccccatcttatcatagacagccttccctccatacttgtttccacagttttaccctcagaaaaatgctgtccaggccgggcgcggtggctcaagcctgtaatcccagcactttgggaggccgagacgggcggatcacgaggtcagggatcgnnnnnnnnnnnnnnnnnnnnnnnnnnnnnnnnnnnnnnnnnnnnnnnnnnnnnnnnnnnnnnnnnnnnnnnnnnnnnnnnnnnnnnnnnnnnnnnnnnnnnnnnnnnnnnnnnnnnnnnnnnnnnnnnnnnnnnnnnnnnnnnnnnnnnnnnnnnnnnnnnnnnnnnnnnnnnnnnnnnnnnnnnnnnnnnnnnnnnnnnnnnnncaaaaaaaaaaaaaaaaagaaaaaaaaaatgctgtctgcagtcttcccttccttcacccccaccccaggtgggggctcagtaaccaatgctgagggccagggacagaggaggcacaggcaagctagggactcagcacagtgctccccaccatcatcaggggcaggtgccagggtcagctgcagctccttcagggagcagggtgtggtgggcctggatggtcccagggggcagagggaagcaggcagccgtcccagccacaggggctccgaatggcttgagcttttactatgtgttctagtgcaggatactgcaaactggtaaagacgtccaccgtgtgaagaatgtatgtaaattaaagtttcatgtaatgaaggtttttactttttgccattaaaagtgttggttgataaggaaaaaaaaaaaaaaaaaaaaaaaaaaaaaaaaaaaaaaaaaaaaaaaaaaaaaaaaaaaaaaaaaaaaaaaaggccaca

SEQ ID NO: 2910 - DNA, 701 bp, Macaca Fascicularis
tggggggcccaggggaacagagggcctcccacagggcgcagccctcccactgcctgagacagtttccgtcggtgtaaatggggccgcagcctgccccacggagggcaggagagtcacaaggcacataaaccatggtcccacagcacctgccacggtgtgaactgaccggcatccgtgtcacccaacagcgggtgtggacgatgtgccaggccccacccgagtgcctttccttccggaccccggctaatcctccccacgcccctgggcagatgggccccactcacgttcccacttcacagaagagaaaatcgcgtctgaggaggctgagctgggaatgtccccggagcaggactcctggcccaggaatccccgagcagcatctgcttttggcaccgcggtggcagaggcggctcctgcagcgaacggagacgtaacggccctcaggccaggccgcacctccagggactatgtcgtgtgaggcttgagctcggccagccttctgcttctttgttttttattttggaggttatgggatttttattttggaggttcgtttggtttcctttgtgttttgcccatggggcttctattcacagaaaagatttaaggcaagttttaaaaatttatatatagtttattaagttgcacctttcaaaaccctatgtgctgtaagcttgccgttcaccttaaagattgtatta

SEQ ID NO: 2911 - DNA, 743 bp, Macaca Fascicularis
  misc_feature (1)...(743): n = A,T,C or G
agagtgatgaggnnnnnnngacttctgnggccatacatcaggttatggtccaaactaatgatggtaaatctggtcnntgaggacaggctcactaccaggctatattgggaatttgtgctaattagagaaactctccccttctgctgggctttgtcccaaggatttgaatttggccagtgtttaccctttctataaccaaaaaatgtcttgtttccctctnnnnnnnnnnnnngagggggaccctctcctctagtcgaatgacaatctnnnnnnnnnnnnnnnnnnntgtctcctcccacatctcagggtcccacagcttccccaacagggccctatcnnnnnnnnnnnnnnnnnnnnnnnnnnnnnnnnnnnnctttgtgattctgctactnnnnnnnnnnnnnnnnnnnnnnnnnnnnnnnnnnnnnnnnnnnnnnnnnnncagaaaataagaataaggactcaggttccttccaaaacagtatgatgtttgcnnnnnnnnnnnnnnnnnnnnnnnnnnnnnnnnnnnnnnnnnnnnnnnnnnnnnnnnnnnnaaagacaggacatagaggagaaaaaatgtcccccannnnnnnnnnnnnnnnnnnnnnnnnnagtgacatccgctgaaaacttgctcacacatgcaccnnnnnnnnnnnnnnnagtgatcatgtgatcaaggatatttttcacaaaaccaatgtcattgtccactgacattttaaacattcaaataacta

SEQ ID NO: 2912 - DNA, 2320 bp, Macaca Fascicularis
  misc_feature (1)...(2320): n = A,T,C or G
tattagcatttctcaagttttcagacaactctttgtttgccattatttgtctatcactagttaccaatgtttattttttcaagtaatatgatccttaatatcaacaattatgacattcaatcaacaatgtggttgatagaaaccttaagaaaattacctgctctgattacttctcagtaaatagaagatgctaacatgactatatagaaatagtgtgtgagaattaaatcaaagattatgtgtgaatctgtgatctataatttattagcataaaataactaaacagcaaaatcccatctggccataaatgggagagacactcactaatggaagacaggaagtagtgttaatctgatttctacatgaccaggaaggctttttatcggttgagtgtaagttggaggctgttcaattcccatctaaaggctttggggccatagaactctagtcactgccatgcaattctgaaaatcattgaagagcagctctcagtgtacatcaagcggaagccccattgccaggtaatggagtctttagtttgtgcctatgaaccttcatgagagaggaggtaatagtcgcaatatccacgcaaatgggtacagcacaagtcccattgccaggtcatggagtctttagtttgtgcctgtgaaccttcattagagaggaggtaatagtcgcaatatccacgcaaatgggaacagcaggagcacacgttataaaacgtaatttaaaaaaactctaccaaaaatttacatgtgattatgcgtatactatgacccagaaactcaatagaaatgtgtacatgtgtttaaaaaactgtactgaaatgtttgtgttagtagtattcaaaatagccacacattggaaatcactcaaatgcccagaaaatgtagaagagataaattaatttttgcacattcatgcaatgtaataatattaagcaataagattgaactacacccatgggctgtagttaaacgactctccaaaatcaatgttgtgtaaagaaatctagatacaaaagatacatactgtatcattccacttataaaaagtagaaaggagggaaagtttttgtgacccctggagtggaagagaggaacttcaaagacactagcaatagttcttatctgatttgactattggctatgtggatattaacatataatacattccccaaagtattacatgttaataaaaatttaaacatgaatttttagttgtcacaaagaaagaacgggtattttcaataattcatattaaaaacccaaatctaaggaagtttccactgtgacacagcattataagacagggagtgtgtaatatatggaagaggaattagaaaaaaaaagactcggaggaaataaaagggagagaaatccacttatgaatggcacaaacacatgtttccttgctacacatctgtggcaagtgttactccataccatagaatggaataattaaagactcattatctgtatggtgtgttttatttttagctagttgcctctaaagttatgttatctatcaaggaaatttcttagtgtttgcttcctgttatgtagcttaggtattctcaattatccctcccttctttataatgtgttgtgttgaatcactctttcatataatatcaaagaattgcaaaataatatttttgtgcatagattatatgatgtggttaaaaagcaaccatttcagaaaaacatgctaattaacagcagatcaaacacttaatgaaaggaattcttgcctggccttactctgtctcacaaatgtgcctggcaacataatagacacttgataggttctgatacaactagagcacagatcagaagaaagatccaaacatatgccaaacacatagctaaaaagtaaattcgaagaaaacattcatggtctgtgcttggtaggatggattttctcaaactattaatacttgtcggaaatatttaacttaaaggtcaaatagttacttgtagacataaaaaagttgcatctccatatttggttttcagttgattcaatggagaatcgttttcaaatccataaagttgaaaactctaggccgaggcaggcggatcacaaggtcagnnnnnnnnnnnnnnnnnnnnnnnnnnnnnnnnnnnnnnnnnnnnnnnnnnnnnnnnnnnnnnnnnnnnnnnnnnnnnnnnnnnnnnnnnnnnnnnnnnnnnnnnnnnnnnnnnnnnnnnnnnnnnnnnnnnnnnnnnnnnnnnnnnnnnnnnnnnnnnnnnnnnnnnnnnnnnnnnnnnnnnnnnnnnnnnnnnnnnnnnnnnnncaaaaaaaaaaaaaaaaaaaa

SEQ ID NO: 2913 - DNA, 332 bp, Macaca Fascicularis
gaaagccatataagtttgagaagctattttaaatctatgttacatttacgatgcaaagccaaatcagaacttctgtaaagcagaacctacccaacttttaaaaattattgtccgttgtaaggagccttctaagacgttttttcctgatcacctcaatgacattttaataccacagatgtattgtttatgtactatatgtatatccatatacagtatacataacacaattcataaacaatatgtctatggtattaaaataaaattaatccaattatgttcacctctaaagaacctgtttttgcccctcgggagcaatattgcccctgtgagaa

SEQ ID NO: 2914 - DNA, 732 bp, Macaca Fascicularis
  misc_feature (1)...(732): n = A,T,C or G
gaaaccagactgatctgtnnnnnnnnngtgtgtgannnntgcgggcttnnnnnnnnctnnncagctttgttaatagtcagtcagtgctggtgcccgctggggagcacttcgctgaaaagagatattcctgatcagagactgggtcagttactcacgccactgctgccctggaggacagtccaagtctagaaaagtcagagcttgcaatctttcttcctttcccaccctctgtcctcaattnnnnnnnnnnnnntatgaaacatggctcatggagtagtccatgcctcataaccaagagctagggcaaaacggagggatgcaggnnnnnnnnnnnnnnnnnnnnnnnnnnnnnnnnnnnnnnntactctggggcttcttgttccagtcccctcnnnnnnnnnnnnnnnnnnaagtccnnnnnnnnnnnnnnnnnntgggctggctcccccgctgtgtcccctgttcccttcccnnnnnnnnnnatccatcacatttggtggtaggtgactgcttatttgttcatctttgctgctgccctgatggttctgtgagagcaggggccatgctgtcttactcactannnnnnnnnnnnnnnnnnnctccgtgcttcggtcccccagcgctctggaaaacatgtgtgtgcacatatgtacatatatgtatgatatgtgtacatatgcgcatgtatgtattatatgtgtgtacattcattgattgtaaatagcttacaat

SEQ ID NO: 2915 - DNA, 625 bp, Macaca Fascicularis
gggggaggggagggtgtaggggaggaacgatgccctgcgccaggccaagcaggagatgatggaataccgacaccagatccagtcctacacctgcgagattgatgccctccagggcactaacgattccctgatgaggcatatgcgggaactggaggaccgatttgccagtgaggccagtggctaccaggacaacatcgcgcgcctggaggaggaaatccggcacctcaaggatgagatggcccgccacctgcgcgagtaccaagacctgctcaatgtgaagatggccctggatgtggagatcgccacctaccggaaactgctggagggagaggagagccggatcaatctccccatccaaaccttctctgccctcaacttccgagaaaccagccctgagcaaaggggttctgaggttcataccaagaagactgtgatgatcaagaccatcgagacacgggatggggaggtcgtcagtgaggccacacagcaacaacatgaagtgctctaaagacagagaccctctgccaccagagaccgtcctcacccctgtactcactgctccctgaagccagcctttcttccctcccaggacaccacacccagcctcagtcctcccatcacagcc

SEQ ID NO: 2916 - DNA, 737 bp, Macaca Fascicularis
  misc_feature (1)...(737): n = A,T,C or G
tggaccacgtnnnngccagagaccaggtagtctttgnnnaagtcccagtgaaacccggctgtcatcgggcagnnnnnnnnnnnnnccgtgtgggccagcagnnnnnnnnnnnnnnnnnnnnnnnnannnnnnnnnnnnnnnnnnnnnnnggtcccagatacaccagcaccttnnnnnnnnnnnnnnnnnnnnnnnnnnnnnnnnnnnnnnncaacccagacctcagaacctctagagnnnnnnnnnnnnnnnatggattaatttagttcacagatccaggaaattaaccttcgaatggccttgtagtgtcacattttaattttgagctatnnnnnnnnnnnnnntacattgttatnnnnnnnnnnnnnnnnnnnnnnnnnnntttggcaattcttcatctctgagtacactcgaagcctcatagtatggaagtggctcaggcttcttttcctgcaagaggccctaagttggtggagtgtaaggtaagaatttgggtaggatagannnnnnnnnnnnnnnnnnnnnnnnnnnnnnnnnnnnnnnnnnnnnnnnnnnnnnnnnnnnnnnnnnnnnnnnnnnnnnnnnnnnnncactgcactgcattccagcttaggcaacagagcaagaccctgtctgtgaannnnnnnnnnnnnnnnnnnnnnnnnnnnnnnnnnnnnnnnnnnnnnnnnnnnnnnnnngttgaggtagccgtattgcnnnnnncaggagtcaaaacc

SEQ ID NO: 2917 - DNA, 378 bp, Macaca Fascicularis
atttcctgggagaggtggatggtggtctgcaagccctttggcaacgtgagatttgatgccaagctggccattgtgggagttgccttctcctggatctggtctgctgtgtggacggccggcccagatgtgttcagtggcagctcgtaccccggggtgcagtcttacatgattgtcctcatggtcacctgctgcatcattccactggctatcatcgtgctctgctacctcaaggaagtgacgcgcatggtggtggtgatgttcttggcgttctgcttctgctggggaccatacgccttcttcgcatgctttgctgctgccaaccctggctacgccttccaccctctgatggctgccctgccagcctactttgccaaaagt

SEQ ID NO: 2918 - DNA, 132 bp, Macaca Fascicularis
acgcccctcctcgatgaccagatcatggaccaccgccggccgtgggaggaggacaatagtgaggacggctattagttggggctggacaatatcatcagcatcatggccaccatggttgagagaagaggatgg

SEQ ID NO: 2919 - DNA, 1757 bp, Macaca Fascicularis
catggggagaggaaagcaatggacacaattgtatcctgcagggtcattcatgtgaaggtcagaagcaggctaaactcacctaggggagagtcctagcccaggtagtggtgatgcttggggacaggtggtgactaggaggggcacaaggaaggctgcagggtccagcccatcctcttgctggcctgggtactggtcacactgatctctgtgtggtggggcaggcagcgtcccaggcctgccggtgcccgcagtgcccagcactcctgcagtccctggcagtgttagtaccaatcctccagagtggctgtctcccctcttgccctgagtagggctcgctgactccaggagcctcaggcctgggtgggcttcgagctttcttccagcaaacttgaggtctgtggctggtacccctcaggagcggaggggaactcttgtccatgagatgcttttaaccgtgcacaataatgtgtagatacatccaaaatcaatctggcctttagcccagcacttaactcttgggatgaggcccgctttgtaaatgttgataatccagagaaaatgagcttttagattctaaagacgccagatatcttccacttaggcaaaatgcggagaatcatatttaacaaaagatgttctggacaaatatgcttcttgagggatgaatatttaattataagggaaatgataaatcgaacattaatgggaaaatatgtttgccctcaagattcatagttttgatgggtctctggcaaatcttatactatgtttattggggttattttattgctggttattgtctttaattgtttgcttgttttctgctctgctcaattgtgtatgagcctgtggagcggtgggtctgctcagcctcttctctccactcctgggagcaagtccggatctggctgttggatgcatggcagaagcaaaggtgtggggaaggttcagaggagacaggacaagtaaaaatggcagggtcaggttgtcgtgggggatgcatggcagaagcaaaggtgtggagaaggttcagaggagacaggacaagtaaaaatggcagggtcaggttgtcatgggggaaactgaggcacaggaggcaagctgaggtagtacaagaacattctgaattataacaatatgccagtgttacctaaaaggatgaggaacatggagctgtgcttgaatccctacctgagctggggacaaggggcctcaggcatcactgattggaaccaaggtttgtctgcagcttgtcagtttctgtctcagaagccccacatactggagtgggtatcccggcgatgctgtgggataaaccaggacactgtggtgtcatggacagctgtctgtctgccaggtgaaggcccctctcgttgcagtgtgagccgggcaggtcatctgtttggcagcatggtgacggctctggccccagctgctatgggagggaggatgctggcacagggcactgcccacagactgcctttgctccatgccttttccatgagcatgagtgactgttcatgtgggaaacggcagagccctcgtggcccccctcagcactgtgcaatggtactggaggtggcaggagacagcctgagggcccaggttgtcctcatacccggcttcatgccagggtgcatgccgggcacagcacatgtgtccccgagaggcccctgatcagggtggaaacccagcaaagtgaaaatcagaaatagtgattctccagtccctgctcacagacaaaaaaaaaaaaaaaa

SEQ ID NO: 2920 - DNA, 867 bp, Macaca Fascicularis
  misc_feature (1)...(867): n = A,T,C or G
atcaaagaggtacagaagggcggccctgctgacttggctgggctagaggatgaagatatcatcattgaagtgaatggggtgaatnnnnnnnnnnnnnnnnnnnnnnnnnnnnnnnnnnnnatccagagcagtgggaagaatgtcacacttctagtctgtggaaagaaggcctatgattatttccaagctaagaaaatccctattgtttcctccctggctgatccacttgacacccctccagattctaaagaaggaacagtggtggagtcagggcatgactcgcacatggcaaaagaacgggcccacagtacagcctcacattcttcttccaattccgaagatacagagatgtgatgaaagcaagtaatagcgttggctgtttatctgatagctatttctgggtatttaataggaatcgtttctcaaggaatgagttgcgaccagtttactgtctctttagaagaaaaactccactggaaaccattcaccatgtgtgcctggtcttacgggtggctattgcagactgctaatttatgcttaacttaggaagagataaggcaagagctagatttttttcatgtgatctcttccaagcttcaacttaactacattctctgtatgatgatgtctcttacttctacaggttccgtgagcaccaaagatgattcataactctgtataggtgagagctgcttagtaaagcatcttagcagataagcctattaaaattgtgcttctgtaacaatgttgtagttgctagaataaataccattagcaaatgccttctgagtacacttgatagagcttttgttttggattcactttttatgctttaaccttcatttgcttctagaaacccaaaacaca

SEQ ID NO: 2921 - DNA, 720 bp, Macaca Fascicularis
  misc_feature (1)...(720): n = A,T,C or G
aagtcaacactgaaaactgctttttgcctccactgttacagctgtgcctaataataagaaacgcacagccctacgtgaacagacaggaattgcttgtgcaatgtggagcaaatgcaatggtctccttccgcaagtccttaagcctcatatctggcttaccacatacactatgctaaagnnnnnnnnnnnnnnnnnnnnnnnnnnnnnnaaggtttccctcgccgacagttgaaatttaagggaagaagcaaaagctaaactgtctttgaccctaagatagaaagctgtttatttgtcttcagtgttcaaggcatgactagtatttctaattagcctaataaattcccacacttcctgaagtgaacactaatggtattgtcctactaaaactgtcattgtttctttttttccttaactggtcagtcattcacaataagctatgagggtaaatatgtgttataacaagtaaatcgtagttgcaagaatataccatgaagattaaagtaggctgggttccacttccatcttcccacacacatctcattgagtttgatggttgacttaattggcaccataactttgtatgatattatacattatcctttatttatgtnnnnnnnnnnnnnnnnnatattaaagagtaagtgcaataatatgaaatagcctgtacattttaaaactgttgtcannnnagttatataaatccacatctctgtaaac

SEQ ID NO: 2922 - DNA, 231 bp, Macaca Fascicularis
tgaaatctgcactctcaacagattttcaagggtataatgcatgattgttatctacgagggacagcaaaactaacagagggaatctgctttggtattcctttgggcatttttcctcctgggactgcaactgtctgggtctaatattgggtcccagaaggaaagacatttcagacatatagcccagggccttttgccagcttcagaaatttggttgccaggtgttcctcaatg

SEQ ID NO: 2923 - DNA, 741 bp, Macaca Fascicularis
  misc_feature (1)...(741): n = A,T,C or G
acgannnnatgagctaantatcgtgttgtttcgtggttttctccaaatgaaaatattctcattgttattttcccaatttttgctatactcctgttttggggacagtttggtattaaaacacttaannnnnnnnnnnnnnnnnnnnnnnnnnnnnnnnnnnnnnnnnnnnnnnnnnnnnnnnnnnnnnnnnnnnnnnnnnnnnnnnnnnnnnnnnnnnnnnnnnnnnnnnnnnnntcattaaagaatgctactggccttggtttaattgtgacttctacagggatattaatattactnnnnnnnnnnnnntttagtacagcgattggattaacctccttcgtcattgccatattggttattcaggtgatagcctatatcctcgctgtggttggactgagtctctgtattgcggcgtgtataccaatgcatggccctcttctgatttcaggtttgagtatcttagctctagcacaattacttggactagtttatatgaaatttgtggcttccaatcagaagactatacaacctcctaggaataactgaagtgaagtgatggactccgatttggagagtagtaagacgtgaaaggaatacacttgtgtttaagcaccatgnnnnnnnnnnnnnnntgttggggagaagaaacaagaaaagtaactggttgtcacctatgagacccttacgtgattgttagttaagtttttattcaaagcagctgtaatttagttaataaaataa

SEQ ID NO: 2924 - DNA, 698 bp, Macaca Fascicularis
  misc_feature (1)...(698): n = A,T,C or G
cgcaggagcgtgcagggatcagaaacaggaacgtgaccttccccgggagcgtgcaggggtcagaaacgggaacgtgacctccttccgcaggagcgtgcaggggtcagaaacgggaacgtgacctccttccccgggagcgcgcaggggtcagaaacgggaacgtgacctccttccccgggagcgcgcagggggtcagaaacgggaacgtgacctccttccccgggagcgtgcaggggtcagaaacgggaacgtgacctcctttcccgggagcgtgcagggatcagaaacaggaacgtgaccttccccgggagcgtgcaggggtcagaaacgggaacgtgacctccttccccgggagcgcgcagggggtcagaaacaggaatgtgaccttccccgggagnnnnnnnnnnnnnnnnacgggaacgtgacctccttccccgggagcgtgcagggggtcagaaacgggaacgtgacctccttccccgggagcgtgcagggggtcggaaacgggaacgtgacctccttccnnnnnnnnnnnnnnnnnnnnnnnnnnnnnncgtgatctccttccccgggagcgtgcgggggtcagaaacaggaacgtctgggaaactgcaacagcccggagagacccaaggagacgcaacgcctcaatgccatgtgggatcccgggtggggccctgagcagnaangggggaaac

SEQ ID NO: 2925 - DNA, 707 bp, Macaca Fascicularis
  misc_feature (1)...(707): n = A,T,C or G
aggtcacnnnnnnnnnnnnnnnntnnggagaggtcgaagttcttaaggcagtgttctgctttgcagtgttctgagtcatgaagccctcatccctgctgtactgcttcagacggtgaacaaggcggnnnnnnnnnnnnnnnaagaatgacgtcatctcaaagtcatctttgttcttcttcaggannnnnnnnnnnnnnnnnnnnnnnnnnnnnnnnngggagtgcaccttgggatcgttggtgtagtccgcgtgtcagatgcacatgtagaggatgtaggcggggagacagggcactgctcccgacagcatcttgggcttcaagtctgtcaccaggttccagatgaggagggcctcgccctctttgtggtactccaacatgccctggaaatccttctctttccgctggactgtgacctgcctgttgagctcatggcgcttcctctcactctgggccaaggcctgggcagcttctaggtcatgcgatttcttcatgtaaaccttcagttacttttagagctttctctcattcttttcctctcactttatttttcaccacagaacttcctatcagctagtatgttgaatattttgcttattaactttgtttatttttttctccctcaattagaatatttgctccttgagtgcaaggatttgagcctgttaggttcactgctgaattttaggctcctggaagatactcagc

SEQ ID NO: 2926 - DNA, 702 bp, Macaca Fascicularis
atttgcaatccccccaccccccaagttaaaaagtcacaggcatctacctagcacaaaaggttgtgaagtacaatgcatagttgcacagtggtgctgcaaaaaggaaacaaaactacaataaagagaaatgaaaagcttgataatctttctgcatgttttctcacaaacaggacagccacttccaagcagttccagtacaggaaaagagaaaaaaggctcagaagggcaccttggcgtgcattcgcccagccccagaggttaaagcacccagcagagcagccaatcgtgcgccagtgtcttcaacgtcccccactctgtggagtcctcgggccagtccagcagcagctcccaccctccctaggccctgtgctaagtccccatagtgaccctggttggtgtagggtggctgatggtggtgatggggttttttgacttttgttttggaaaatctgaaatgccaatttgtttcagggcatgctcacaagtttgtgagggccaaagccacgggcacgtacctgtgctggaccctggaaggtggaaaacagcttgcctgccctttctgatctggtcagagggtcctcccgccccgccttccctggcctcactcttctaagtgccaggacaccacagactggactgatgctgaagacttcccttttctttggttcttttgtttgttttgagtttatacaatcattaaga

SEQ ID NO: 2927 - DNA, 178 bp, Macaca Fascicularis
gctggcgcgcgcggccctcaagcagctgaagggtcctgtgagcgatccggagaagctgctgatctacggcctctacaaacaggccacccagggcgactgcggcatccccgcccctccggcctcagacgtgaaggccagggccaagtgggaggcttggagcgcgaacaaaggggtgtcc

SEQ ID NO: 2928 - DNA, 742 bp, Macaca Fascicularis
  misc_feature (1)...(742): n = A,T,C or G
caagggcatgttataggtgaattgtgtnnntcggaaggatacatcgacatcctgtccccgnnnnnnnnnnnnnnnnnnnnnnnnnnnnnnnnnnnnnnnnnnnnnnnnnnnnnnnnnnnnnnnnangtggacccctcatccaatatgaccagagtcctcacaagaagacagtgtgaggacacagaggacaccatgtgacagcaaaggcagaggctgannnnnnnnnnnnnnnnnnnagatcaccaagggctgcagccacacagannnnnnnnnnnnnnnnnnnnnnnnnncctggccctnnnnnnnnnnnnnnnnnnnnnnnnnnnnnnnnnnnnnnnnnnnnnnnnnnnnnnnnnngtctgnnnnnnnnnnnnnnnatatgctacagcagtcctgagaaactaacaggcaggagatnnnnnnnnnnnnnnnnnnnnnnnnnnnnnnnnnnnnnnnnnnnnnnnnnnnnnnnnnnnnnnnnntaccatccgggttaacactccggtagtttnnnnnnnnnnnnnnnnnaagcattagtaaaaacgaatgcgggatggctccgcgctgagatgnnnnnnnnnnnnnnnnnattgtggtgaattcatacataaaattattggtcttttgccagcaacactaccctgtaattaggtgtctttcatttgtgaaagggtgtggcgaatgttggtttaatgttggtcagtttaataaaaaccgatttgccaagattaattctgcagaa

SEQ ID NO: 2929 - DNA, 690 bp, Macaca Fascicularis
  misc_feature (1)...(690): n = A,T,C or G
tgctgtgaatttgtccatggtgcatnnnacgctggatcttgaactccagagtctgtttagggaggtgagcacagggcttggggaggggtggcggggcccagaccaccaggccacggagcccccgctccaggctgtggcagttcaaaccacagcactggagctgcagggtctgcccagcgggctctgcattccccgagagctcgagtctggcaatgggagaatggagcccgtggagaaccctgtggggatcggggagaatccctgcctcctttaaggaatcatgaaggacaaagacttttnnnnnnnnnnnnnnnnnnnnnnnnnnnnnnnnnnnnnnnnnnnnnnnnnnnnnnnnnnnnnnnnnnnnnnnnnnnnnnnnnnnnnngagaaggatcacggggcataggctaggnnnnnnnnnnnnnnntggggctgccagtttctttctgggaccactcttgtcctnnnnnnnnnnnnnnnaaggctggaaccagcccaaactgcccgcctgcttcacttccaacggccaggagccagcccagcctactaccctgccctccacccctgcaccctgggccagtgccttgcatttgatgtttgttacctccacnnnnnnnnnnnnnnnnnnnnnnnnnnnnnnnnnnnnnnnnnnnnnnnnnnnnnnnnnnnnntaggggagggtgtgggatg

SEQ ID NO: 2930 - DNA, 1641 bp, Macaca Fascicularis
  misc_feature (1)...(1641): n = A,T,C or G
ctcaataatatttttttctgtgatttatggtttttaatatttactcagtgtcaacaaagtgtgaagatttataaaagcattatagtgtgtatgtaattcctacccaaagggcttactggttgatctatgtagataagtaggatgtaaacacacgggaagaatggggggaaagaaagtcagacgttatgtatcatgccacccactagccattgacattacctggagagctaggaaagtattgctgaaatctcaccaagtgctctaggcatccatttatgaaaatggagaaccatggctgaaaggtggcattgataattaaatgctaatgacctgaactctcaggaacttcaaagctgatcccaaacttcttatgctctcagatttactattttctacaaaatcatgaccagtcaccaatttgcccgctcttctttttttctgttttctactttttattttttatgggtatgctgtatttttgtaattaatttttaaaacattgtaaaataatgcttatatttacataagtcactagaagcaaaacctgccgatgatttggcaatacatgataagccacaggcctgggactggggtgaggctgctgaggcattggcctggggtacaaaatttaagggggtatcagaaacctcagtgataaagatgagtaatatatatattttaagaccttaatttgttacagcagttttggattcacagcaaaattgagaggaaggtacagagataccccatataccctttgccctcatacatgtcttacgtgcatagtctttcccattgttagtgtccctcaccagtgggacacatcaggggtccccagcccccgaacctcgggctcgtacttggctgtggcctgttacaattactgcctgagctccaaacactcttttaaatcaatattttaatcattagggtttttttttttactatgtagaaagagagaaaccatactagagcccctcatatgtgtaaatttgagcatgataatcacatcaccatgacctgttagatgtctgaaaagggcttagccagtgggtcattactaataagaaaacactatctcccaagttttcaaactgaggttgcaaataacgtttcttagttgttcagcaggaaaggtacatcctgttagatctgattctggagaaatcatgcgatgggtctcaagtttcttgcaagacaccaaggtcatctggtacctacgagcagaacgtttgtggctgatgagaatttgtacaatcttttatgtacagatcattccagacagggaggagggcagactaacaaatgaagtagaaaaaactgccgagcaagagtactggcaaacctgtcaaaatttaagtccttaaaataatttaaaaattaaaggccgagacgggtggatcatgaggtcagnnnnnnnnnnnnnnnnnnnnnnnnnnnnnnnnnnnnnnnnnnnnnnnnnnnnnnnnnnnnnnnnnnnnnnnnnnnnnnnnnnnnnnnnnnnnnnnnnnnnnnnnnnnnnnnnnnnnnnnnnnnnnnnnnnnnnnnnnnnnnnnnnnnnnnnnnnnnnnnnnnnnnnnnnnnnnnnnnnnnnnnnnnnnnnnnnnnnnnnnnnnnnnnnnnnnnnnnnnaaaaaaaaaa

SEQ ID NO: 2931 - DNA, 726 bp, Macaca Fascicularis
  misc_feature (1)...(726): n = A,T,C or G
ctttagagagaaacnctgtctccctttgcaaaagtgggctagaatgaaaaggagatgccttggggttcgtgcacaacatagtttctgttgactctaacttccaaatcaaaatcacttggttgaaacagactgtcgcttgattttagaaaatccacaaaaacccatatttctgaaataatgctgattcctgagataagaaagcggatttgatccccagtctcattgcttagtagaataaatcctgcaccagcaacaacacttgtaaatttgtgaaaatgaattttatctttccttaaaaaagaaattttttaatccatcacacttttcttccctaccctttagtttttgataaatgataaaaatgagccagttatcaaagaagaactagttcttacttcaaaagaaaaataaacataaaaaataagttgctggttcctaacaggaaaaattttaataattgtgtggagnnnnnnnnnnnncatacacattgcagatcaaatatttggagttaaaatgttagtctacatagatgggtgattgtaactttattgccattaaaagatttcaaatcgcattcatgcttctgtgtacacataatgaaaactgggcaaannnnnnnnnnnnnnnnnnnnnnnnnnnnnnnnnnnttctgctgtctgctcttctctgatgctgcgtccctaattgtacacagtttagtgatatctaggagtataaagtgtcgcc

SEQ ID NO: 2932 - DNA, 586 bp, Macaca Fascicularis
ttatgatagaggagtcgcacccggccttctcttttatctcagagggtgtgacccagtgtcacagcgccaacaagcactttaacacgagatcttctgatggtacttaacaacatagtgttaacacgatttggttctggggagtttgagaggaggaggctgttaacttttaccatttttctttggtcgcaccccccctccacgttttcttatattaaatgtgtattaaagaaaaaataaacttgcggttacattaaaaaatatacagcagtggtcgctgtcccataaagggaataacttcatagtgaagaaccgtttgcatagtaatttctaccctgtcagtataaactatcacgggttatcgtgagtacagccagtatttactgagtgctttttatgtgctagacactgactggacaagtgatttacgtgcattatctccatttaatcttcacagcaacagatatgagggagatactgttttgcacaatttaaaataagcgttgcaagacgggacaaattatggtaacaaaaccaagatttaaaccaggtgtatttaactctccccagtaagtacttaagcactgca

SEQ ID NO: 2933 - DNA, 759 bp, Macaca Fascicularis
  misc_feature (1)...(759): n = A,T,C or G
gttaaagcccatagcnnnnattactagtgactggggaaggaannnnnnnncttaagcaatatatatatatatgtatatatatattctgtttgtttgtttgtttttcctttttttaatgagatgaggtttcactatgttgcccagggtgatctcgaactcctgggctcaagcagtcctccaaatatgctgggattacaggcatgagccaccacctagcccaagcaagaaattgacactatgtaattatttaaggtagtctaggcagtagaaaacattgccagaaggatagaaaggaatttggattatatataaggaaaataacaaattggtgtttttaagactatcactgtcatatattagatccttgtattagtccatccattaatattagttctatttgcggtgctaggtagtttgacaggtatgatatgcataagtcatagctctattcttagtgtcataaagtgtagctaatttataagctctaagtaatcagctttatccaatttgagggcattaaaattactgcctagaactttgaaaagagaaaaattcagggataagttgaaannnnnnnnnnnnnnntctacccataccagaccagtaaattataagatccagatgttagtatctagaattagctctttagaattcagaggggacatatgttttgacttcatcatatattagcaagaattggtctactgtgatgtttggggaggaggagggggaaattctttttaatgcacttgtatggaa

SEQ ID NO: 2934 - DNA, 752 bp, Macaca Fascicularis
  misc_feature (1)...(752): n = A,T,C or G
tactaaatgtactgtgagcttaaagacacgagaataaatgttggaggggtaacatacaaaaacaaaggcatatttgatgaagtaccctgtgttatgtgaacacaatttccccttcagttaagactataaaccacactgtatgagtatgtgtactgcatgtttacataaaacagtttaattttgaaggattattttaaaaactatgtttatatataatacctaacaagctgtaaatattgtatattattgatttttaattttatataagcaattttttatttcccaattcatgtacaaatctcattatgtatatagcataatttcctggagaacacaaattttgcagtgaattttaagtattttaattgcagtaagcatcagtttagcctagagatgttgatctttattttaaattatttttcaccattctcattttcttcaaagggcagcaataaacatacgcaagttatttttaactatagaaagtaggtctacaaagataagatctaggtttcaattcatttctttaaggaaaagatgcacagttactatcattcagtgtctaatcacaggaccatttctgaggtcctcatgtggctctcctctttgtaatatacagggtgaactctttactgatacacacaannnnnnnnnnnnnnnnnnatccagcacttaaatgtcattacacagaatttactggattaaaaatttgtaatatacagtattttaataaagtttcagtatcacacttc

SEQ ID NO: 2935 - DNA, 726 bp, Macaca Fascicularis
  misc_feature (1)...(726): n = A,T,C or G
cccggtcgtgagggcacnnnagggctctggcctctccttccctctgtcctccctgcacaggccgcacgcgcttacgttttgttcccgaggagacaggtggaaaagtagaaacctacaatgctgcanntggggagtgacttgtggccaggctgagaaggggagannnnnnnnnnnnnnncctgacttctatacggggtttcacacctgaccaaggaacccccaggatggcgtggggtttaaggtgaagacctatcatgcagaagtcaggcctgttgtggggacctgaatgaggcctgacccagaccaccatgttcgcagccgcagctgacccgtgccgagggtccatgctccgttggcaaagccagtcaggcacgagggtgactgaggcacacggatgaggagggcacccaggttctgttcacaactcacttcacctcatacatccttttaatttcttaaaaccctcttgtcatttaaatatttgtcgattaaagattttctggatgggcacagtggctcacacctgtattcccaaagtgctgggattacaggcgtgagctaccgcacccggccggggattaaaacatttaaacgtgttgtgtgtacccagatattgtgttaatttaggaaaaactaaaatttctatgaagtggttgtgactattttctgtagtcgatacaattgggatatctgatctatttctctgtctacttggaaatgatgcat

SEQ ID NO: 2936 - DNA, 659 bp, Macaca Fascicularis
  misc_feature (1)...(659): n = A,T,C or G
gtcnnnngtgcttagaatcatatagaaacatcatgcaatcttttaatcagatgtgcacttcannnnnngctgttttcatctttaactgacacacaataattgtacatatttatggagtacaatgtggtgtttttgtttgttttttgagacaaggtctcactctgccagccagggtggagtgtgatggtgtgatcatagctcactgcagcctcaaacccctgggctcaagaatccacccacctcagcctcttgagtagttgggactacagatgcatgtcaccatgcnnnnnnnnnnnnnnnnnnnnnnnnnnnnnnnnnnnnnnnnnnnnnnnnntgcccaggcaagcagtgtgatattttgattcatgtatacaatgtgtaatgatcaaatcagggtaattagcatatccattaccttaaacatttatcatttctttgtgttgagaatattcaaaatcctttcctctagctattttaaaatatacaataaattattgttcatcatagtcatcctattatgctgtaaaacactagaacttattcctccgatatcgccgaagccatatctacatccagaattctacaaatcctgtgtccagtgtttaatcttgttatttactttagttatctcatttgaagtagtagagaccaagcgccaa

SEQ ID NO: 2937 - DNA, 668 bp, Macaca Fascicularis
  misc_feature (1)...(668): n = A,T,C or G
atagttattatntcttatctttcttcttttatattttttgaaaccaaatttagagttagtttaggtaaactttttatcatgatcattagtaactatcttgaatgtttccaactggcccagttggccgggaaaacatgagagcaagagaagctgaaatgtatttctacaaaaacctttctatattatgtgccaattgccacaccagatcaattttatgcagaggccttaaaatattctttcacagtagctttcttacactaaccatcatgtgcttttagtaaatgtgatttttaaaagcagtgtaagttgacaacagcagcagcagtaacaaaaaatctattcagaaaaatgtatgtgcacaaataaaaaaaaattgatggcaattgtttagtgattgtaagtgatactttttaaagagtaaactgtgtgaaatttatactatctctacttaaaatattaagaattttatgaaatatgtatttatgtttgtattgtgggaagattcctcctctgtgatatcatacagcatctgaaaatgaacagtatcctaaagcagttctaatcatgctttggaagtaagaaggttggctactgtatggccaaggatggcagtatgtaatccagcagcaaactggtattaattgttctatttcaggttctgtattgca

SEQ ID NO: 2938 - DNA, 1921 bp, Macaca Fascicularis
ttttgattaggtaaataccatcagttagttttagagataatgtgtcatcgaaataggatatattttgaaggagatgagaagagataagtaatttggaggctgttcttaggctagagattatggggaatctaaaactaagacaggtggaattggaggggactgggctactgacaacttttgttatttatattactccagtaccagttttgcacttttttttttttcggcttgcgttttgaaaatgattgacttttcatactttgaatcttccttaaggggaaaaagttctatccattgagtgggagagtgcccagcatttggtaggcttccagtgaatacttgttgaaggaatgcctttcagaaagcagagtaattattgttttttagttatttcatacctcagaaagatcagattttgtcctgaattgtgaactctgcctattgtgatatatcaaatatttgtagttttatttatgaattagttgtaattttctctgtgccaagggtaaagattatttttatttttattttttggtgaggggaggtggggaagggggttgatttttattcaggcttctcacagttgttagagccgctctgtcttcagaacagtcacaacacaggaagtgtaccactgagactgcctaggaaagtctgaccagctaaatcttattgcttaaaatacacatattcacaaaaactgataaacggtaacatgcctcacacaggaatgtatttgaatttgcaaatgtcctgactagctgtagtaccaaaccctccaccaacccctcattcaccttgaaaatcagtgtcagtcacatctccctggccccctaactattccttcaattccctattaaatctcttgtctcagaagggtagcctcctgtagcaagaaccagactgtgacgtgggaattaagcccagctctgcaggttgcattttcatcttgttcgtcttctcgtgtcttgagggtaagatggtatagtgaatcccacaattaacactcagccagttccccactataactagggaaagaaacttgagagggtccgaatacatccatttgatgagtagttaactggaaaagggttcattttggtaaaactttttcgcctttgagtcatttcaatgagttatttgggattctttaaaaaaggtaaagtaaaggcatcagagggctttgacacactctggccatacgccagcctgcttgtgcctattggactcagcagagggaggcgggccctgcgttacctccagggccagcaaagctttctcctggcaattctgggcggggccagtgtctgggccacagctagtccaagtctgtcatttaagatccaatcaagctcctgtctgaaattccaccttcttctgtccgaagtggttgtggacacccccaggggttggtatggaggaccaggtgcagccgcgggaggcagacaggctcagaacatgtttccatttacagggaacagaacacaggcctctgtgtgactgtggatcagtgtgcaggttgcagtgatgagtagagtaaaacctcttctttgagctcagtatctctggtaaacacagggaactgcaggcaacaatgctgctgaatacacccgagtacacagtcagacatttgttccataaacaataaatgtgtaagaccagttaccttgagagggtgtcttgctctggaagatggttttaaaatgccacatttttcaggcttctaggtataaaccttggaggcagggaacctggattctgctttccttttgctggtcaactgtccagttccttctgggtcactgagtctggagtgaggcaagagggaggttctagattgtattttgccttaatcctttaatccttttctaggtaatatctcttcccaggtagcctatttaaaataaaaaaaaaaaaaaaa

SEQ ID NO: 2939 - DNA, 481 bp, Macaca Fascicularis
aagatttcctcttggctctcaggaggagggattccccgactttgacacacatggccaccctggcacaaaagccttgtgttatggaaaaacaaattcatttttatgtccttttctccctttccatccttcagcatagacttaactcccttaagcccagacatctgctgggacctgacctctagtcattggttaccagagtgtcaggcaatctggactttccagagattccaatgagatggcactcgtcaaaagagcaggggttccatttttagattgtggatgttcagataaattgagccattttcatttcacttcatgaaagtcaggtttggcatacgaaaagttgttaaacaacatgataaatgtgaaatatcaatcgcttctgtaaactttccctgttcagagcatcagatgacagatttcatcgggttttatagtggctttatgatttttggtagtccatcgaaggagaaggtagttt

SEQ ID NO: 2940 - DNA, 697 bp, Macaca Fascicularis
  misc_feature (1)...(697): n = A,T,C or G
tgccctccctgtttaaaaatatggaaatttagaaatatacattccttacagtgttccggannntatgtcattttattttggcttcgttttaaaaatcacattagtctctaagctatgtgcttcttgaagaagtgactgacttatcatctgctctataataaagttgtaaagtagtaataaacaggtttctcctttttttatctttctcatatgtgggaaccatagtgccttttaatctttaaaataatatatatcctcaatatagttttgcttaaagaaaagatacaaaagattcatatcatacaattgtccagaaccatcttttgtatacatctctcttctcaaggtttctactcacagtagctgctagaaatgttcccaatccctcacccaatcccaatgcccctctgaacaattttcttttcccattcctcttcctattgtatgttggttatgtatttaataacagagaacaataaacacactaatgttctatgtaaatggcataatttttaatttttatttggaaattatcatgtaccaattgagccttttattgaatgacaccgtatctctcaaagtgccgtgattctttatgttgcatcttttctgagacaatgtgttgttttggttactattacataattctctatgagtaaaattggaactcactgtggcataatatgtcacaatatct

SEQ ID NO: 2941 - DNA, 2151 bp, Macaca Fascicularis
aataatacctcaaaagtatttgtgtgaggagtacaatcacaagctaaggatcctgacttgaagacccttttcacaaaaatgggatgtaaaaatattgaaatacttcgtgagacatttattaacattgaatcaaaggatcacaggttacagaaagttaaagtgattttgctgctacctcgttgttcaggactgggtgttagtaatccagtagaatttattttaaatgaacatgaagatacagaattccttaaagatcactctcaaggaggcatatcagtggacaaacttcacattcttgctcaacagcagtacgaacagctaacacatgcaatgaaatttactaaagctcaagcagttgtttactgcacatgttcagtttgtccagaagaaaatgaagctgttgttaagaaagcactggaatttcaagaccttgggaataaagtacaactttataggcttagtcctcctgttcttccactgtgctccttaaaggaaattcaattgtctactgataaattttttagaatggaaccatctgaaattaccaatggttgttttctttctattttaacaagggagcgggacccttctgagacagtgtctgtgaaagatgttttggcccgagctgcagccaagggtctgctggatgggattgagttgggtaaatcatcaaaacgggagaagaagaagaaaaaatcaaaaacatcattgacaaaagctgccactactgataatggcatccaaatgaagattgctgagttcctgaatcgagaaactaaagccagtgctaatctatcagagactgtaacaaaaccatctcttccccagaaaaatactgctcaagtgggggcttcctcgcagaccagaaaacacaagctggcccctcatcctgcagtgcctacatttatgaagaacacttgtccctccagaccacgtgaacggcagacacacttcataagacctcggccagaagacagaatggttgctctgaaacccatcgagattgttctgcctccagtctttatgccattttcaagtccccaggggatcagatctcggatgccaactcaacatttgtactgtcattgggttgcccccaagccacttgtgcccacctgccttcccacaccttcactatccagaaaaggggaaaagcctaaagatgacacacgttcctccctactcaggcctcctcggcgatggctttgattgtctttttttttataggggccaaagagcggttgattttttttttcaaagtctagtatttctctgaaggttccacatctcgacacaaggtattcattcttttggtcacttagggatcttctaagtgtgatattagtttcagagaattcagacaagtgagaaacaataatgtaggagtcagcaaagcagaattcagagacttcaaccgatcagtgctgctctgagaggatccagttagagactcagtgtcagctgtcagaactgatctcactcctgtgaactttcaggctggacttaaagctgcccagtttctcctgcggggaaggaaacactgcctcctttcagcaggcagctcattagaaagccgaacgggcaagcgatcccggcctctcccgcccgctgactgctcttcagcatccacgcagttggagtcgtgactttctcaaccacgatcaagggtgatttttttcttaaatatcaagctgttctttgaacagggagtgacatgagtttttgtaacgtgactgaagttgagtttaagtaggaagcgcaggaagttcccaagtgccaggtgtgcgtagctcagagacgcttttacgtgaggtgtctctcactgggggagcttccaggatcgtgaatagactggacacaatcatctctcccttcctatatgtcaagcactcttataaaaaaaagactgtgagcaaatttccacctaaatattaataattctgaagaggcaaaactgttgaatgcaagtgatacctactgttgaagtaacccatacatttctgattctcttcaaagatcaggtgatacaacaaaatctacaagtcatttcaaacaacacgcaggaatcaaactttggtaaatcatttctgatgcacaattaaatatattgtagcactcttaaaaaaaaaaaaaaaaaaaaaaaaaaaaaaa

SEQ ID NO: 2942 - DNA, 759 bp, Macaca Fascicularis
  misc_feature (1)...(759): n = A,T,C or G
gtcagtcaatagccaccaaaacagggaccacctgcagatccagaggtcccaaggctttagatctctcaggctcnnnnnnnnnnnnnnngtgcctgcagctggaaggtagaaagagggagtgtnnnnnnnnnnnnnnnnaccatgtgcctgctttgatctctttgctacccctgtttccaccagactcctcagttatagaatgattgtaagctgtgagaccctggagaaaggctgaannnnnnnnnnnnnnnnnnnnnnnnnctggctcccagatgccatgtgcctgtacttgatgcactgtggcgtctcagctgctgtggggctcacagctgctcaagcccttgaatgtgaatgctttcttctcagaagaaaatgtcagttatggggacttaatctgtgtctcacctgaatccccaggtcctgaactgttaggctacaccagatcagttaggtgaggtggggaaaggaaagtagctcagggcatctcttctgtaaacagagatgacaccgcagggatactccccagttggagagagggaggacaaggcactctgtgggttgctgtgtcctggnnnnnnnnnnnnnnnnnnnnnnnnnnnnnnnnnnnctctgccctggtacagagctggacatgtggttctggtgtgtttcgagcaggaggaaggactgtgggaccatccctgccctctggctctaggtgtccattaacacagccnnnnnnnnnnnnnnngaagtcttagcttcaacactagaccaggc

SEQ ID NO: 2943 - DNA, 1904 bp, Macaca Fascicularis
tgcttcacagaaatttgcccagtgacacttgtaaaattgtcattgagctaaatgctcagctttacgtttactaacccttgtaaatagcgtcttgatttcagaccagcatgtcagcctgtcagaattgtttgaatcaatgctaatgtttatttgaaaatcctgtgtatggatgatctatagaattggaagactccagagtttacattggtgctagattctgttccagaaacgtggtcaatattggtggctcttacttggtttggatacctgtcattgacatatttgactcttctttcctacttttgtgctagctatgagtctgaaaagtgaacctttggacaagacaaggtcagagtttagaagtaggccctttttgttgttgtgagtcatctgctcatccatgatgtttgaactctgtgaactctgtcagccacttcacatttctctagtttgtgtacaagaattttatgaggactgtctcatcccttgttagaattcacattttctgtgtatactgcagtgtcaggatctttcagtctattagtgatatccaagaaggaagtaagactgatttgcttgtaattttagtgtataatataggcttcatggcctaatccctttactcataaaaattttattttttcccttcagattataaaattaataactattcatgttaggaaatttgtgaaacataggaaaatatgaaaagtaatataaattagtctaatcttgccacccagtgatgactattatttatgatattgtgtatttatataaagcatatggacatgctatttgatatgttgctgtataaggagattttatattctcgtcatataactttttattgttttttcctcatgtttaaacattcttaatattgtaggtgcaagttttccttcattatgtaaatataatcaatttaattattttccctattttggacacttaaaattagaaataacatattttaaacatttttataacaaatacccttgcagattaacttttgtgagcatctctggtgatttcctaaggataaactgccaagagagaaattactgaattaaagggtatttaagacaactgatagcttgtaaaattattctcccaaaagtttttatcagtccttttatttttaaagtgctttcaaaccactttatgaaatgtggtttattgaactgatctagcaatttctgcagtatctaggcttaagagtgccaggtagcattgagtactgtgatgtgtaaatctggcaatttgcttccctgtggtctcctataccttcctaattctccgtgatcttggttttgaaatattggctaaagaggcttctaaaaggttatcacttttgaatagttaaaaacaattatatagaaacaatgggaaagcactattggaagataactttgtctccaaatattcccaattgttttcattatgggaagctttaaaacccgtgatttctgacaatttttctctctaaactttcctgctgagcagagcaataggactctcctttgtgttgactgtttttacaacacagtcttgtggctttgtgcattcattctcagctctgccactaatcagctgtgtgaccatggacaagttacttaatctctctgaacttcaacttccttctctgtaaaatggggaatacagagtacctctctcatggggttgttatgaagattaagtaaggttatgcatatatatatatatataacttagaagactgcctggcatgtggtaagggctatttacatgtcaacggttggttattgttcactattttggagtttgttggagtggaaggggtggaattggagcccagcttctctgggctttagaaaacagtgatttttttttttttccatacgaaacttatgagagagaacaaa

SEQ ID NO: 2944 - DNA, 762 bp, Macaca Fascicularis
  misc_feature (1)...(762): n = A,T,C or G
ctagaagattcactttataaaatgtgcatcttnnnnnnnnnnnnnnnnnnnnnnnnnnnnnnnnnnnnnngactaattgctattaaatttgggagctttacannnnnnnnnnnnnagaaagtcagaagaagcatctacagttgtttagatgcacagttttatgatgatgaaactgtaacagtagttcttaaagacactgtaggacgtgaaggannnnnnnnnnnnnnnnnnnnnnnnnnnnnntctttagtnnnnnnnnnnnnnnnnnnnnnnnnnnnnnngttcactgggacttattctacaaggctagatgaacaatgtagtgctattcccacccgtaccatgcatttcgagaagcattggagattactggaaagtatgaaagcacagtatgttgctgggaatggttttcgaaaagtatcctgtgtgttaagnnnnnnnnnnnnnnnnnnnnnnnnnnnnnnnnnggacatagatgatgaatgggagctcgatgagtcttcagatgaagaggaggaggctggtaataagcctgtaaaaataaaggaagaagtgttgtcggagtcagagacagagaannnnnnnnnnnnnnnngctgctttcgctccggagatagtnnnnnnnnnnnnnnnnnnnnnnnnnnnnnnnnnnnnnnnnnnnnnnnnnnnnnnnnnnnnnnnnnnnnnnnnnnnnnnnggacataggagatggactaagatgtcttggaccacctttnattttctttgtgtaacaaagaaataa

SEQ ID NO: 2945 - DNA, 2228 bp, Macaca Fascicularis
agaagttaggtgtccgtacaagtgaaaacgctgtctccgctgaggaaaaagaacaatcgcaccctgagtcatataccgcgaaaacgcttctagctacatgggcaagaggaagattttttaggacaaaaagggtgtggagaagcaattgaggtaccaggatattgttcaccccgtcaacggaaagtgaaaaaacagcgaccagccggaaccttatttacgtttgagggacatggtcaccgcccagtgcaggtcccggcttcctgggaaaaaatatttcctataagggaaggaagtgaaggtattaagatcaatacatcatccttgaccagtgaccagcttcagagaagagccagagtcaacaatagaacaaatattcccgttgctggctgtatctaagggcaccagaaaatgtccaagtcccagagctcactgtcattcaaggatgtagctgtgggtttcacagaagacatctgttcagaagaatctgtaccaagatgtgatgttggaaaattatagcaacctggtatcactggggtatcaagttgccaaagcagatgcattattctggttgcaccaaggaaaaccatggatactagaggaagaaatccagagtcaggtttgtccaggtggggtgcagtgactcacacttgtaatctcggcactttggaaggccaaagtggaaggatcgtttgagctcaggagttcaagaccagtgttttcaacatggtgaaaccctgtctctacaaaaaatacaaaaattttctggacatggtggtgcacatgtgtagtcccagctactcaggaggctgaggcaggagaattacttgagccaagaggtggaggtttcagtgaaccaagatttcaccagcctgggtgatagcctgtctcaaagaaaataaaagaaaaaataaatttgtatgttaatgaatctgggaaatcatgctttttcataattttttttctgctctcatataatcagcattatagaaagtattaaatatgtaaataaatatgcttgtcagaaaacaaagcaaaaaatatcagaataataccaaatatttaagtgttttgtacctatttttattataaaaaatgattgttcatatttgggaactgcatgtgttagcatcacaattgtgaatttgtagtatgtatgcttaaatgtgcataaagccttcccatagaatatctgcattgaatctttgtataatgctatgtaaattataattgaactgtgccatggaccctactggactgaacaaaggaggatgaatgtgggaataaagataaacacaaaagaatatgtttggaagaaggggtcaggggctccttgcttctagtgaacaagggctctgagcttctacagcacttcctatttactgagtaaagaaaatgaggagggggtggttgtcagtcagctgcttgatttagtacaggcctgcatgactgcattctttgaacagtaggctccagatgtcccaacagataatctcaaggagcacagcaccagggagtgattgccctcagcataccttctggcggctggtgcagatgcgagtttgctcacattctgcattcatggtaaacagtttgctgtttgatcataaagcctccagtggaatgctgagccagtcatgaccctcaggctttcgggtccccacagaactgcagtggttcattgttttagtaaaaaactcattacaatactatatatctttatgcccctagtgtttgctagtatttgtaaatgggtctggaagatgttgtgctgctcttgggtaaaactttgtctcatgaattctaaggtagacatttttccaacatattaccactgctaaaataatgtggcatacaattgatggcttaatgtatttaaatggagaacttggtgtataaaattgtggtgtgccatacaaccaaaggtatctcagattggatgaaatatagtagaagccatcatctttatacagggttttgtttcttgtaaaccaacgaaatatttggggattgaggaacatgagtcttccaggtttcatgccccttctgaattctaaatagtttgagaaatagtccctgatatcagagagatggaaattaaataattgttgcagtcctggttctattgcatgaatggataatgtggcttgatcctatagtcaaataaaataagctctttccttcatagccaaaaaaaaaaaaaaaaaaaaaaaaaaaaaaaaaaaaaaaaa

SEQ ID NO: 2946 - DNA, 737 bp, Macaca Fascicularis
  misc_feature (1)...(737): n = A,T,C or G
tgnnnnnnnnnnnnnnnnnnnnnnnnnnnnnnnnnnnnnnnnnnnnnnnnnnnnnnnnnnnnnnnngttcacgcctgtatnccagcacttgggaggccgaggcaggatcatgaggtcaagagatcaaannnnnnnnnnnnnnnnnnnnnnnnnnnnnnnnnnnnnnnnnnnnnnnnnnnnnnnnnnnnnnnnnnnnnnnnnnnnnnnnnnnnnnnnnnnnnnnnnnnnnnnnnnnnnnnnnnnnnnnnnnnnnnnnnnnnnnnnnnnnnnnnnnnnnnnnnnnnnnnnnnnnnnnnnnnnnnnnnnnnnnnnnnnnnnnnnnnnnnncaaataagttaataatttcacagaggacaggaagctgcagaggttctgttactttaaaaaagagtagttttgcccctcccagcaacctggtatgggtgccctaacaccagtctgaactcacactgtctgaaaggccacccaggatccaaatcaggccatcttcattgccatgagtgttcagacaggctctgtgtgccaggcaacagtgggccctgacaaagggctccttggctactgggacaacacggaaccatcctgtgaaaatcatttcagcagtggagacctttgctatcacttctttcattagcaatgacctctaaattaaattaggccctgctggtttgtcaatgagcaactgagaacgtggcgggcaccaaacacgattccttccttcatggagcctgcttcct

SEQ ID NO: 2947 - DNA, 2608 bp, Macaca Fascicularis
cattctggaagcgcaggttcagtgccagaggctggggtggggtcagcggagcccgctagtaaagtcaaggcccatgcagctgcggactcagactcgggcccagggccctggccgcagcgtgaagaggggatggggtcgccgctcccacctctgccctggcaggaagtctctggagctccgggacagggcagcgagcgggcgccgaagaggcagaaggggacacgcgggcctgcagcgagttctcctctgagcttccctggactcccaagtgcgggcactggagatgaagagaaaaggcgacctgatattttccatgcattgaaaatgggaaacttccagctggtcaaagagattgccgatgaagaccccagccacgtgaacttggtcaatggggacggggcgacgcccctgatgctagcagctgttacagggcagctggctctggtgcagctactggtggagaggcacgcggatgttgacaagcaggacagcgtgcatggctggacagccctcatgcaggcgacctaccatgggaataaggaaattgtcaaatatctgctaaaccaaggggctgatgtcactcttcgtgcaaaaaatggatacacagcctttgacctggtgatgctgctgaatgatcccgacacggaacttgttcgactgctggcatctgtgtgcatgcgggtgaataaagacaaaggccgtccgagccaccagctgcccctgccccactcgaaggcccgacagccctggagcatcccagtgctgcccgatgacaagggtgggctgaagtcctggtggaaccgaatgtccaatcggttccgaaagctcaaactgatgcagacgttgccccgcgggctgtccagcaaccagcctttgcctttctctgacgagcctgagccagctctggattccacaatgagggctgccccccaggacaggacaagccgctctgcactgcctgatgcagcccctgtgaccaaagacaatggtcctgggagcacaagaggagaaaaggaagacacgttattgacaaccatgcttcgaaatggagctcccctcaccagactgccgagtgacaagctgaaagcagtcatccccccattcctacctccttccaattttgagctgtggagctctgatcggtcccggacgcatcacagcgggaaggtagaccccatgaagaccgtgctgccccagagagccagcaggggccaccctgtgggtggcgggggcacagacaccacacccgtcaggcctgttaaatttccaagcctctccagaagcccagcctctcctgccaattctggaaacttcaaccactcgcctcattcatcgggcggctccagtggggtaggaggtgtgagccggcatggtggggagctgcttaaccgctcaggtggcagcatagacaatgtcttgtcccaaatcgctgcccagaggaaaaaagcagctggattatcggagcagaaacccagccatcggtcaagccctgtggggccagcaccggggtccagcccgtctgagcttccagcctcccctgcaggtggcagcgttcccgttggcaagaaattggagaccagcaaaaggcctccatctggaacttccactacctccaagagcacctctccaaccctcacgccctccccctcacccaaagggcacactgcagagtcctcagtgtcttcctcctcattccatcggcagtccaagagcagtgggggctccagcagtggcaccatcacagatgaggatgaactgaccggaatccttaagaaattatcacttgagaaatatcagcccatttttgaggaacaagaggtggacatggaagcgttcctcacactgactgacggtgacttgaaggagctgggaattaagacagatgggtccaggcagcagattctggcagcgatttctgaactgaatgcaggcaagggacgcgagagacaaattttacaggaaaccattcacaactttcactcttcctttgagagcagcgccagcaacaccagggcccctggcaacagcccctccatggctgggtgggtgaggccagaagaaactccctccggcaagaggtagcagctgctgacgtggctctgctggcattggagcccacagaagtgaggagtggccgatggacctgtcccccaaatgtgcctgactctgggtcttgctgtcagtgggattcccagcacggcagacagaaaggtagtttggccaagtcgtagaagctgatccagcgggtaaaaagggggcagggaacccgtctcttttgctcttgcctcggagctgcctgaagacatgggccaggctggaggctggacaactttggacagatactctgagctgtgcttccaagtaaatgcctcctgaagagcccgggacccttcctgggagaattctgcagccagaatgaaggtgccatcagcagcaggtgctgtgaagcactctcctgtcgctgtccttgtccattcctagcaagttaatcgtgtcttgttaaccagcagttcctgttcaacgtgtaaagagacctgatattttccctaataaagctgataccaaattttgcaggcctggcctgcagaaaaaaaaaaaaaaaaaaaaa

SEQ ID NO: 2948 - DNA, 3192 bp, Macaca Fascicularis
aaactcttcctagggttctttctaaactgcggcagcaagttgtcagattccctagttgaatttgctttggacatcagtgtgaagaagaactgatatgccacttgaattaataaaggaagtcattggggtgcctgaagttcagccgctgagtaaattacgtaaagtagatttcggatccctacagccaggttacaattatagcaagaaatatattcagggaaaactttcacttatctcttctttaacttatcgtggaaataaaacagctgttttgcagattggactacaaggacaccattgcagtggctagatttattgtttttttagcttcttcatctataggcaaagatgataaaccttgcatatttttgaaagcatttgaagacctcaaatcaactgtttatggttctatgcaggaaaaattttgaatatcagctctgattttccacttctattggactgacagaagtttgcattattttacattctatcctgagaactgaatattgctgtgcttcaaatttaatctgtttatgtcaaatctgtaagagatttttctacagaatcaatgtctttggttccagcaacaaattatatatatacacccctgaatcaacttaagggtggtacaattgtcaatgtctacggtgttgtgaagttctttaagcccccatatctaagcaaaggaactgattattgctcagttgtaacaattgtggaccagacaaatgtaaaattaacttgcctgctctttagtggaaactatgaagcccttccaataatttataaaaatggagatattgttcgctttcacaggctgaagattcaagtatataaaaaggagactcagggtatcaccagctctggctttgcatctttgacgtttgagggaactttgggagcccctatcatacctcgcacttcaagcaagtattttaacttcactactgaggaccacaaaatggtagaaactttacgtgtttgggcatctactcatatgtcaccgtcttggacattactaaaattgtgtgatgtgcagccaatgcagtattttgacctgacttgtcagctcttgggcaaagcagaagtggatggagcatcatttcttctaaaggtatgggatggcaccaggacaccatttccatcttggagagtcttaatacaagaccttgttcttgaaggtgatttaagtcacatccatcggctacaaaatctgacaatagacattttagtctacgataaccatgttcatgtggcaagatctctgaaggttggaagctttcttagaatctatagccttcataccaaacttcaatcaatgaattcagagaatcagacaatgttaagtttagagtttcatcttcatggaggtaccagttatggtcggggaatcagggtcttgccagaaactaactctgatgtggatcaactgaaaaaggatttagaatctgcaaatttgacagccaatcaccattcagatgttatctgtcaatcagaacctgatgacagctttccaagctctggatcagtatcattgtatgaggtagaaagatgtcaacagctatctgctacaatacttacagatcatcaatatttggagaggacaccactgtgtgccattttgaaacaaaaagctcctcaacaatatcgcatccgagcaaaattgaggtcatataagcccagaagactatttcagtctgttaaacttcattgccctaaatgtcatttactgcaagaagttccacgtgagggtgatttggatataattttgcaggatggtgcaactaaaaccccagatgtcaagcttcaaaatacagcattatacgattcaaaaatctggaccactaaaaatcagaaaggacgaaaagtagcagttcattttgtgaaaaataatggtattctcccactttcaaatgaatgtctacttttgatagaaggaggtacactcagtgaaatttgcaaactctcgaacaagtttaatagtgtaattcctgtgagatctggccacgaagacctggaacttttggatctttcagcaccatttcttatacaaggaacaatacatcactatggatgtaagcagtgttctagtttgagatccatacaaaatctaaattcgttggtcgataaaacatcgtggattccttcttctgtggcagaagtactgggtattgtacccctccaatatgtgtttgttatgacgtttacacttgatgatggaacaggagtactagaagcctatctcatggattctgacaaattcttccagatcccagcatcagaagttctaatggatgatgaccttcagaaaagtatggatatgatcatggatatgttttgtcctccaggaataaaaattgatgcatatccgtggttggaatgcttcatcaagtcatacaatgtcacaaatggaaccgacaatcaaatttgctatcagatttttgacaccacagttgcagaagatgtaatctaatattgccatccaatttagcatacataaaatgttgccactcaccatcccggtttgagcttcttttcctgccctgagttttgtatcagcaatgttgatgattttagcatgggtatgggattagaaaatgtcctttctttaaatctcttggcttttactgggtgcaaggtaaataatggctgtagattttattttgctttctgttttgcttttgcacaaacagacctgcttttaacaagtactgctgagataagtgtttgtctgatcaagctaaagtgtactttaagtagaaatggcaaagttgctttgttagggtgctgatactgatgattttatgataaattcagttctttaaacatgtaatacatgatttgattgcttgtttctctccaggatagtagagatttctctatttcacctcaacctaataaagtggtcagatttataatgttaatgacttaatatgatccttttctaatagtctcctgtaaaatatgccagtattacaacttacaactgattgaatgagatgttaacttagtaaaataatttgatttttacctgacagtgtttgtcaaagttaaaatcatgaatattcaattttatacaaacatttaatatgtgtatagatttgtatttgttatttgccaaagacagaaataaattacctggtttaatattagtgaagaataaataagtgcacacaaaaaaaaaaaaaaaaa

SEQ ID NO: 2949 - DNA, 460 bp, Macaca Fascicularis
  misc_feature (1)...(460): n = A,T,C or G
taaacggcgnnnnnnnnnnnnnnnnnnnnnnnnnnnnnnnnnnnnnnnnnnnnnnnnnnnnnnnnnnnnnnnnnnnnnnnnnnnnngtcacgcaccaggactggctgaacggcaaggagtacacgtgcaaggtctccaacaaagccctcccggcccccatccagaaaaccatctccaaagacaaagggcagccccgagagcctcaggtgtacaccctgnnnnnnnnnnnnnnnnnnnnnnnnnnnnnnnnnnnnnnnnnnnnnnnnnnnnnnnnnnnnnnnnnnnnnnnngacatcatcccccagtgggagagcagggggcagcgccagaacacctacaggaccaggcagagcgtgcgcgcctccnnnnnnnnnnnnnnnnnnnnnnnnnnnnntcacgagggacaagaaccggtcgctnnnnggggaaagtannatcgaatcggaggaacaggaggatg

SEQ ID NO: 2950 - DNA, 743 bp, Macaca Fascicularis
  misc_feature (1)...(743): n = A,T,C or G
agtatcagtacnnnantnnnnnnaaagaccattgcaaatcagtgtaagggtttttccagtaattactcacagcacttttttaaagtttgcatttcttcagccatttaataatatctttctgtgaagaaacnnngctgagttaaccataaatattcattcattgactgggtgggatgtgaatggaatgttagaaatgtgtgaattgaagttcttgtattcattatagatgtagcccttatttaaaaaagtgaattccatactaaaactaggaatgaaagtgagatatttctaaatttttgcaaaagtggatcattttttgttgactataatagcaggaagaattatagcaatctgtcattttacctgaaacagacaagcctatgtattatgaatactttcaagcttccctttggaatatacaagacatgcatttggagttacctttgtttctctatcgttgtaaatttagattctggaattggggnnnnnnnnnnnnnnnnnnnnnnnnnnnnnnnnnnnngctcctattcctagaaggattttgagatggaggaacacatatttaattcccctttatgccttggttctcgttcctccttccaagttggataacaattttttggttgttttgtttaagttggtgctctgaagcttaatctcagtaccctttactctgaattgtcaaattttgataaaacatgtgccatttttctttggtaaaagaaagcaggtcttaatgtctg

SEQ ID NO: 2951 - DNA, 670 bp, Macaca Fascicularis
  misc_feature (1)...(670): n = A,T,C or G
ctgnnnnnnnnnnnnnnnnnnnnnnnnnnnnnnnnnnnnnnnnnnnnnnnnnnnnnnnnnnnnnnnnnnnnnnnnnnnnnnnnnnnnnnnnnnnnnnnnnnnnnnnnnnnnnnnnnnnnnnnnnnnnnnnnnnnnnnnnnnnnnnnnnnnnnnnnnnnnnnnnnnnnnnnnnnnnnnnnnnnnnnnnnnnnnnnnnnnnnnnnnnnnatattggccatnnnnnnnnnnnnnnnnnnnnnnnnnntgtgatccgcccaccttggcctatgaaagtgttgggattacaggctnnnnnnnnnnnncctggctgagaatatgtgttatttannnnnnnnnnnnnnnnaatcaggagaatgtatttcatgtctgattctgctgctaattaagtcaatttaatttttgggacctcagtttctttgtaagtaagataacacctgcttgttcttcatccctgggctgttgggaggaacagatgagacagtggctatagaagcgcttggaaaatgcacttgtcctgttttataaaataaaaagagtattaaatgtgtatttctgccatgtacctaatgattattcagtgagtatatatctgaaaaggcatgttgcaaatatttttgtgaaacgagatgctattttaaattcactgggagaaatgtcctatttaaagtaa

SEQ ID NO: 2952 - DNA, 896 bp, Macaca Fascicularis
acgtcatttgctagagctctgtccatcccgcccctgagcccgtggcactctgtgttctaagaagtgaaaatctaccctccagtgagacagctctgcgtactcattaggatggctagtatcagaagaaacaaaatcataaaatagaaagtgtccacaaagatgtagagaaagtggaattcttgagcatcgtgagtgggaatgtaaaatggtgtggccactgcggaagacagtatggcagctttcctcaaaacattggacatagaattatcacatgatcccgcaattccatttctaggaattgacccacaaggagtgaaagcagggacttgaacccatatttgtccaccaatgttcatagcagcttattcacaagacccaaaaggcaaaaacaacccaaatgttcatcaatgaatgaatgaatggctaaacaaagtgtgatatgtacgtaatgaagtatccttcagcctgaaagaggaatgaagtactcatacatgttacaacatgtacgaaccttgaaaatgttatgctaagtgaaataagccagacataaacagctaaatagtttatgattccacttacatgaggtactgagagcgaacaaattcacagagacagaaagcagaacagtgattaccagggactgaggggaggggagcgtggcagtgacggtttaatgggcacagagtttatgtttgcgatgttgaaaaagttgtaaagataaacagtagtgatagttgtacaacaatgtctgagtacttaatgccactgaactgtacacttaaatgtctaaaatgataaaattttatgtatattttacctcagttaaaaagaaaataccttggtcctcaaaggtatgtttgccaaagaaacaaggtggaattctgcaaatgagatca

SEQ ID NO: 2953 - DNA, 796 bp, Macaca Fascicularis
  misc_feature (1)...(796): n = A,T,C or G
acagctgattgctgntgaccgattactagtgactagtttactaactagtcatttcaaggaagtcaagttaacttaaacctgtcacctaaatgtacttgatagtgttgaaatgtccaccttcttaaatttttaagatgaacttagttctaaagaagataacaggccagtcctgaaggtactcccagtcccagtttgctgcagaatctcgtattttggatgttgtnnnnnnnnnnnnnnngccccagttaattcaacttttttctacctattttatggactgtctgctctgttagaactctgtccaaaaagtgcatggaatataatttgtaaagcttcccacagctgacaatatatgtgcatgtgtttaaaccaaatccagaaagcttacaatagaactgcataatagtaatatttattaaagaatcacaattgtaaacatgagaataacttaaggattctagtttcgttttttgtaattgcaaattatatttttgctgctgatataataatttttaaatgtcatcttgaaatagaaatatgtattttaagcactcatgcaaaggtaaatgaacactttttaaacgtgtgtgttgcttattttttccataagaattgtaaacattgaactgaacaaattacctgtaatggatttgattaatgacttatgagcaagctggtttggccagacagtatacccaaacttttatgtattacagaaggctattacacttgtgaaattctcttgtctaatctaaatttacattccatggcgataacatggtatatgtatgtataa

SEQ ID NO: 2954 - DNA, 5249 bp, Macaca Fascicularis
cataacgtaacacttgtgtgcagatttttatgtgaacataaaacagttttaaatcctactttccctcactgtcaccccccaccttttttttttttttttttttgttttgctttgctgaacactccgtgtctccacaatcgcagctcatgggcagagagtacaggcgtcttttcagactgcatgtgatgcgttaccacaaaggagccttcacagccttcatgagagcgagcaacgtcacacctttcctgcaggcagggaaaccaaggtaggaggcgcgtagtactcacagcccctcctcccaaccacgtgtcccttcttctagcctgatctccatctttctccagagaccctcttcctctcatctcccctcttcaagttgcaaggtgcctaccctgcggagggggcagaggggatgtgattcttgtgcagatccccttgcccctcttgcagattgtttccatgaagcttacgtttgttatgattttaaccctattgacacggagcaggggtgagtggtgatgaaagggagggaggttctgggaggaagtgagagttcatccacttcggtgcttttgcaatcagctgctgatgccacgcgcccaccggcacaacccaggagctgtgtttgtctcaccagaggctgaggggcattttatccatttgtaatgcataggccagggtctgggcaggtccgaatgcacccgtgagggtccactagggcaggaaggacgacaccctggtcctggctccctagttcattcgacttctcaccaagggtggtgctttaaaggttggggaactgtgtgtgaaaggccatggttcctacagttctttcacagccatgaagcagtgctcatcactggcaccctggtcttctggcctttttttattctttctgcctttcttaagcagggtcatggaccatatttcaggcctgtggttgccttctgtaggatcctagtggcctaaaacaaacgtcctgttattccagggcttccatcacccgtgcccagcttcaccttccagctttaccttccgcccctgttagctgtcccctccgtggttacccacaagccgctctcctcctgccaccaagccttacagggttactgatcacatctcgttctcacctactttttgggatgctgttcttctatttgaaatgctctttcctctgctcttcctagcaacctcacctttgaggcgtagtcccaacatcttgttccctgatttggaatttgtgttttacacactctgctttcagtgtataggatatcagtggtcacagtccctctttgtgggtctacatctccgtggactctgagcttcttaagaatgggttgtgctctcctttgacctctcagtatccgttatttagcagccacctaatggaagtgtgctgaatgaaggatggagaaaaaagagagtgctgctctccctggcctcagggggtcctgctccccatgttaaccagacccttcccttgtacagtggtgctgtagaagtcccaggtgctgttcctgggcacctgctggagaaaacgctttgtcccaccacacagggctcaattcacctcacctgccgatcccctgaaatgccaaccagtccctgagatgtctattatcctaggctaggggcattcctgggaaatgaacgggttactccaccatcttctcctttattaactagttcattattttatttatgttattttttaatttcctgatttctcttaacctcacatttgtacctttcaggtgcctatgtgtttccaaagcactttaccaagtcagtgccgcatagacaaaaatgagatgttgcctccaggtttcttctgtttaggtgagggccagaggggtctctagcctgacaaccagcagcacagtacatgaaatgggtgcctggaggaaaagggggtggggggggaataggtcagacaatcatgaagaaaagagcttttgcctacttaaaagaaattaaatcagagttcagagtttttctcctttagagacagtgaaaacaatcacaaatctgaaatagaagaatttttctttgaaacatctgcacactgtacatgtgtttgtgtacgccctgcatgcttaaattagtcttctcatcttggaatttgagcaatcatctcaattatgtttattagactcccccaaactatgaattacagtgtctgtggaagcacctaccttggttgaatgctcttatcacttggtccttctctggcgccctggcccctccatgtctgcctgctcgtctgtgtactcagattcgtgctcaggacacacactgtcctggtttgtgaaactgccacatagtggttgtctccattccaaaatgctgcttccttctgtcctttccctagttagacgagaagtatgtcttatttccccaaccagcccagaggcttctggtagacagaaaacaatattctactccatactttgtacctggcaacagtctaatatgtatatgttcatatttaaaaagtgacttccagatcgcagatggtcccagaggctagaccaggccatgcctgtgcctgtgaaccatgtccctcagagtagggagcctgtggctggcaagccctgcaccgttttcccaactgagaaacgcacaggcagtggtactcacaccctctgatctttgcctgaaccacgagcagagaggccgtgcttccaaaagtcagtttctaacacctgtctgtcatccaggctgtgattcccattttgggcctgaggttagtcaggcccagtgacgttgcatggcctttgtgtattggtatcacatttatcaatgtaagagctcctgactttagagcactcattaatctgttcatctattgtcagttgtccttggaaacgaataccacttgactgatcagaacggatcctggaatacgtgtattgacaaaactatcataagtctgccttaaaccttgggatggcctcctgccagctcttatttattcagtgtggctcaaaagaacagaggcctcttggaagtggccagatggcccctgcgtcagcctcccttcctctctttcttcctcatgaagtaaatgaaagtctgcagtaagtgatcttgaatgtttaatttgatgctttgatatcaaattttggagccatttcggcgagcgtgtggcgccgattccataatgagattccacatttgctcgagcagctagaaaaatctgtggaccttcgtgtaccacccactgttactgagatttcactggatgcttctgacaagtcttgccctttgggggaattgcaccatgggaccttctgggcagggtcggttagagaactggagttgtattcacattttttattgccactccaactattagattctagagttcctttccctgggaaagctaaggtctggtgcaatcttttctgtccatcaggaagcaggattttgatttgtttatttgttttctcattcgtttcagtggatttagcttagcttaataaagttcaagcaacctatccaaaatcataaattaaccttagtggttcaagattactgatttcctcagggttctgccagaatttacaaccctctccacttccttccttcgaattatagaatcttaaaaaggccttcaaagtcatccagctttatttcccacttctttcagatctctgataggtctgtatctagctcctgcttggatcagacgctatcaacagacacacagacacatgttggtgtgccctgagcccttcacaggtgtgctctcaaatattaataaatgaatacacttcatttttacggaaccatcacatatacgtggttgtggtgacacccttggaacattgccctgaaggtgctgagtaacttggtgttgccagggtctcgctagcaggatgatggcttaggagcaggtgagctggtgctgaagacaagctgcattcccaaggagtgtgtgaagacagcctcatggctgggccagggtcagggtgctacatggctctgctcaaagttggccaagtgggcagtgggacaactgtggagttcttgtaggcaatttattcttagaccacagtatagacgatgtggtcaattatggctgatttgctatgttaggcaattcttgcattgctataaagaagtacctgaggctggataatttataaagaaaagatgcttaattggctcatggttctgcaggctgtacaggaagcatggtgctggcgtcagcttctggtgaagcctcaggaatctcacaatcatagcaaaaggtgaagtgggagcaagagggagaggaggtgctacacacctttaaacaaccaggtcttaggagagcttctattgctaggacagcaccaagaggatggtgtaaaaccattcatgagaaatccaccccaagattcaatcacctcctagcaggccccacctccaccaggcctcactcccagtaggccccacccccaacactgggaattacatttcaacataagatttgggggacaaatatccaaaccatattgcttgcctaatgctgttggaaaatctcctgttgaaatagtgcccgaatacaaaaaacaaaaaaggaaaatgaaggctactccattgctctcttttcctgatgcggcctcattacctcatgaagcattcaattccaggtttgcacagctttgagtttgcacagactatcttaaaaatgcttgcttataccagcctaaaaccttgctctctgtaaattccacccaagagtttgtgttttgtttttggaatagtaataaatacatgaaactcagtgtttacccagcctgggtgtacctggaattataaggagatccattttaaagtatgaacttggaggccacgcccatagaaattctgtttaataggagcccaggagatgtatattttcgtaaggcttcataggtatcactcatgcatacccaggtctgaaaaaatactgctttcccataatccttcagttggtagctgaactcttctaggttaattgaacattttttcataaccacaggcacgacttttttatggaattaagaactaggctcctgacatacaggtctcgttcattgcacattcttgcttgtatttcactgaggttcacagcactcagctatgaaaggagatagaatttagactcccaagtgtatccatttacatcatgcacgctgacctgagtgggttagtcatatctaatgctgatcatctagaaatactccaaatccagactctcaaaaaaaaaaaaaaaa

SEQ ID NO: 2955 - DNA, 754 bp, Macaca Fascicularis
  misc_feature (1)...(754): n = A,T,C or G
gaaattttgatttcagtctaccagaaaagttaaatctgtgttggacataggaggttttcagaaacatgcctcttttatcaatttccactatctttcaagttacctaaaggcaccaggctgcttgagcaagaagaataaaaggcctagagtgcaaattatgtgaagtagagcttttagattgtgggattgtaataatatgggatnnnnnnnnnnnnntcatgttaaatcacaccgtttagtcttcaaaacttggtgttttaaaatgtgtctcnnnnnnnnnnnnnnnnnnaaggaataaacgtgatttcagtttaaactatatacaaatatcttctgtaattttgctgctctaatttttaggctataaattttgtaatagagcttatcagattgcgaatttcctttgtttacaatctcatgtagtagggctcagataatttcttagctatagctataaaccttttctcccactctcatattaagtttcatttaaaatatttaagctaagcctaaaaattgaaatcagttaagaatttggagagtttatcttaaatggaaatggtgtattcttttcaaagnnnnnnnnnnnnnnntttacagtttctttgcttggaaaacttgggttgttaactatcagttaacagttgcattactttccaaaacataatctaatgggcccaatgtgtacctcaagataaacacaaaatgttatgtctaaaaatttcattgtctgttgatttaaatggttctgaaa

SEQ ID NO: 2956 - DNA, 685 bp, Macaca Fascicularis
ctaaaggtgtaagtatctttgtcttctccttagtaaatgtgataactagattatggaccatttggagaagccaaatggcaaccaaaactattccagtgtcagaagcccctcctggcttaatggaattgtccttgtgttagctcatcccaggaaactccctgtgggtatatatgtgtatgtcttcgtgcatgtgccctcacaggcgaacacgtgtgtgcctatgtgtcctcttggagagcatggcgatgggctgggacctcagccctgagcactgccttctctctgtctctcgtgtccagtgagagtccaaccagtgtcctcctgtctgtcagagaccccaccctggataacagtaatgtgtgtgtcaagtaaataggatatgatagagcaaaagtaacattttttgaccgaatcatggtgattgtgacccacaaaagacatacaaaggacctgatacatggattaaaatggctatcacaccccatccatgatgatcttcttccttagtcatactctgaggatacttctgtgtttgtctgtgaaccaatgtcatgtctctcgtgctaaggaattagtgtagttagaataggtcttctctctctctctcttttctctctctctgttggatgcttctgtatctttttccacagcataatggctggtggacggggagctatttataaaa

SEQ ID NO: 2957 - DNA, 642 bp, Macaca Fascicularis
aggcctcagcattttgatagacctactggtttgcaagttgctctggaaacccggctgaagccaccctttgctcctctgagtctgtcctcacagacctgggaacacagtggcagcttgataagcaagggagtgttgctttccttgggtgaggaagaggaagcccacctcaagtctggagtagtatgactgccatccaacacccttccaggctgtgacccttctagctctcaggctgaatcaggtgaggtggctgattgtccccagctaatcataaggcatttgcagctggccaccctgtgtagtggcccctccataggagccacaggccacaaatcaggaagctggccgctttccacccagacaacagcaaggccttcctgtgcctaaaattgttctttctaactctggaaggtgaatccaatcctcaaactgaactaactcttcctaggcgacatataccatgatctctttatccagaaactgttcagaatagatagtaggggtgggggagtgggcttgagaatgttgaatagattcagagcccacttagacagctttctcccaagaggagctttataacctagagccctgcagttgacttcatttgcctaagtttatatacatacatatctattctacata

SEQ ID NO: 2958 - DNA, 1978 bp, Macaca Fascicularis
atagagctttgaggttctttggccgaggctggaaggtggaagcctgactcattcggagcctagttacagaggtaaactgtggccatttttttctttcatttagccaaatgcgtccttgtcattaaaagacctttgaaactgagtaaaatggctttgaaacctcagtagaatatgctcaaactgtctggagaaggattacgggacaactaccacagtacaagcgatcaaattgcccttaaaaatctccagtctgatgtcacagaggcgaaatctgacttcaccaaggagaccctggcatcacaaaacacaaaaatgatttcatccttagtcatctcccagatgattgatgagaataagctgagagacgcaagtactgggtcacccatgtggatgacaaagggaccagtttttctccagacaccccactgtcaggaaagagcccgctggtgttcagttcctgtgtccacctcagggtgtctcagcagtgtccaaattcaatctattatgtagacaagtctctctccgtccccattgagccacctcaaattgccggccccaaaatgcacagatccgtcctgtcgctcaacctcagttgtagttcccacagattgacagcagatggagtagatggcctagtgaacagggagccaataagcggagccctgaagcaggagctcgtggagggagaccaggacctcgtaggccagcgctggaacccaggtttacaagaaagtcacttgaaggaaagcccagcggaaggaggacctgaggcagaagcagagcatccttcccatccgcaccagcaagaagcagttcacggttccccatcctctgagtgataacttgttcaaacccaaagaacggtgcatttcagagaaggagatgcatatgcgatctaagaggatctataataacttgccggaagttaaaaagaaaaaagaagaacaaaggaaaagggtgatcttacaaagtaacagactccgtgccgaagtcttcaaaaagcaattactggaccagctccttcaaaggaatgcggtctaaccgcaggctgccctgctgaccacactacctggacctgggaggacttcaaatgctggataagccattaaacttagcaatatcttcatgatgggaaaacacttattttacctttgatttttttttttccgtaaaggaaaacatcacttcctgaattactgacccaagccaaacagaaacaataacacttgaggaaataggtcaacaatctgttgtggggaaaccacctctatgtaacccactagatacagtccccttcacgtttttgcttctgagttgtaccttttgcttctgatttcttctcccctgctgtttcctgcccatcagagaggccttatacaagcaagtttgcttacatccctggggaatattttacatcaaacttttgggatccaaatccgtctccttttaaattttaataccaacacctgccagttatgcaaatgccaaaatgtgggtcatcatatagtatatttttaaactttctgaacacgtataccaccaatgctagaggctgacttggaaaccagtgggtgcaatgcccgaggctgtggaacaatcagcccatctctttgtgacctgaagcagtcagagtggccctcagtcaccccgcccccagcaccgttcctcaccagggggaaaagaatccattgctatggaagctctggtgtgacttcagtgttttctgcaacactcctcctgccccaccctgtaaaaaaagtcgttttgttaagaaatagcctaatggtccagctttgctgtctgttcttccaaatgtttataatacacattatttataaatatgtgtgtttgggaagctaagaacaagctagtttttacaacacaaatggaaataaatgcagttattataaaaattcaaaaaaaaaaaaaaaaaaaaaaaaaaaaaaaaaaaaaaaaaaaaaaaaaaaaaaaaaaaaaa

SEQ ID NO: 2959 - DNA, 632 bp, Macaca Fascicularis
  misc_feature (1)...(632): n = A,T,C or G
ctccccagcnnngtgctttgcctcttgctcatggtgccccaccacctctgactgcggtgctgagattgaagaggccagtgtccgatccccgcttcccgtccacccggggctgcggnnccggccccagtcccgcccccgcccctggccttgctggttccctttcccctcccagctcctctccttccccggggaccaggcctcctctccttgcctgcctcctgggctgtcctgacttatggcagccccaagagggcgcgtgtggtggctcagccctgccctccccaactctggccattaattcttccccatcccatggctagggtggggctccccaggcagccgctgacccgcgctcctaagggcgcacagcggaccccaaggggcttttgtctgcannnnnnnnnnnnnnnnnngagcctttggaagctcccccagggagccccacccaggaccctttgggggatgcctcagtcagggccaggctgatcctgacccctgcttaccctagtcccctcaacctcctgacactggaggaatacttttctcctaagtctaccctggacactttttagggcacctggagagaactttcctctccactgtggcccctgcgtggtgaagatcaaaagaag

SEQ ID NO: 2960 - DNA, 731 bp, Macaca Fascicularis
  misc_feature (1)...(731): n = A,T,C or G
gagtgagcacaggtggctgtggagacttaaaatnnngctagnnnnnnnnnnnnnnnnnntnnnnnnnnnnatgtcattctaactggtttaaagtttatgtggccacatgtggttagcatctaatggattggacgacacagttagaaaagcccctctcctgggcactgccagctgcaggcacattcctaaccgaagacgtacnnnnnnnnnnnnnnnnnnnnnnnnnnnnnnnnnnnnnnnnnnnnnnnnnnnnnnnnnnnnnnnnncnnnnnnnnnnnnnnnctcagctgccccttccacacacacacatgcacccaattcaccttaactttgtgcgtccaagtcttttcttggcctcacctgcagtcttgatgccccaagtagaaatctttgcatgttgagtgaggggcctgtgggcagcaaaccgcattctccttactcnnnnnnnnnnnnnnnnnnnnncctgccactcttctccctctgacctcagcgagagcaccgctcagcaannnnnnnnnnnnnnnatccacagctccccggtcctgtctggctccctgccttggaagcaatgttctcacgtcttcctccacccaggcagctgctggcatctccacagctccctctctccgcggctgaaatcaggacccacagatggtgcccccattttcctccgcagctctgcttaccgcatttacaggggtggcagaagccnngtgagagtgaatattaaa

SEQ ID NO: 2961 - DNA, 779 bp, Macaca Fascicularis
  misc_feature (1)...(779): n = A,T,C or G
acagtagaactttgaggtacatagctgttccaaaatatatccttgcttnnnnnnatctgacgtgaagatcaaaggtgatggcatcccacagatgacagataatgggcaaaatatattcttggtgtggagcagtgctgccgaattaacttccctgtgtacatcccagaatcattttggatctgctaaggtttttattagaatgatttaataggcttttgnnnnnnnnnnnnnnnngtagttaccagaaaaggctatgctacaagaatgaaannnnnnnnnnnaagaccgaaatgatatgattctaaatgaaaaaaataaagaagtggaatagtttctccaaaggcataggaggcaaagcattgtttcagaagtggnnnnnnnnnnnnnnnnagatactcaagactggcaacatgggtcttcattctttgttatcactgaggttgtgtcctgagagattccctagctctaatgacagattttggggggggcgggtaatgaggctatgagaagattgaggatctaggtgcttgcctctaattctacagcataaaggtgtgtcgctcatctctaggacaccaatatttttaatgttgcatatcatgtatctccagtacgagaagaaagtttatcagaatttagttaatgttggaaactttgtaatacaaacaatgtaaacactacattgacaaaaataataattatccatatagtttgcttactatagaaattcttgtttttgatgttggatacaaccccnaaggnnnnttttatgtatagag

SEQ ID NO: 2962 - DNA, 682 bp, Macaca Fascicularis
  misc_feature (1)...(682): n = A,T,C or G
agggcaaaggcnnnnnnnnnnnnnnnnnnnnnnnnnnnnnnnnnnnnnnnnnnnnnnnnnnnnnnnnnnncggtgccaggcagcctggcctccagagtcacggaagcagcttctctgtgtgccgggggtggcggnnnnnnnnnnnnnnnnnnnnnnnnnnnnnnnnnnnnnnnnnnnnnnctnnnnnnnnnnnnnnnnnnnnnnnnnnnnnnnnnnnnnncggcctccgtcccaggccctggggtgccagnnnnnnncgagcacccagctgaccaaagatgtttccctctgtagaagactctgctagactgggtctgaagcttgagttnnnnnnnnnnnnnnnnnnnnnnnnnnnaaaggagccgtgggaatgtgtgtgtggcgcggcccggacaagggcagggctgagggaggggcctccgactcagctgggggtagacgggctcgactctggcctgggggagcctagggaccccaggggtctgcttttctatgtgagcctttaaacttcagacagagaggccgccaccctgcgcctnnnnnnnnnnnngggcaggagtgctggctttggagggactgtggccttcatcgtggtcctctgcccacacctccacgcacacagacagtgccctaggagggaaacagaactaattatgagggggaggcaagaggacgccaagca

SEQ ID NO: 2963 - DNA, 721 bp, Macaca Fascicularis
  misc_feature (1)...(721): n = A,T,C or G
ggtacataccannnnnnnngccgcanccnnntccactcctggcaccaaggtcttttgctgcttatgtctaaagggatcgcctatatttaactgcctcagtgacctaacctctttcttctcatgtgccagatgttaagatgaaggaggaatacaacacatactcaagcctcagctgtttagttgttttcactggggctcgcttttctgggatggtatttattatcagactggcaagcctaactccataggtttacaggaagtagggatatttttannnnnnnnnnnnnnnnnncccacattttgctatgttaatatttgcctctaacnnnnnnnnnnnnnnnnnnnnnnnnnnnnnnnnnnnnnnnnnnnnaggccttgttggaggggacagagcacaggaacagccttgacagtctgtaattattgtacaaatattttaatagcatataaataagtatattccttttattttgaaacaaaaatgatcagacactgccttttgtgtgtttgctgcctgtggcaccctttttgaaaaagactgttacatattaaaatagtgtacatatatataaatattacctcttttgctgtacagttgtgatagagactgaagattttattttttgtgtgctttttataagaaaaaattaatacactaaagaatcttgctgatgtgattgtaatgtacctatgtaacttatttacttttgaatgttcttct

SEQ ID NO: 2964 - DNA, 706 bp, Macaca Fascicularis
  misc_feature (1)...(706): n = A,T,C or G
gaagagttgaacccttannnnagaaacttctgacaatcttcagaacattccatgtgggtgtccttgtgtttctcatagtatgacttattgattcttggtgtctcttattaaagaagcatgaatgtatcactagctgttatcagaacaaacagctgtagaatgtaatgacccatcctatttctaaatttacttctatcagtggataatttgtgtataggaaaaggtgtggaagttttttaattgttaaaaactagaatacctttctaccttttgtagtctttaagatttcataataatggttttaatgtattactatccactattatgtattgtgtttaaacaagaccaatcagtgaaattttgaatgtcaatacttttttgttagaaacgccctttgaaaatgttagaaaatgtaaaactttacctgtgacaaagaataaattcatgattagaagaattttactgtttttcttgtgcaaataatacttaaggcagatgttcagtctcacagtgatgttggaaagcatattttatgcagtctaaacactatttctgtattagatatttaaatgcatgaggataaattctaattgctttttgtttaaaacagaaacatagaagaagcattagccccagtttgtataaaatgtctgctgcaactgaattcatgatagttcatgaaaactgaaaatcattccaattttgt

SEQ ID NO: 2965 - DNA, 661 bp, Macaca Fascicularis
  misc_feature (1)...(661): n = A,T,C or G
gagagtaggctgtgaggcagagggtgactggcagagctgtcggtgtaagagggtgcatnnnnnnnnnntccaggtgtgaagggtagatcagaggcaggacagtcaaggagttatggtnnnnnnnnnnnnnnnnnnnnnnnnnnnnnnnnnnnnnnnnnnnnnnnnnnnnnnnnngtctggtagagcttagagggtaggtgggaccatgcctttttctcattggtttgtgtcctgattccttcccagagcctggcagagagcacgtgcatgacgcatgacatcaggtcactgacggagtaatccacggcgaacagatcatctcannnnnnnnnnnnnnngtgcccagctggggcgacactgatggatgaagctattcagagctatgggcaatgtctacatatttgactgtcaagaagcttcatgtggaaatagcttcaaacttacacaaattgcaagaataaaaaatagtataaggatactcgtacannnnnnnnnnnnnnnnnnnnnnnnnntaatattttgctccatttgctctccctctctatgtatgcagtatatttttgttctgaaccatttaagaagttgcatccattataagaattggaattaatnnnnnnnnnnnnnnnnnttaacctgctgtccatattccaactttgtcatc

SEQ ID NO: 2966 - DNA, 735 bp, Macaca Fascicularis
  misc_feature (1)...(735): n = A,T,C or G
tatgcattatgtagtatagctctaattgtatcatttcatcacataactatatgtaaaaataattgacatgtatatgccataccatgaagcatatgatgttgtgcactttctcctccatttttcatttggaatacattccacaacatgatccaaaacataagaacttgtgacttgtaacttttgtttaaagccattaattgtgcggtaatgtgctacagaaggattcagtcagcttcttttaagaaacaagtgtcattgtatcagtttcctgttctgtgacacgccctttaaaagtaaaagataatatattttaatacattgtgtgtaatgtacatatgcatattgtctatgtactatatacacattgtttataatagtgttaatacagtttgtcattctcctgaaaggagaaggaaatacaaaaggtttctctgcttgggaaaaggtgaatgttgttatatcaagaatgattacacacatggatctcatacatgtttttagaacattgttcttctaattgaagaagtnnnncactcctgaaaaattttaaaatatctgacttgtattagaagaaaattatttgattaaacttttaaaggctggttgaannnnnnnnnnnnnnnnnnnnnnnnnttaaatgtctgaattgtaataaaagannnatgatttactttaaacttctaaaaactaatgaccttgtgactaaagaaaaatcatttgaagtgtataaaacat

SEQ ID NO: 2967 - DNA, 676 bp, Macaca Fascicularis
  misc_feature (1)...(676): n = A,T,C or G
gacggtggatttgttccaaagcctcaatcnntnnnccnctccaaggggcaggtttccaccccagcctcagagaatgggctctgggacccccgcccgggggtggccttcatgcaccaggcacttccacaggtgctgactccccaactccccagcatcttnnnnnnnnnnnnnnnngggatggagccttagccccatggtacgccctgcccagtttccagttgccctgtgtgcttaccccagataacctcccagcccatcagtgctgagtcctcatccctacctccagcttcctccggcctcaaacggcctccagatctagccgtccttctccgagtggcatgcctgccccgggatgccccctgttcctccccccatgcccagagccccgcctgcctcagcgggtcaggccttcagaacactgccaccnnnnnnnnnnnnnnntcctgctcccacccaccaacctaggcctgctcctccgcccttcccaggaggcagccccgggatgctgagagttggtggaggggcgaggctggacacttcccacaggagtcccctccagacatggctggcccctgcagccgcagaaaccacaacggcaaaaaaaactcattggttcccaaggactaacctgtgggggaaagcaatagagacactctttttctctcttttttaaaga

SEQ ID NO: 2968 - DNA, 760 bp, Macaca Fascicularis
  misc_feature (1)...(760): n = A,T,C or G
ggaatggggagcggcagggaggaagagannnnnnnntccacaaagnncttgggaaatgaggggaggtggaggcagggcaggggaagcgaagagtcagcctgggagagagcaccctggggcctgcgtgtcggggtacacccagcacttggcgccccacggcccagcaggcgccgaggatggaggggaggaagccggcagcccttgtgtttactgtcgtcagaaaggtcttgtcttttggttttggggtttttgttgtgttgtgtttttttggcttgtttgttttttaaggggaaaaaagtttgtaattatttcatccaaatctcccgttatatatctgtgaataataagagattttataatagcaagaaaatgatgtatattttagtttgttgatgaannnnnnnnnnnnnnnnnnnnnnnnnnnnngaaaaaataatttagagccctgactttttgtgaatttgtttgttttgtgtgtgtttgttttgagatttgtatttggtttggtttggttttggcactgcactaaggcaggagggttggagggctgggtgcagccgggatttctgatggtgttcagcaggagatggggtgtcctatgcggggggctaaactgcaggggcctgagattagctgtgaacatgtgggagcctcgatgcatgtgggtcagggatctgggcccccctccccccgagctggcggtaaccccaanntggacacaaacctgtacatttgccaatgggtttttttcggaccatgg

SEQ ID NO: 2969 - DNA, 701 bp, Macaca Fascicularis
  misc_feature (1)...(701): n = A,T,C or G
atgacaaaggcatcaggagtcatggcatgggttcttagccactcatttttttttttaaatcagatgtttcctctttggattttgttccaaaataacaaagatgaagagagttgtagatccagtgtagaaattatgaagaggtggtactgaggggatatgggaacagaggcgcctcagtgggtatccataattttcaagatccatcttgcatagtgatgaacatctatgaagaatccttcacttcctagggtgacgcttccttctgcccaggacaagattccatgcaacctcccattgcagatggctggggctgccgaaacttccttgttttcagataggatccttagagggtgtcccacacaaatgatgtttcctgcctgttcttctttgagtctatcctgacagtcatggaatggaagagaatgttggttgatccnnnnnnnnnnnnnnnnnnnnnnnnnnnttttatattcattcnnnnnnnnnnnnnnnnnnnnnnnnnnntcattaaatggaatgggttccaaggctatggctatagtccccacatgcgggttgagtgaagcaggcgttgnnnnnnnnnnnnnnnntaggtcatttgttcaaagattttgcatcaaagtcagggtaggtcacaatcgatgaatagtttcgtatctgttgtttcttatttgtgatgctaggttgnnnnnctcccagtc

SEQ ID NO: 2970 - DNA, 781 bp, Macaca Fascicularis
  misc_feature (1)...(781): n = A,T,C or G
aagcatacagtcaagaggnnggactgactgatgctttataggtgtgtgtagggcagtagaggccaaggtgctgccaacagtcctttccatactaggtactggtgaaaattgtttttgtttagtgctatcagcacatttgtgtgggtctcattatcgcttgacagtaccgcatctcagcctggaagtcaggtttaagtcattcaagagaacctcaagttgtttttctgacagtgatgatgtggtatacagatacatnnnnnnnnnnnnnnnnnnnnnnnnnnnnnnnnnnnnnnnnnnnnnnnnnnnnnnnnnnnnnnnnnnnnnnnnnnnnnnnnnnnnnnnnnnnnnnnnnnnnnnnnnnnnnnnnnnnnatttacaaacttctgaccttttgacactaaaactgctcctttnnnnnnnnnnnnnnnagattcttcatctgtaatctggagttgttaattccagtccttactaccttttggagttggaataatgagatggaaagtggatgaaagtactttgaaaattatgacagttaagggccgggagcagtggctcacgcctgtaatcccaacaccttgggaggccaaggcaggtagatcatgaggtcagcagttagagaccagcctgaacaacatggtgaaaccctgtatgtactaaaaatacaaaaaaaatagctggatctggtggcgggtgcctgtaatcccagctacttgagaggctgaggcaagagaatcacttgaaaccaggaggcagaggttgcagtaagccaagattgtgc

SEQ ID NO: 2971 - DNA, 771 bp, Macaca Fascicularis
  misc_feature (1)...(771): n = A,T,C or G
ggggagcccagtggncaccaaggtgcatttcccttccacannngtgacctgaggatnnnnnnnnnnnnnnnnnnnnnnnnnnnnnnnnnnnnnnnnnnnnnnnnnnnnnnnnnnnnnnnnnnnaggaaaggtggggtgctggcccagatcgagagcnnnnnnnnnnnnnnnnnnnnnnnnnnnnnnnnnnnnnncctggagacnnnnnnnnnnnnnnnnnnnnnnnnnnnnnnnnnnnnnnnnnnntggatcgggctcacctataagaccgccaaggannnnnnnnnnnnnnnnnnnnnnnnnnnnnnnnnnnnnnnnnnnnnnnnnnnnnnnnnnnctgacaaccaggggtttggcaactgcgtnnnnnnnnnnnnnnnnnnnnnnnnnnnnnnnnnnnnccagcgctnnnnnnnnnnnnnnnnnnnnnnnnnnnnnnnnnnnnnnnnnnnnnnnnnnnnnnnnnntccagggtcctgaggcctggccgcacagctccctcgcctgccctgggtgcaccggctctgcttacctgtctgcccacctgtctggaacaagggccaggtgaagaccgcatgcctcatgtccaaagaggtcttagaccttgcactctgccggaagttgggcagagagaggcatggaggccagtgagggccagggagtgagtgttagacgctgaaggagaagaccccgccagtgatccaaagaggctgctctcttctacctggcccaggccctgtggggcagcggagcttccctgtggcgtgaacc

SEQ ID NO: 2972 - DNA, 735 bp, Macaca Fascicularis
  misc_feature (1)...(735): n = A,T,C or G
accaaaaaccaacnnngccgtttgagcttttacaagagtgaaagagcggggacggtagtgtagtatttgagccacgagtttatgtgcacaagtgttttggaatgtggactcaagctnnnnnnnnnnnnnnnnnnnnnnnnnnnnatataacaaacagaattggaggctggtttcttaaacacacatatccacatttttaagggttgtttgttttcctgtgcttacaatttttaatgcacgtnnnnnnnnntcacaannnnnnnnnnnnnnnnnnnnnnnnnnnnnnnnnnnnnnnnnnnnnnnnnnnnnnnnnnnnnnnnnnnnnnnnnnnggtggggagtttaagaccagtctgaccaacatggagaaatcccatctccactaaaatacannnnnnnnnnnnnnnnnnnnnnnnnnnnnnnnnnnnnnnnnnnnnnnnnnnnnnnnnnnnnnnnnnnnnnnnnnnnnnnnnnnnnnnnnnnnnnnnnnnnnnnnnnnnnnnnnnnnnnnnnnnnnnnnnnnnnnnagagcaaaactctgtctaaaaaaaaaaacaaacgtagaatatctcttaagatttccgttatggcaaaaaccatatgcaataaatacctcattgtaagcttacccaaaatggataggtgtgaaccttttaacagaaaaacagaagtttaagttattgtttcatgtaatcagttttcattttaatatctttgaaatattttcaaagcactg

SEQ ID NO: 2973 - DNA, 746 bp, Macaca Fascicularis
  misc_feature (1)...(746): n = A,T,C or G
gtcaaccgccagaaccgagctggctactcagccctcnnnnnnnnnnnncttacctctgtggggcgggaggaggaggacatggccgtggtccagagactcttctgcatgggcgacgtcaatgccaaggccagtcagacggnnnnnnnnnnnnnnnnnnnnnnnnnnnnnnnnnnncgacaggacatggttncatccctnnnggcgtgtggagctgacgtgaatgcgcaggatgcagatggggccacggcgctgatgtgcgccagcgagtatgggcgcctggacaccgtgcggctgctgctcgcccagccaggctgcgatcctgccatcctggacaatgagggcaccagtgccctggccatcgccttggaggctgagcaggatgaggtggccgctttgctacatgcccacctgagctcgggccagcccgaaacccagagcgagtcaccccctggctcccnnnnnnnnnnnnnnnnnnnaggagaatgcagcgaaaatggagagaacccccaggttcagtgagctgccccgtctggcnnnnnnnnnnnnnctgtggggnnnnnnnnnnnnnnnnnnnnnnnnnnnnnnnnnnnnnnnntggtccagagtcctctgctcagaggctaacactggccgaagagaaaggcaatttcagttggggtgactgtgacaggaaggggctcaccctggccccaccaaaatgaggtggggaccaaggagtgatatagccctgtttcaccactctctga

SEQ ID NO: 2974 - DNA, 106 bp, Macaca Fascicularis
gaggcagaaaccaggacaaaagatacacgccctggaaacgcaaagacctggatctctttgggaagccagaggcacagagacagaaaacaaacccacgcggcaaaga

SEQ ID NO: 2975 - DNA, 586 bp, Macaca Fascicularis
ttgccagttatcccagatcctgtactcactgggagtccatcttgaggaaacacgggcatggctgagtaattgctgaagagcagtcctgatgttgccagcagagcaaaggatggttgtgtttttcaaaatgcaactttctcagcacctcactccacttcaaaccggacttttgaggatagcgctggaatttgttttgtgcaatatatgccttcgtgaactaaggaaagttcatccccaggcagcacgcaggagggtctgcggggctcaccacctcacctcacgcaccatcactcgcgcccagctctcacctcttagttgaatgaatagtgggagatcatttgacttttaatttatgagaattattttatgttatttatgtatataattaactgttttatacataatagttgcatcaaatgaactcgggcttggggtgatattgtctccattctccagatacaagtgctgcaggcatccatggaatcaggagaccagggcttctaagatatatttttaaaaatcagtatcgatttctttttgcctttgcagaatctgaagggcaaatgacctcgcagagactcccaac

SEQ ID NO: 2976 - DNA, 1892 bp, Macaca Fascicularis
agagcttgtggaggccatggggcgcgccgtcgcggagctagtctcctcgctgctggggctgtggctgctgctgtgcagctgcggatgccccgagggcgccgagctgcgtgccccgccagataaaatcgcggttattggagccggaattggtggcacttcagcagcctattacctgcggcagaaatttgggaaagatgtgaagatagacctgtttgaaagagaagaggtcgggggccgtctggctaccatgatggtgcaggggcaagaatatgaggcaggaggttctgtcatccatcctttaaatctgcacatgaagcgttttgtcaaagacttgggtctctctactgttcaggcctctggtggcctactggggatatataatggagaggctctggtatttgaggagagcaactggttcataattaacgtgattaaattagtttggcgctatggatttcagtccctccgtatgcacatgtgggtagaggacgtgttagacaagttcatgaggatctaccgctaccaatctcatgactatgccttcagtagtgttgaaaaattacttcatgctctaggaggagatgacttccttggaatgcttaatcgaacacttcttgaaaccttgcaaaaggccggcttctctgagaaattcctcaatgaaatgattgctcctgttatgagggtcgattatggccaaagcacggacatcaatgcctttgtgggggcagtgtcactgtcctgttctgattctggcctttgggcagtagaaggtggcaataaacttgtttgctcagggctcctgcaggcgtccaaaagcaatcttatatctggctcagtaatgtacatagaggagaaaacaaagaccaagcacacaggaaatccaacaaagatgtatgaagtggtctaccaaattggaactgagactcattcagacttctatgacatcgtcttggtggccactccattgaatcgaaaaatgtctaatattacttttctcaactttgaccctccaattgaggaattccatcaatattatcaacatatagtgacaactttagttaagggggaattgaatacatctatctttagctctagacccatagataaatttggccttagtacagttttaaccactgataattcagatttgttcattaacagtattgggatcgtgtcctctgtgagagaaaaggaagatcctgagccatcaacagatggaacatatgtttggaagatcttttcccaagaaactctaactaaagcacaaattttaaagctctttctgtcctatgattatgctgtgaagaagccatggcttgcatatcctcactataagcccccagagaaatgcccctctatcattctccatgatcgactttattacctcaatggcatagagtgtgcagcaagtgccatggagatgagtgccattgcagctcacaatgctgcacttcttgcctatcaccgctggaatgggcacacagacatgattgaccaggatggcttatatgagaaactgaaaactgagctatgaagtgacacactcttttttcccctcctagttccaaatgactatcagtggcaaaaaaagaacaaaatctgagcagagatgattttgaaccagatagtttgccattatcattgtttactaaaagtaatccctgctggtcataggaaaacacacggttctaattaagtgtgaaggtatagctattgcacttatgccatctcaaagtattcttttactatccattaggagtttttcttaaacttgtttgataataagaatcacctggagttaggaggtggcggttgcagtgagctgatcgcgccactgcacaccagcatgagcaacaagagcaaaactccatctcaaaaaaaaaaaaaaaaaa

SEQ ID NO: 2977 - DNA, 759 bp, Macaca Fascicularis
  misc_feature (1)...(759): n = A,T,C or G
tgtaatgtacagtnnnnntgtcagtaaatttcagtnnntaggtttttgtactgcagaannnnnnnnnnnnnngtttagccattgctgcattgcaccattttacatacaaggcaaattttttctttgaagaatccaggatatctaaacttgtaactgagggccatagagaannnnnnnnnnnnnnnattatagtaaatagacatttcagaaagttatatgaatgaaaaaatgtacatttaaaaacaaaatcacttaaaggaccctttgactgatgcctctcagtttatatttttatgtgactttatatttcttttgatatacttgacattttaggaaattttgatatgatttatcaaaacctttacttgatggttagagttcctgcatttatgaaatcaaatctgtaataacagaaatcctggaatactcttaatatactgctattttgtgtttgttattgtgatcatatttacagttgtatattttacatttaaattattttaaggtttgcatttgtatgcttaagacattgatttcttgttggtagatgtattttatcctcacattttagatgtagctgctttaaatttactgatgtattttgacagagtcgtctggaatgctttatcttctgaagctcacaaatgnnnnnnnnnnnnnnnnnnnnntctgtttcacattccttggagtaccttattagtgatgaagtaataaagcctatacgatgtttnnnnnnnnnnnnntctgtatattaatttt

SEQ ID NO: 2978 - DNA, 739 bp, Macaca Fascicularis
  misc_feature (1)...(739): n = A,T,C or G
attagcctagcatgatggcagtgcngnnnnnnnnnnnnnnnnnnnnnnnnnnnnnnnnnnnnnnnnnnnnnnnnnnnnnnnnnnnnnnnnnnnnnnnnnnnnnnnnnnnnnnnnnnnnnnnnnnnnnnnnnnnnnnnnnnnnnnnnnncaaaaaaaaaaagaaaagatattaggtcctagaatttttaaaatatgtcttcataatctcaggtagctaggttataaattatttaaagacaagatcacatgataagcgtctcataattctccttacttagcattgtgttagacatagtaataggtgcacagtgaaatactgttgattgtttaaaaataagtcaaaataaacagttttagaaaacattttcaaaagtcagagttcaggccatgggcaggnnnnnnnnnnnnnnnnnnnnnnnnnnnnnnnnnnnnnnnnnnnnnnnnnnnnnnnnnnnnnnnnnnnnnnnnnnnnnnnnnnnnnnnnnnnnnnnnnnnnnnnnnnnnnnnnnnnnnnnnnnnnnnnnnnnnnnnnnnnnnnnnnnnnnnnnnnnnnnnnnnnnnnnnnnnnnnnnnnnnnnnnnnnnnnnnnnnnnnnnnnnnnnnnnnnnnnnnnnnnnnnnnnnnnnnnnnnnnnnnnnnnnnnnnagatagagttcaaatctgttttggtctaatgttttcttatgtttgttttatttcatgtgtgccagtttctctttnnncacnnncaatttatcaa

SEQ ID NO: 2979 - DNA, 681 bp, Macaca Fascicularis
  misc_feature (1)...(681): n = A,T,C or G
gctgcaggtgacacaggtactggtctccctgctgctgcagacgctgagcctcttggctcttcagctccacctgcaggatgatcctgggcatgagggcgtttactagctggcttccagattcctggcccattaatagggtagcaagggcactgtggtgctctgtggcctgcccaggcccctggtcccttgctccaggcctcagagcctgcctcccttgcctggaacccagtgcatccttccccagcgtcaaatctcacacgctttcccctgtctaaaatttaaactgtagaccacagactagtggaaaacggggggagccaaccagcatctgctaagtgtactacatgcctaatgtttccacgtattatctcatttaatcctcagcacctctgcaaggaaaacgctaacttccttttgaagttaaagaaacagagactttgtcgggcgcggtggctcaggcctgtggtcccagcactttgggaggccgagatgggcagatcacaaggtcagnnnnnnnnnnnnnnnnnnnnnnnnnnnnnnnnnnnnnnnnnnnnnnnnnnnnnnnnnnnnnnnnnnnnnnnnnnnnnnnnnnnnnnnnnnnnnnnnnnnnnnnnnnnnnnnnnnnnnnnnnnnnnnnnnnnnnnnnnnnnnnnnnnnnnnnnnnnnnnnnnnnnccagcca

SEQ ID NO: 2980 - DNA, 718 bp, Macaca Fascicularis
  misc_feature (1)...(718): n = A,T,C or G
ccagctgcatactcctcaaagcatacgtcatgttcttcatccagcagcctggatgtnnnnnnnnnnnnnnnnnnnnnnnnnnttagcagctatctttcagtgaactctgagggtaaaggtcatacttgtcttgttcaccttgggatnnnnnnnnnnnnnnnagggcgtgggacatctagtaggtgcttgacacaatttcattgaattaatgacaaagcctgtgggaagatacagaaaaagaggggatggactgggcgtggtggttcatgcctgtaatcccagcactttgggaggccaaggagggtggatcacctgaggtcaggtaaagaccatcctggcaaaatcccgtttctactaaaaatgcaaaagccaggcgtggtggcacacgcctgtagttccagctactcaagaggctgaggtaggagaatcgcttgaacccgggaggtgaaggatgtggtgagccaagattgtgccattatactccagcctgggcagcaacagagcgagacgccgtcaggaggaaaaaataaaaagaaggcatgggcctgtgacatccccatccttggaggccgtcttcccaggctctgcccctgccctggctccacaccctctcccaggacccatcacacctgtgcaatggctcccacagaaagactgagctcaaagtgggaaccacgtctgttcacttggagccccagtgnnnaagcactgtgcctgc

SEQ ID NO: 2981 - DNA, 744 bp, Macaca Fascicularis
  misc_feature (1)...(744): n = A,T,C or G
gactggacaaggccagtgagcagctgcnnnnngngncnctcacctccatccaggcggctgggttctgcagctccacgaatgtgacttagttcttccctggggtcactcatgggctttatcccatgagtccgtcctcgcccatccactggcacctgtgtgcaagaacgtgtctggggtcaggggagttggggggccatggaagcggagctccggagagcagaggtctgcgggtgactttgggaaagtgggaaggggctgggaaaacacccgaccacacccacagccaagaccacagagcaaggcaaggctggggtgtnnnnnnnnnnnnnnngacagctggggtcacttgatagctggaagcaggatgggctaggaacggagtccagggaaagctagcctgtcgcgatgtgggatgggcagagctagaagagagagcggggaagtccataggcggagttcagctggggctggggcatgggggacaccgagtggctgacatcagtaactgcccttcctttcacctgtcaccacagctgcccatggtcctgctccagccttgagtgcaccttgcccggccctggcctggagtgagtgctaactgggcatcccaaggggtggcgggtgcagcagaagtggaggtgatcagctgggtgcggtggcacatgcctgtggccccggctgaggcaggaggatcactgggacattgaggctacggtgagccatgactctaccaccacactccag

SEQ ID NO: 2982 - DNA, 634 bp, Macaca Fascicularis
  misc_feature (1)...(634): n = A,T,C or G
tggacagagttnnncccccaggtnnnnnnttgcatcaataaattcagcnnnnnnnnnnnnnnnnnnnnnnnnnnnnnnnntaagggtgaacggaaagaaaatcctagaaaatacagagtatccatgctggcagctttttgtacaacacccatagggaccccccaaatggatattacaagggggcagcccattcactacacaagaacaccatacctgggttccaccctttccaggtcgtacngttctctccagagcgggaccctcttcccctctacgaaggggggtaccttgtgctaaggccaagacagagagaggtcccagctcgcctccctnnttgatccaaattgcactgtggtgagcacatttctgacctaggccagtcttggtgcaggggtgctctctctcccatacataggagtggcctcaaggccaagcagtgctgaccccaacagagccgtgaactgtccagaagatgcatcctcagcacaggaagtacccacacggacagagggaaacccagcctcggggccagttgcctcctcttctctgggtgttgtccagtggcttcttggagcttaggctggtttatctcccctgnntaaaaggccctggagttaccaatgcaaattcataa

SEQ ID NO: 2983 - DNA, 1694 bp, Macaca Fascicularis
tagatgctactgatgacccaatagattgctgagggttttcggagcagggacaattgcatcagagtgctgggctccggggtgaactcaggatttggctgactggcggatgggacaatgattggtgcccagactgggccggagaaggaggcctgtccagagcaggcacccgaggccgcgtgcaggggcagtcctgggccaccaacccttggaagctgggccaggagcttcggagccattcgagtctttttttcgcccctctcactctcatgcacctagttaccctccccacagagtcctctcactgcgcgagtttcgtctaccgctgcagtggtgtctgactacacccagtgcctctatccttcccccttcagtctgttctcccttcttggcaaacctgtccttggaaagccctctgctgcctccagttaccctgatcaaatgcatcctcctcgacgggcttgtgagcggtttgcagggtggcccaagaggcatcacgccttgctcttcagccacttttgggggcccctacagggccaagcatcccacaccggcagcgggtgctggtcctgccacagtctgtgcaacatgtgaatgaaggctgtagtcctatggtctgcgggaggcaaattccaactccagctgtcaaacataaagggactggcaggctatccagggtggatgtctcatggcatccaaggcagggacctagccaggcctcgggaaagagctacaaaccgaggacctctggggtgtggcttcatctccctctccctaccaccctacccccatctctctgtgttcctcagatgcctcattttcctgtcaggcacctggccagctctaggagctggaatcaggttgttaccttcttggtcagtgtccatccctagtgtcatccacagtggccaacggaaggggtggctggtggtgcaggacatttgccatcttgggaaagatcacagaggaagggcctctttagctgagcagacgaggttctgcagtggtctggacagatttgcacactcgtgggcatccccctgccctgttgagcagacggggttctgcagtggtctggacatgtttgcacactcgtgggcatccccctgccccgttgagcagacggggttctgcagtggtctggacatgtttgcacactcgtgggcatccccgtgccctgttgagaaaccacatgaggaaaggggacccttgcacctgtcgcctcccgactctgactgccagaggctgggctgccagccagctgtgccagcatgtgacagcacttgacggaaagtccctggaaaggatgtggatcattgcagaactcccttgagaaagcgccagaggaggaccccattcagcaccccgcagaactcctcaaactcctgcgtccccctcaacgctccccgagtgtggtggctgcttctatgtccccaggcttagctggcctgggtcctgaaggcctctcctcccgctgtccccacgcagcaccctctcggccactgcacagctggatgcagtgaaggccaggcagctgtggctgcttggggaacaggagctgcttgaccctgttctgctgactttgttagcctcactcccgtggagagccaaggttaccacatccccgaagctacggctttctttctaggcctgggggagtcacatcttgcgtttgtactcactgagctccaagtcta

SEQ ID NO: 2984 - DNA, 1892 bp, Macaca Fascicularis
cagcaaacaaaacagaactgtttgaagtctaaagcttaggagaattaaccagctaaacctttgcaagccttaattaaggtcccttccaactctgtgattcgttaaactccccttcccttttttccctttcccttgctcccactattgggtggtgtattcacaaaggagaatttgaagaaattacttatttcccacagcaacataattttatttggtaaaataagcaaatagattgaaaaaacaattcttgtttctctattaaagatgccactgatactagtagatttttagaaacgcacttgtatatggcataggtttgtcactttggatctttaaactaacatttgtttataacattgactgcatgaggcatgcttgactgaaaacctacttacctttcaccattgggtatatgtacttacttctcttttataaaatattttcaaataactcacctccatctggggtaaggacagctggatttctgaaatccccttcctttcagacaggagaatatgccacagatgaagaagaagatgaggtaggacctgtccttcctggcagcgacatggccattgaagtctttgagctgcctgagaatgaggacatgttttccccatcagacctggacacaagcaagctcagtcacaagttcaaagagctgcaggcagcagaaaatgagaaagtgaggtgggaactagaaaaaacccaactccaacaaaacatagaagagaataaggaaagaatgttgaagttggaaagttactggattgaggcccaaacattatgccacacagtgaatgaacatctcaaagagactcaaagccagtatcaggccttggaaaagaaatacaacaaggcaaagaagttgatcaaggattttcaacaaaagtaagcaacttctaatgactaaagaatagttgtgtttgtctaaagaaggtttatgtccaataattttgtaatatctagtggaatagaaaagatgacttcagagatatctttcctatccaggagcatagttacagcgtaaatacacattaagttttggaagtcacttctattactttttcatgagattatgttttgtatattttatagtttttgactaccaggcctcttggctatttttgataattaattgttgttagtaactgttaaaacatgaagataattttcaaaattaaattgtatatggatgacaaagtgcaacttatacttagaggtaagaattgcatatgttgtgcatacgctaatcctgttattcacagtaagattgtagcataatatattactgccttcttaacaagtgaccacagttcattttcttgatattactgaaaacctccttaggaagttctatatattaccaagttaatgcattggcattcttggatttattcttttaaaaatatttgctgagatcttgttatatgtcaggtcccatcctaggcacatatttatattaattctctcacatatagtgaacaagtatttatttccaagctagcaaaaggaaatcaaattgttcatttcaactcatgtttaaaatgtgccacattgttatggcttagtcatactttaaatttagcataagagtttcttgagtcattcaatgctgtatatagtgaattctatatacctggtttaagccttcataataaaggcttgggttttgctgccagttgtaatgatagggttaaaaacaagtacacagttttatacctctatatgaaaatttttcagcaacgtatcttgagattacttacttgccagtcttgctgctttcctgttaattaatttcactggaatttaccaagtatttgttggctgtagaaatatgtatgaacaggagatgagtcaattcacaaaaaaaaaaaaaaaaaaaaaaaaaa

SEQ ID NO: 2985 - DNA, 1066 bp, Macaca Fascicularis
  misc_feature (1)...(1066): n = A,T,C or G
cagaaaccagagtgtgtttaacttctgtgctattccannnnnnnnnnnnnnnnnnnntttggctgcctgttacaataaccagcaggtgttcaaaggggcagtgaagattnnnnnnnnnnnnnnnnnnnnnnnnnngatggatgccacnnnnnnnnnnnnnnnnnnnnnnnnnnnntatcagtatatgnnnnnnnnnnnnnnnnnnnnnnnnnnnncagacccatcttctagtaaaacaaggcnnnnnnnnnnnnnnnnnnnnnnnnnnnnnnnnnnnnnnnnnnnnctgatctcccgaagccactactcccccatctacctgtcgtttgtcatgctcttggctgccctgagctnnnnnnnnnnnnnnnnnntctcccaggtcacagaagactatgttcagactggagaacactgatcccaaatttgtccgtgggtgaagttcaccatcaaatggatttactttttttctttaaggatggatgttggcttctctttatttttttcctcctactttaatccctaaaagaactgtgtggctggggcctttaggaaagtgagatgcagctgagaagaatctaaacatgaaagcaaagggcgcctcaccccagcaacctgtccttgtgggtgatgatcactgtgcttcttgtgactcatggcagagcactctgtgccacagtttaggtgaaatggctgcgtatgtaattgtcatgagatcctatttagtgtgatcctggctagaatgataattaaaagtatttaatttgaaaaaaaaaaaaaatgttcacaatagtagaaaatgatgtgaaatttctgttgagttcctagttttctcatcattttgttttctttaactgggttgaatggagtagatggaaatatttatggtttaggtgacacttaggtgtttcctaagaatgcaaactgccttttgcacacgaaggctgggaataaaattctgggtgttctcctattatcataagggagttnnnnnnnnagagagaaacagcaggattgcctttgaccccatttcagaagattggccttcagtaaaggtggacatttttga

SEQ ID NO: 2986 - DNA, 708 bp, Macaca Fascicularis
  misc_feature (1)...(708): n = A,T,C or G
actagttgaagccaaggcaaagcaaggtttgtttatcttcctttcctgtcattaaaggtaaaacaggcaatgaactcactcttcaaataccatagttcaagagtagctgttggccctggttccagattaatatagcagcaggcagattgctccttgttnnnnnnnnnnnnctccaaannnnnnnnnnnnnnnnnnnnnnnnnnnnnnnnnnnnngggttcaagtttgcatcaaacatggtattaccaacgctgannnnnnnnnnnnnnnnnnnnnnnnnnnnnnnnnnnnnnnnnnnnnnngcaagggaaaaaaatttaaatgccaacaaatagttgttgttgttgttgttgtttttnnnnnnnnnnnnnnngtttactctcaactctttgtacaaatattattgtcctaannnnnnnnnnnnnnnnnnnnnnnnnnnnnnnnnnnnnnnnnnnnnnnnnnnnnnnnnnnnnnnnnnnnnnnnnnnnnnnnnnnnnnnnnnnnnnnnnnnnnnnnnnngctggctgcctcctctccaactcatnnnnnnnnnnnnnnnacaaagacagaggacttggaccagggcatgccctgttggggatgctnnnnnnnnnnaggacatggcatggaatcaagtgggctgatgtgttgttatttaaacagtaccaaagcgcattcttcaatgtatgtttgcctgcttgaggtgagg

SEQ ID NO: 2987 - DNA, 2058 bp, Macaca Fascicularis
tactggaggaggtccaggacttgggcgtacaggacgccagagctgggtcagcgctccgtccagcgacgcccggagagactcggagatgcaggcagctcggatagccccgagcttggggcggcagctgctgaggttcgggggcggaagctcgcgacccacggcgctcctggggcagccctggcccggccctgcccggcggccctatgccggaggtgccgctcagctggctctggacaagtcagattcccacctctctgacgctctgaacaaggcaaaaccggccaaagcggaatctaagtcctttgctgtggcgatgttcaaaggccagctcaccacagatcaggtgttcccatacccgtccgtgctcaaccaagagcagacagagtttcttaaagagctggtggagcccgtgtcccgtttcttcgaggaagtgaacgatcctgccaagaatgacactctggagatggtggaggagaccactttgcagggcctcaaggagctgggggccttcggtctgcaagtgcccagtgagctgggtggtgtgggcctttgcaacacccagtacgcccgtttggtggagatcgtgggcatgcatgaccttgccgtgggcattaccctgggggcccatcagagcatcggtttcaaaggcatcctactctttggaacgaaggcccagaaagaaaaatacctccccaaactggcatctggggagactttggccgctttctgtctaaccgagccctcaagcgggtcagatgcagcctccatccgaacctctgctgtgcccagcccctgtggaaaatactataccctcaatggaagcaagctttggatcagtaatgggggcctggcagacatcttcacagtctttgccaagacaccagttacagatccagccacgggggcggtgaaggagaagatcacagcctttgtggtggagaggggcttcgggggtgttacccatgggccccctgagaagaagatgggcatcaaggcttcaaacacagcagaggtgctttttgatggagtacgggtgccatcggagaatgtgctgggtgaggttgggagtggcttcaaggtcgccatgcacatcctcaacaatggaaggtttggcatggctgcggccctggcaggtaccatgagaggcatcattactaaggcggtagattatgccactaatcgtatccagtttggggagaaaattcacaactttgggctgatccaggagaagctggcccggatggttatgctgcagtatgtaactgagtccatggcttacatggtgagtgctaacatggaccagggatcaacggacttccagatagaggccgccatcagcaaaatcttcggctcggaggcagcctggaaggtgacagatgaatgcatccaaatcatggggggtatgggcttcatgaaggaacctggagtagagcgtgtgctccgagatcttcgcatcttccgaatctttgaggggacaaatgacatccttcggctgtttgtggctctgcagggctgtatggacaaaggaaaggagctctctgggcttggcagtgctctaaagaatccctttgggaatgctggcctcctgctgggagaggcaggcaaacagctaaggcggcgggcagggctgggcagcggcctgagtctcagtggaattgtccacccggagttgagtcgcagcggtgagctggcagtacaggctctggagcagtttgccactgtggtggaggccaagttgataaaacacaagaaggggattgtcaatgagcagtttctgctgcagcggctggcagacggggccatcgacctctatgccatggtggtggttctctcgagggcttcaagatccctgagtgagggccaccacacggcccagcatgagaaaatgctctgtgacacctggtgtatcgaggctgcagcccggatccgagagggcatggccgccctgcagtctgacccccggcagcatgagctctaccgcaacttcaaaagcatctccaaggccttggtggagcggggtggtgtggtcaccaacaacccacttggcttctgaatact

SEQ ID NO: 2988 - DNA, 717 bp, Macaca Fascicularis
  misc_feature (1)...(717): n = A,T,C or G
tttaacaagattgctaaaaacannntatttagacacttcaatgtaccaatttataattggacattcagtttaaatagtacacagagttgtggcttttattttcaattaattttttccttgtgggcagnnnnnnnnnnnnnnnnngcctgagcagaggcttaagttgtatgtgtgcagagtttgtaaaggaatcagttggaagatgcagaagactgaggtttgctttcaaggtatttttcaggctgtgtgggtaaaatttgcctcaaatttctatcaaacaggaatgtaaaatagataaaatcctatgtatttgaattgtcagagctagggagtgcaaatgtcttggcaatgtattnnnnnnnnnnnnnnnnnnnnnnnnnnnnnccttttacagttacgtagtaagatgcaattggtacccacaaattactgttttctaaacatttgaagtcttacaattagctttaaaataatgatgattttataaattgatgatcacaataattttggtattactttcctccttttcccacttagcaatatagccaaatgtattcaacataaaaattcatagggtctaaagttcatagttgggccaaatttttttaaggcaccttagtttttaccataatggtcatctataaaactcttctgttataaaacatacccttatttcttttgtttatagtatctannnggaatnnnnnnnaaaagtta

SEQ ID NO: 2989 - DNA, 668 bp, Macaca Fascicularis
  misc_feature (1)...(668): n = A,T,C or G
catgcannnnacanngnncacagaccccacgcancctacacagggcaggcacccacgcagggcacagaccccacacaccccacacagggcaggcacccacacagggcacagaccccacgcaccccacacagggcaggcacccacacagggcacagaccccacgcaccccacacagggcacagaccctaagcaccccacgcagggcacggatcccacacactcctcgcagggcaaagacctcacgcagggcacagactctaagaaccccatgcaggtcacggatcccacgcagggcagggccagcccaaggccaggcccctcccctgtagaactcctaccaggcaggaccagagccacagtcacttccacaccatctccttcccgagaaacctcagcagactcttcctcctttcctggctacacgggggcccctgccgcagcctgaccctctgctacctcctgagcctcaggaaagcaaggtcggcctctgaatacagaggacttcggtcctgccagagggtgcgtggccatgggtgctggcatgcaagcagcctgcggggaggcagagtggggctgcagcaaaggccgtggtggtcgtggtgagggtggtggccaggtcttgttgccatggtgaggattctggggtcaccctaagagccaccacattc

SEQ ID NO: 2990 - DNA, 470 bp, Macaca Fascicularis
tgcagggagctgaaggcccctgggacatgaccaactcagcattccactggaggctatatgatgaaagagcaaactgtttatcatgaatacaggatgtgagcagactcacaactgctcctgccaccagaaggtttgcagagggcagttgcttcctggcgccaagctctttgaagttatctactgggacatctagagaatgtagtcttgtaagcctactctggaccaaccagctgacctcttctcccaccccctttctcactatctcttttgactaataaatatggagggctgtgtaaagttcagggcccttgtccactagaggcaaggtgccccctgaccccttcttccaaatatactattttgtctcttgtcttttattcccacgttcacccctctttgttcagtccaccagggatcatggcaggttacatagtggcaccccgaacagcgagataatcgagtgctcaaca

SEQ ID NO: 2991 - DNA, 742 bp, Macaca Fascicularis
  misc_feature (1)...(742): n = A,T,C or G
caaaacnngcatgctgtgggatgctacaaatggcaaatgtgnnnnnnnnnnnnnnnnnnnnnnnnnnnnnnnnnnnnnnnnnnnnnnnnattacactggaaagcttattgcaannnnnnnnnnnnnnngaacagcaagaattttcagtgctgccacaagaaaatgnnnnnnnnnnnnnnnnnnnnnnnnnnnnnnnnnnnnnaagatttctttcaaccctcaagggaaccgtcttctaactggcannnnnnnnnnnnnnnnnnnnntctgggatgctcagactggccannnnnnnnnnnnnnnnnnnnnnnnnnnnnnnnnnnnnnnnnnnnnnnnnnnnaactataaaggcaacatagtcattacaggcagcaaggataatacctgtaggatatggcgttgactgaagnnnnnnnnnnnnnnnnnnnnnnnnnnnnnnnnnnnnnnnnnnnnnnnnnnnnnnnnnnncagctgctcctttaatatttcttacgctttctctttttctacaagtcaactatttatacaactgtcctttnnnnnnnnnnnnnnnnnnnnnnnnnnnnnaaannnnnnnnactccaatattattatttgatggagatggcaggacacagcgtaatgtttggctaatgccaccagttatttccattgtgtttgttttttaaaagcattatgatactgaaaaaggaaaccagagtaacttaannnnnnnnnnnnnnngattttactttgaannnnt

SEQ ID NO: 2992 - DNA, 597 bp, Macaca Fascicularis
atgcagtcgggcactcgctggagagttctgggcctctgcctcttatcaattggcgtttgggggcaagatggtaatgaagaaatgggtagtattacacagacaccatatcaagtctccatctctggaaccacagtaatactgacatgctctcagcatcttggatctgaagcacaatggcaacacaatggtaaaaacaaaggagattctggggatcggctgtttctgccggaattttcagaaatggagcaaagtggttattatgtctgctaccccagaggaagcaatccagaggacgcgagccatcatctctacctgaaggcaagagtgtgtgagaactgcatggagatggatgtgatggcggtggccacaattgtcatagtggacatctgcatcactctgggcttgctgctgctggtttactactggagcaagaatagaaaggccaaggccaagcctgtgacacgaggagcaggtgctggcggcaggcaaaggggacaaaacaaggagaggccaccacctgttcccaacccagactatgagcccatccggaaaggccagcaggatctgtattctggcctgaatcagagacgcatctga

SEQ ID NO: 2993 - DNA, 740 bp, Macaca Fascicularis
  misc_feature (1)...(740): n = A,T,C or G
gggcatcacacaccccnnnannntgcaggctgnnngcgtgggaggcgaagtcccgggacagcccagaggggtgctacagagaggnnnnnnnnnnnnnnnagggcaggagccccagcttagccctaagcgccagcgtgagggccagggcctgccacgaagcccgccccgctggccaccagctgcctgcccccagagccactgcagcaggagtcgggccctgcctccctcccagcagggaaaccccgcccgctgccaggccatcctctctgccagaggctttcatgagccccaaggctggggccacagctcctactcctgcccagcagccctgagcccagctgcaggaaggagatcccagaagcctttgctcctggggctcctccaggcactctgccctgccccgacaccagaaccctggtgctggtgggctactagcgtctgcagcctgagcaggcgctggctcagggttcatctttctgccttgtccactgggggaccagccctacagaccactctgacaaatctttagcccacaccctgccagccccacagattttatttttgcacataagccatnnnnnnnnnnnnnnnnnnnnnnnnnnnnnnnnnnnnnncctggagcctgtgaagaccctggaaacctcatgaggctgtggccgacccctgccccttacccccgcacagaccaggccttaaatgtccgtccaggccctgtataccttaccccaaagacagactct

SEQ ID NO: 2994 - DNA, 731 bp, Macaca Fascicularis
  misc_feature (1)...(731): n = A,T,C or G
aggagacagggggcacgtgcattgtcacgagaaaacntnggctcccactggggctcagcccagcctcctatctttccttcttctgtggacttcagacagccagtgtctggggactctgccactctaccgccagccctaccctccagcccccaggtgaggcttccagctgggacctgcccaggcaggctgagcctgggtgtggtgggtggggtgatggctctggggaggggctgccatcctacaagccacaccccctcctctgagctctgaatatgggactcagtgccgggagccggaagacaaggtgtttctgccaagcggggacctccatccagagaaaaggaacgaaggtgcagggtgggccaagaggcaagtgaaggttggcctaagtctgggccggaaactcagaggatgtttctcctctgctgggagctatagtttcttatcaaaatagttattgtcccaccatccccttccttggctcttcaagtgggctgaagcccttggaaagtgacataggaagtccccagatcttgcccgtctcactccagaggccagtggtcacagacagctgggaatggcagccacagagggtcccgtctgggagaaacagcttcattcacctcaacctcagggccctgggccatcactgcagtggccctgggagttgaggaagaagctggctagaggagggggctcccatctaccttttatttaagccagtattcttt

SEQ ID NO: 2995 - DNA, 731 bp, Macaca Fascicularis
  misc_feature (1)...(731): n = A,T,C or G
ccagccctcctcgacagaatcttccatggaggagatnnnnnnnnnnctgatggcctatcaccaggaggccagcaagcgcatctccagccacatccctttnnnnnnnnnnnnnnncatgctccagacnnnnnnnnnnnnnnnncagaaggccatgctgcagctcctgcaggacaaggacacctatnnnnnnnnnnnnnnnnnnnnnnnnnnnnnnnnnnnnnnnnnnnnnnnnnnnnnnnnnnnnnnnnnnnnnnnnnnnnnnnnnnnnnnnnngctnnnnnnnnnnnnnnnnnnnnnnnnnnctgtccagccctgtagaggtacactcacaccgtctgcccctgttcccaggtaaccactgaacagactacttgagtgctcagtagtcagacttgatagtcacagtctctgcttatccattagcccatggcaatttagcaagaagctgtgagagcagtttggttnnnnnnnnnaagacaaagccccaccctcagatgcacatgagctggtggggatgnnnnnnnnnnnnnnnnnnnnnnnnnnnnnnnnnnnnnnnnnnnnnnnnnnnnnnnnnnnnnnnncttccccttctctgtattcttaggagctgacatgggctgagcatcacagaagcttatttcctggtgtttgtaatgtccctacaccaatccagtgttttaggagcatgagtgccatgtgtgtcagtcctgtcagagccctgtctcctccgt

SEQ ID NO: 2996 - DNA, 2178 bp, Macaca Fascicularis
atcagccaggcggagcccgtggaggcggttgctgacctgaggagggtccgctgcggccagtattttgtatcatgacttctcaggagaagacagaagagcatccttttgcagatatatttgatgaagatgaaactgaaaggaattttttgttgtccaaacctgtttgctttgttgtatttgggaaaccaggtgttgggaaaacaacattagcccattacataacacaggcatggaaatgtattcgtgttgaagctttgccagttttggaagaacagattgttgctgaaactgaatcaggagttatgttgcaatcaatgttgatcagcggtcaaagcattccagatgaacttgtcataaagctaatgttggagaagctcaactccccagaagtctgtcactttggttatattatcactgaaataccatcactttcacaggatgccatgactaccttacagcaaatagaattaattaaaaacttaaatttgaaacctgatattataatcaatataaagtgtcctgactatgatttgtgccagagaatttctgggcaaagacagcacaataatacgggatacatatacagtagagaccagtgggatcctgaagtcattgagaatcagaggaaaaagaagaaagaaacccaaaaggacagaaaaggagaagaggaggaagaggaggaagagcaagaagaagaagaggcatttattgccgaaatgcagatggtggctgaaattcttcatcatctagttcagaggcctgaagattatttggaaaacgttgaaaacattgttaagctttataaggaaacaattctccaaactttagaagaagtaatggctgaacacaatccccagtatctcattgagctaaatggaaatagaccaccagaggagctctttatgattgttatgagtcgacttaaatatctgaacctaaaaagagcagctgttataaccaaacttcagggtgcagaggaagaaattaatgacacaatggaaaatgatgagctatttcgtactcttgcatcttataaacttattgcagcaagatacagatggcagagaagtaaatggggacgtacatgtcctgtgaatttaaaagatggtaacatttattcaggattaccggattattctgtgagttttctaggtaaaatctactgtctttcatcagaagaagcattaaaaccatttgtattgaatccacgtccctatctgcttccacctatgccagcaccaccatgtaaagtattcatatttggacctcaatattcagggaaaacaacactttgcaatatgcttgcagaaaattacaaaggaaaggtagtcgactatgcccaacttattcagccacgttttgataaagcccgtgaaacattagtagaaaataccatagctgaggccactgcagcagcaattaaagttgtgaaagaaaagcttctcatggaactgcaagcgagaaaacaagctgaaacaactttaagagaatttcaaaggcaatatgaaaaaatggagtttggagtattcccagtggaggcaacacactcgtcaattgatgaagaagggtacattcaaggctcccagagagacagaggcagctctttagtggacactgaagaagccaaaacaaagtcagaaaatgtcctccatgatcaagctgctaaagttgataaagatgatggaaaagaatctggtgaaacatccacatttaaaaggcattctcaagatgctggtcaagatgtaaagttgtattcagatacagccccaacagaagactcgatagaagaggtaactgcagatcatccacaggttgtgtccatgattgaggagactataaaaatgtcacaggatatgaactttgaacagccatatgaaaaatatgctgaaatcttacaggaagtccttggagaggtaatggaagaaaacaaggataggtttcctggtgccccaaaatatggaggctggattgtggacaactgccctattgtaaaagaattgtggatgatcttaatcaagaaaggagttatacctgatttggtcatctatttatcagatacagaaaacaatggaaaatatttatttaatagaatatatttacagaataaatctgaaattgactctaagattttagaaagattattagaagaactacaaaagaaaaaaaaaaaaaaaaaaa

SEQ ID NO: 2997 - DNA, 743 bp, Macaca Fascicularis
  misc_feature (1)...(743): n = A,T,C or G
acagttgactggtttagtggatgctgaaggccttcaggaaatggtaccccaaaatatgnnnnnnnnnnnnnnnnnnnnnnnnactgagagcacttgggaaatagcacaagcagggaggggcttttnnctgagcctccttcatctgcccaaagacaaatcctcaaaagaaattcgatcatcatgaatcacatccccaagaatctcaccaaccagggaagagtaactgagatcacagggaaggagattggaggtgacaccagcacagacagactctcacctcttctcctgaggtcggctccagataacatttattactcacaagacctttctcctctgtttttttttttttgnnnnnnnnnnnnnnnnnnnnnnnnnnnnnnnnnnnnnnnnnnnnnnnnnnnnnnnnnnnnnnnnnnnnnnnnnnnnnnnnnnnnnnnnnnnnnnnnnnnnnnnnnnnnnnnnnnnnnnnnnnnnnnnnnnnnnnnnnnnnnnnnnnnnnnnnnnnnnnnnnnnnnnnnnnnnnnnnnnnnnnnnnnnnnnnnnnnnnnnnnnnnnnnnnnnnnnnnnnnnnnnnnnnnnnnnnnnnnnnnnnnnnnnnnnnnngtgacaagagtgagccaccgcgcccggccacttgcaaaaccttttatctgaaaaccagccaagctttattcacgacacacttcttccctttcctctcccacttctgtggccaactccctgcagaacgcccaaacccccgt

SEQ ID NO: 2998 - DNA, 624 bp, Macaca Fascicularis
  misc_feature (1)...(624): n = A,T,C or G
gcgccccggcnnnnnnnnnnnnnnnccggtggcccaagtgcagggttccaagggggcggggcaggtgctccccaaaggagccaagaatgcagggagggcggctgctgtgggctgggaatcgaagttagaggtgacttctgaaggcccccccgagccggcagtgcccccccacccccaccggcagctcnnnnnnnnnnnnnnnttgttcgctttcctggttacgtgccctgcagtcactgagctctcggtctgacgcgtgtggtttgtttataatgcagggggccctacctggggaattcagctggtttaaatatatgtagcccgctcccagaatgtcttattttgtaacgactgaactacacttagtaatagttacacacgtatatggttaatatatatggaaattcagtatattttgtagttaacgtattctaaagtaacagatgtttctagccaatcgtagtcacttcagctaaagaaatgttccttttgtggtaccacagtcctcggcctaacgaaggacgtgaaccctgtaacaggagagctctgaaacgcggtcacctttgtttagcggaagggagagcgggttcccggcatgaggtgcctcggaattaataaagaatt

SEQ ID NO: 2999 - DNA, 1909 bp, Macaca Fascicularis
gggataaaaaggagtttaccccctccccgaatcctccagtcccactttccatctataacccagcatgaacaatgttttttcattccacatagttttcattcatagatatcgttgtcagcagtcaaacaagacatactatacttactgcccaatacttcgaatttttcgtgtaatataacttgaaaatatttccatcttgatctctttaatcctataaatgaacacgattgtagtatgtggatatatcaaaacttcctttaaaataatctagttgtattttaatattgttcctgggttatctgcgtatgtgtatgctattgtgaataatactgaaatgaacatccgtatctatgacctctctctgcactccaggctcaaatatgcaactccctatttgacagttctgcttgaaaacttgctgggcatcccagaggtaacgtagatctaatggaagatttgattttgtcctccaagccagttcttcccttgactttctacatttcaccaaatgataccccaaccactcacttattctagcccaagatctaggagttattcttaggttttccttccctgctccacatggatccatcagcaggtcttgcccttttttcctcccaaatatatctcaagtccatgctcttccatctgtccttactgccactatccaagctctgggaccatccatacatggacaactgcaagctacatgtcctaatgacgtattagcagtagagtggctaggttaaaagatttgtgtgttttattttgatagactttgctacattactctcaaagaggctctctcagtgtatctgcttattatatgagactttgtgtttctgtgctctgtcaccaccactgcatatcagggtcactcttagcccatagccttgtgagaattagaagtcacttcctctggtgaggcagctccacagcacagacttaacaagtggaacattagcaggaatttagttcccactcattctcttacctaggtgtccttctgcagtcaacactctacacaattgtacatgactacaatgctgtgcataaataattttttagactctttataaatctatatttaaaaaatggcatcttattttaattatgagtgatgcaggacatttatatttatttttctttgaattgactatttatagactttccttacttttatggtttcttacagatttgtattttcaggagattagccttatgtctattatatattttaacatttaaaaaacttttcttgtaccttaaatttgtttacagtatttttttatagaaaactttaaatttttaagtcaaattgattagtcgttttctttcttacaaactagggctatttcctctgctttcctctgctatttttcttgtgttttgactatctgatctctgtaatttattctggcttaagatgaatagatttaataatataaaacttttaaacttttacatggccaaaaaaattaacatcagaaagttgaaaaggaaaataataaagttgaaagaaatatttaattatatataaaaaataatagttaatatcattaatgtagtaagacctcttaaaagtcagtaacaaaaagataaacaaccacataggaaaacaagtaaataacatgaacagacattttctaaaatatctaatggttacaattgtgaactcactatggaccaggaactactctaagtgctttacttgaattaactttttaatatttatgacatttatccggggtaactaatattaatatccccattttataaatgaggaaaaccaaagtacaagagctaagtaacttgcccaggtcacttgaccaaagaagaacataagtgatcacttggtatatatatgaattaaggtttaagcaattaaatggaaaaaaaaaaaaaaaaa

SEQ ID NO: 3000 - DNA, 2224 bp, Macaca Fascicularis
ctgtaaagctaaaatatagaaatgctcaagaactgcgaatggagaaagtacagttagagtttgagaaccatgagatggagaagaaactgcaagaattccgatccacaagaagcaaagaaaaggaagaaagagagtcaagcgaatattactggaaatctggaaaagtgggcaaattgggtaatcaatcatatatgatgtcaaaaaataaaggaaatgttattaagttttctgctggaaaagtgaaattaaaattactgaaggaacagattcaagagccagtgaaaccaagagttaattataaaatggcaaattcttcagaatgtgaaaaacccaagataaatgggaaagtttgtggacagtgtgaaaacaaagctgctctactagtatgccttgaatgtggagaagattattgttcaggatgctttgctaaaattcaccagaaaggggcactaaagctccacagaacaactcttttgcaggcaaaatctcaaatagtattcagtgtattggatgttgcccatcagtttataaaggatgttaatccagatgaacccaaagaggagaataattctacaaaggaaaccagtaaaattcagcataaacccaaatctttatttctccagaggagcagctctgaggtagaaattacaacgacaaaaagagcagaatgtacaaaaccaagagagagtctattgtgtgaagggtcattcaatgaagaagcttctgcacagtcctttcaggaagtgttaagtcaatggagaaccagaaatcatgatgacaagaaacagaatttacacgcagcagaaaaagactcactggaagaatgtgaagtgcagactaatctgaaaatttggagagaaccacttaatattgaaattaaagaagatattctatcctatatggaaaaattatggcttaaaaaacccaggagaacaccacaagaacaactttttaatctgctaccagatacattcccacatccatgtgaaaccactggtgatgtacagtgttctcaaaatgaaaatgatgaagatagtgaaggtgaggagaccaaagtacaacacacagctcttttattgccagtagaaacattaaacatagggagacctgaaccatctctaaaaatagttgaactggatgatacttatgaagaggaatttgaagaaccagaaaatattgtgccttacaaagttgaattagctgatgcagacaatcaaccaagttgtgctttgcatgattatcagaagaatagctttctatatgaaaatgacatccatcaacatcatgttttccataagggaaagagacacttcttaaatctttgtctgagaaacagctctacttattacaaagataattcgaaagcagaaacttcaaacacagattttgacaacatcgtggatcctgatgtgtattctcctgacattgaaaaaattggggaaagcacctcctttgaaagaaatttaaaagagaaaagtataggtttagaaaataatcaaaagtctgatgattcctgcatatcacttgaaagcaaggatactttgctaagtatagatttagaaaaacctcccattgaggagaaattatctcaagacatcaaagaatccttggaattcagcaatctgcataagacgccaagctttgaagattcaaaaactacaaagtcatcactgttgttacaagaaatagcctgcagaaggaagcctgtaacaaaacaatatcaaggacttgagagattctttatttttgatacaaatgaaagactcaacttacttccttctcatcatttagaatgcaacagttccagtactaggattacacttgcagaagacagagaatggattccagaccatagcttaagtgaacatgctgataatgcaattgtcttgggtgttctgcagggtgctcagagtccatcatcaagtagaaaacagcaaaagatagattggaaatcacagagaccttcaacatcaaattttccactttccaactctgttaaagaaagctccagctgcctttcatcctctccttgtcgatcaagaagtgcagctgctcaatcattgtctagagctgcttctgaaatttcagaaattgaatatattgatattactgaccagaatgagctttccttatatgacactactgatcaatgtaccttagacagtttggaaaaagaattacaagtgctgacaactcttaaaaaaaaaaaaaaaaaaaaaaaaaa

SEQ ID NO: 3001 - DNA, 533 bp, Macaca Fascicularis
  misc_feature (1)...(533): n = A,T,C or G
ctggggaagccctccttgctacagtacaagtacacaagtcattgtacctcaattgtgaccttcagcagattttatgaactataagatgcagtctcagaggnnnnnnnnnnnnngnnnnnnnnnnnnnnctttctcttacttgctatactatcagccnnnnnnnntccaccttcaagaatgattttgccaagaataattatatcaaaaatagtagttgaaatggtaacatcaaaattattttattctttcttcttcatgtattcacatttttcaatggtttcatttaattnnnnnnnnnttatgttaaacatttttgggcttaatgtctcctacaatccaaaatgtgcatcacaggnnnnnnnnnnnnnnnngaaaatcccatgtttgctttgttttattttaatgtcagaaggcggtttgcnnnnnnnnnnnnnnnnnnttttttatgaaactcattaagatatgacgaaatcctgcctcattaattcaagcagaannnnnnnnnncggggaatcnnnnnnnnnnnnnnaatg

SEQ ID NO: 3002 - DNA, 759 bp, Macaca Fascicularis
  misc_feature (1)...(759): n = A,T,C or G
taatcagtcaggatcttgantttgacatcnctgatttggtacgctgcatgagactacaaagacacggaatggttcagacggaggatcaatatattttctgctatcnnnnnnnnnnnnnnntcctgacacgtcttcaagcagaagaagagcaaaaacagcagcctcagcttctaaagtgacatgaaaagaacctctggatgcatttccatttctctccttaacctccagcagactcctgctctctatccaaaataaagatnnnnnnnnnnnnnnnnnnnnnnnnnnnnnnnnnnnnnnnnnnnnnnnnnnnnnnnnnnnnnnnnnnnnaaataatattgaaatgctgtattttttacagctactttaacctatgatgattatttacaaaattttaacactaaccaaacaatgcagatcttagggatgattaaaggcagcatttgatgatagcagacattgttacaaggacatgctgagtctatttttaatgcaccaatcttgtttatagcaaaaatgttttccagtattttaataaagtagttattttataggggatacttgaaaccagtatttaagctttaaatgacaataatattggcatagaaaaagtagcaaatgtttactgtatcaatttctaatgtttactatatagaatttcctgtaatatatttatatactttttcatgaaaatggagttatcagttatctgttactgtatcatctgtttgtaatgcattatctcactttgtaaaaaaaaca

SEQ ID NO: 3003 - DNA, 757 bp, Macaca Fascicularis
  misc_feature (1)...(757): n = A,T,C or G
tggacaagaaacaagataatcagttactgagtaaagaaagacaagaatgatgtcccacacttcccagctctctagtgttatgctgtacaattaaaatatccctgtcccatcatctgctattatttattgtgtgtaattcatgtaatctgnnnnnnnnnnnnnnnnnnnnnnnnnnnnnnnnnnnnnnnnnnnnnnnnnnnnnnnnnnnagaatccacaccacctttcccatcagttctcnnnnnnnnnnnnnnnnnnnnnnnnnnnnnnnnnnnnntannnnnnnnnnnnnnnnnnnnntcttacannnnnnnnnnnctaataannnnnnnnnnnnnnnnnnnnnnaagaggcccagtgcagagggcagcacccccatcatttttttaatttctcccttaggaattttgcctttctttcnnnnnnnnnnnnnnnnnnnnnnctccggctgggacacaaacctttgaaaggaagtaattgcnnnnnnnnnnnnnnnnnnnnnnnnnnnctttcacttgaatttgcatttnnnnnnnnnnnnnnnagatctttacacatgttttctattttgaaaaatgccagaaggcttcattgacattgtagtcggtgttaataaactnnnnnnnnnnnnnnnnnnnnnnnnnnnnnnnnnnnnnngcaaatgaaatgaatacgtnnnnnnnnnnnnnnnnnnnnnnnnnnnnnnnnnnnnnnnnnnntgattgtctcttccctaattgtgctgtaataacctgtgt

SEQ ID NO: 3004 - DNA, 682 bp, Macaca Fascicularis
  misc_feature (1)...(682): n = A,T,C or G
ggaatcnnnnnnnnnnntgtatgcaaataccattttcttcataaattcattctctcttcaggggaaaattttgggatgggggactgaggaggacctgtgaagcacgtagttatctagatatgggtaatttcactttggctaaactcacattcaaacttcatcccgtctcttaattttttaacactaaattcaagtcatttgtttaaagtctctaaaaaagaagattgcagtcatccactcatgtgcacggggtctgatcgcaaatacactaaatgtggagtgtaggaaccaaaatgaaacatgctgtatggaaactactttcacttacggttcattggtttttgtaccaatattttttaatgcacttcagtgcaagtcttgtcagttaaccctactttatgagtaagctaaataacccaaattacatttctttaaacccgttttactgctatggcactttgataaaatggtcagtaaccannnnnnnnnnnnnnnnnnnnnnnnnnnnnnnnnnnnnngcatctgttctacatgtggatatctatgaatggtaatgttttccttcatgtaagtgcctattcagagtttcaaaattttaaaatgccaaatattttcatggtcatttgcacgtagtaatgtagaaaatattcaaagagattttgaaaaccnnnttgtatttaac

SEQ ID NO: 3005 - DNA, 728 bp, Macaca Fascicularis
  misc_feature (1)...(728): n = A,T,C or G
gcgtttggaccacatttgtgtgtttgctcttagagnnnnnnnnnnnnnnnnntacccgaagccttgcttccagaaagcgcagtagggttagtaggtagggttagtagtgcatctgtgctgcttccacccggtgcttcctattcccaaatcacaaggacctgaaagatggtccctgctttctctctctttctctctnnnnnnnnnnnnnnnnnnnnnnnnnnnnnnnnnnntgccaagaaaatnnnannnnnaacagtcctcatgtgcccagagatgtttatagaactgnnnnnnnnnnnnnnatcccctgccccctcccaggctgaagatctgttctttttaagttgattcgggagtggcattcttttcnnnnnnnnnnnnnnnnnncatcgtgaagagctcaaagcacatgacggcacaaatgcttacagggtttcnnnnnnnnnnnnnnnnnnnnnctccccttgtaagggaattctggggcagctatggtttgaggatgcagttggcatcgtgtctctacttttagtacctnnnnnnnnnnnnnnnnnnnnnnnntcatttcccgtttcttagtactaatgattctttgattttccctctattacttatgtcttaattcactttccttcctaaatttgttatttgcatatcaaattctgtaaatgttttgtaaacatattacctcacttggtaatacaatactgatagtctttaaaagatttttt

SEQ ID NO: 3006 - DNA, 751 bp, Macaca Fascicularis
  misc_feature (1)...(751): n = A,T,C or G
ggagacaggtgaccctgggtgctgnnnnngccccgtgtgttcccctgggtnnnntcagtgttgtnnaaggcaggtggagggtgctgtctagtacctcccatgtgagggccacttcccttctcatggggtcagctgagcatcagctcagccctgccatgtccccactcgccctcctcgcctcctgtcccgccccaggtttctagccatgcccaaggcatcactctggcccattggcagatgagaggcctgaaaccttcctggctacaggccatcactttctcctccccgtggcctgcgttgtcatgttaccatgaggttccaagaggtttggagttcacagacctcagacacagttgagcccgacaaccattggggtggggctgtgtcagcctccggagtggcctgccacctcctacatcagggcctggcccacccgaggtgcctagggcaggcaggcaccatcatttgctgccattggcttctcagatgtatttcacggactaaagtgggtttaaaaagatctaagatggcccagtgcggtggctcccgcctgtaatcccagcactttgggaggccaaggtgggcggatcaccagaggtcgggagttcgagnnnnnnnnnnnnnnnnnnnnnnnnnnnnnnnnnnnnnnnnnnnnnnnnnnnnnnnnnnncagctactcaggaggctgaggcagaatcaaacctgggaggcagaggttgcagtgagccaagattgcgccattgcactccag

SEQ ID NO: 3007 - DNA, 1739 bp, Macaca Fascicularis
  misc_feature (1)...(1739): n = A,T,C or G
cggattggcccgattgatcgaagacaatgagtacacagcaagacaaggtgcaaannnntcaagtggacggcccccgaggcagccctgtatgggaggttcacaatcaagtctgacgtgtggtcttttggaatcttactcacagagctggtcaccaaaggaagagtgccatacccaggcatgaacaaccgggnnnnnnnnnnnnnnnnggagcgaggctacaggatgccctgcccgcaggactgccccatctctctgcatgagctcatgatccactgctggaaaaaggaccctgaagaacgccctacttttgagtacttgcagagcttcctggaagactactttaccgccacagagccccagtaccaacnnggtgaaaacctgtaaggcccgggtctgcggagagaggccttgtcccagaggctgccccacccctccccattagctttcaattccgtagccggctgctccccagcagcagaaccgcccaggatcagattgcatgtgactctgaagctgacgaacttccatggccctcattaatgacacttgtccccaaatccgaacctcctctgtgaagcattcgagacagaaccttgttatttctcagactttggaaaatgcattgtatcgatgttatgtaaaaggccaaacctctgttcagtgtaaatagttactccagtgccaacaatcctagtgctttccttttttaaaaatgcaaatcctatgtgattttaactctgtcttcacctgattcaactaaaaaaaaaaaaagtattattttccaaaagtggcctctttgtctaaaacaataaaattttttttcatgttttaacaaaaaccaatcaggacaggtgtttgtttttgtttgcttttttataaatatgaatatatatataatatatatgtccctgtacatatacaatgtgggtgctaatgtggagactgtggccagcctgggccaccaagctatgggacccagagggaggattttactgtaagtcagcatcaaagcactggtgttattctgaaaacaccagtggcctcatttttggcttttgcaaagcatgaattttttcatttggattgcactttcctggttcatgactgtacctgtagatggctgttactttgactcttttcaggaaccgcccccccaggctgaatttacaagttctgttagcagtatttgcttcaacttactgccgtttgttctcaaaacttaaaaataagcaagcaaatggctaccgagagaactggaagatggataccacacaaacttcttgtataaaacatatgagtgctgaaatgtctcagacatttttaatttaataaacctgtaaccacatttaaatgatctaaaacccatagcattgtagtcatggcaacctgctaaactttctcatgcaactaaaatttctgggggaaatgagggtgggggttgcacatttcccattgtaaaataagtgttttaaatgtcctgtactgctaatgaatgactttctatatgtccaggagttctccagtggaataacgatgcactactttacatttcatggggatgcacaaaaacaaaagagtattacatttttagttgctgtttgtaccaccttaaattacatatgtttaacaccaacaaatcaaaaatcctatttctattgagtttttaatactgactagcagctcttaattccttttttgttatgattcatttgtgagtttacatttttaaattgtttaac

SEQ ID NO: 3008 - DNA, 759 bp, Macaca Fascicularis
  misc_feature (1)...(759): n = A,T,C or G
aacaggagatgggatacaagaagtttgatggctttgccctgggctgggaatacctcacccacgcccagttccagaaaggcctccagctgagcagacggccccgatcccgccagaacggcctnntgcttccagccaaagaacaccgccaacacacacacctccaacctgggacatccacgctgggcctcggacggagggacccgcagaatgtggattctgagggtggttgggaggcctcggtagccgcgcagaacagggtatctgcccaagcgtgtctgacgtggggtggggctggcatcatcccagggaggttctagggggggccccgccttctgggggcgggggtggcttcatcgtccctggtttcctggagctcacgtcctttgacagcgtgtgctggtcccatctcacaccagctcactgaggcagaggagttgctcagaggctcacacgggcactcccatcagttcgtgtgagcagccgcccagccccaggcctgcgctcagcctggtccagcataaaggcgtttccatctgcaaggatgcacggtgccctccccaactgggaatcagctggaagctgggtctcttcgtggctggttttgtttgaagttcccaggaatgtttcaggttttccagcgatgtgtttagggatctcggggggggaaaggaagaggaggggcttgttcgcccatctgtttattctttgggctccgggaacaggggactactttggggctttctccagacttttgtatgt

SEQ ID NO: 3009 - DNA, 769 bp, Macaca Fascicularis
  misc_feature (1)...(769): n = A,T,C or G
caggccgacggcaggaggacagtcgggtgatggtgtattctgcnnngcgcatcccacccgaggactgagggaacctaggggggacccctgggcctggggtgccctcctgatgtcctcgccctgtatttctccatctccagttctggacagtgcaggttgccaagaaaagggacctagtnnnnnnnnnnnnnnngagatgaaattaatggaggctcaagggtagatgagctctgagtttctcagcactccctccccagactggacatcttggtctttttctcaggcctgaggggaaccatttttggtgtgatcaaataccctaaactgcctttttctcttttttgaggtgggtgaagggaggaggtatgttggaactcttctaacctccttgagctatattttctctcctcgagttgctcctcatggctgggctcatttctgtacctttctccttggtcccagaccttgagggaaaggaaggaagtgcatgtttgggaactggcattactggaactaatggttttaacctccttaaccaccagcatccctcctctccccaaagtgaagtggagggtgctgtggtgagctgaccgctccagagctgcagtgccgctggaggagtcagactaccatgacatcgtagggaaggagggcagatttttttgtagtttttaattggggtgtgggaggggtggggaggttttctataaactgtatcattttctgctgagggtggagtgtcccatccttttaatcaaggtgattgtga

SEQ ID NO: 3010 - DNA, 742 bp, Macaca Fascicularis
  misc_feature (1)...(742): n = A,T,C or G
gggcacagttaccatggagccctcctgngtcattctacaaatgtgctgagtgccagctgaaagccccacaggagatggagtgccttggccaagcttaaagagaagattttctcagggtatttattagtgtgtccagcagggtcaggaagcagggatggaaagatgcattcagactgttaatttattaacaaggcaaatggttttgtgtttcttgatgacaagctattaagtttgggacttattttcccatttgagaagttataatatatatttaagataagtttcctgcttaagttgtgcctttcagcttcaatgagtttaaggagcactaagggtaatgataccaatgagggttggtttattatcaaacctgaatagctgtggtttctccggtaaatgttttcttctactgaacatggagccattattaagagttgtatgttttttattatgtacatttgtatatttttttgcttgtttgatgttctatttttctaatagttttcttagagtttcttaaagttgtgatactagatttagactccgatgctaactgcaaatcaggttggtctctgctgggtctctcctgcttttattttcctttaaggacaagtgtagttgtcgtccaccacctttcaaaacatgtgaaactgccctgcctcccctttttgctaacaaccctgtgtacatgacaacttcttttatgttgtaaaatcaaactattttgtggtacattatctcg

SEQ ID NO: 3011 - DNA, 1677 bp, Macaca Fascicularis
tagacctgaaaatcaagacccagcaaaagtgtgaggcttgccaaagacctgaactttggagagagaaatgatggagaaggcatggtctctgccctggatgagaggtaaatatgtatgagggtaacaactggggcctggtgcaagtatacttcatcaaggttaaccataggcttcctttcttccttctgcaaacctttatcaaggagaagagttgcttgtgcccttgtcacctcagcatttccaagagcatggaatttggagtcaacagatctgggtttgagtcccagatctactttgagttgatgtaatcttgcaaatcacttcatttttctgagccttggtttcctcagctgtaacactggaacaggccaaatactgcccaaccaacctacctccatgagcccttgtgtgactcaactgagttaatgggtgtgaaaatgtaagtaagagcctctgcacgtgttagttattattccagttatcatccccctaaggagcactggttgaaatctctggaatatggatccacagatagctttaactctcttcctcttcctgcctctttcaaatggacataaaaaccaattggtcatctgcctataatctcaacagctttcccagagagcccatgcatagaaagaggaagaattcaaccattgtaaattaatgtcattccatacattgattgagcacctaccacatgccagccattgtgtgagggatcagagttggataagacatatttcttggccaccttgagaagctcaccatttagtaggagaaacagacatgggcataaataattataatgtactgtagacaaatgcaattgccataggaaagatacaaatcaagtgttttgggagccagaggatagaatgattcattccccaaaaggagattggaaaaaggttcatcaatgaagtggtattgaaggatgggcagggcttagctctgtcaggaagaatgagacagggcattccagacagagagaccagcataggcaaatgtatgaaatctggaaaggaatggtgatctaaagggtagaataaaatcaaatgaggtatggggtgtgagcatgaaccaaagaaaaatcactgcaccccaggcataaatgttgctgtttcactgttctctttgctggctaaagtcatcttggcctctgttcctcagttagagagaatcccacattggcccttcctccagcaaagccaaacccaagccccagccagcagaggtgaaacaaatgaacagggatcaacaataccattagatgcaaaaattcttgaactgggaagtgccaggtcacaggcacacctccccagccagggtaagagcttgatcagatgtggcaatgacaccaaccctggagcatgatggcaaggaacttaagcctcttggcatgggtcacacgctacatttttctccttccccccttcatccaaaaggaactagctgcttctttatgagtgctgctgtcagaatggctttggaaatcctagagctgcagctggactcaaggcatggccgtgggccaccccagggactcgtattttctgtctttctatctttcattgtgaattgtttttttattgtgcaaataatacagtgttaagaacggaaacttcaataagagaaagaggaaagagaaaaaaaaaaaaaaaaaaaaaaaaaaaa

SEQ ID NO: 3012 - DNA, 736 bp, Macaca Fascicularis
  misc_feature (1)...(736): n = A,T,C or G
agaattttggcattggacaggacatccagcccaaaagagacctcacccgctttgtgaaatggcctcgctatatcaggttnnnnnnnnnnnnnnnnnnncctctataagcnnnnnnnnnnnnnnnntgctattaaccagttcacccaggccctggaccgccaaacagctactcnnnnnnnnnnnctggcccacaagtacagaccagagacaaaacaagagaagaagcagaggctgnnnnnnnnnnnnnnnnnnnnnnnnnnnnnnnnnggggatgtccccactaaaagaccacctgtccttcgannnnnnnnnnnnnnnnnnnnnnnnnnnnnggagaacaagaaggctcagctggtggtnnnnnnnnnnnnnntagatccnnnnnnnctggttgtcttcttgcctgccttgtgtcgtaaaatgggggnnnnnnnnnnnnnnnnnnnnnnnnnggccagactgggccgtctagtccannnnnnnnnnnnnnnnnnnnnnnnnnnnnnnnnnnnnnnnnnnnnnnnnnnnnnngctttggctaagctggtggaagctatcaggannnnnnnnnnnnnnnnnnnnnnnnagatccgccgtcactggggcggcaatgtcctgggtcccaagtctgtggctcgtatcgccaagctcgaaaaggcaaaggctaaagaacttgccacctaagctgggttaaatgtacactnnnnagttttnnnnnnnnnnnnataataaaatc

SEQ ID NO: 3013 - DNA, 742 bp, Macaca Fascicularis
  misc_feature (1)...(742): n = A,T,C or G
ttagttaatgantaatttgaatcaatacaaaaaaatataataacaaattcatttcagcttacatgtcttcataacaaaatcnctgtgggttaaaataataaataatgctttcaaaatgaatatattgtttaaaaggcattacttaagtttgtttttacccccaatgtgggatacactgactgaggcttacttacgtctctgcctctaggctctcttttgatatcgaacaggaaagctttggagcaaagttcctcaaccgtgctgagccaacagtnnnnnnnnnnnnnnnnnnnatgtgagttaggataaggatctgaagataaaagaggtcaccaatacctgtctgtccatgccnnnnnnnnnnnnnnnnnnnnnnnnnnnnnnnnnnnnnnnnnnnnnnnnnncatggaattacccactttcatgctgtagccctagcagtttggaatgttctaaaacagtctttgcaatgttttcccttttccagcctttgcaagcttttttcccatgcatatattcaacagaaatgcatacggatatgcatcaaagacatgtacaagaatgttagttacagtgttatttgttacagttcaaaataataaatcgaataccattacatgtataatggataaacggtgatatattcatgcaatgaaatattatacaacagtnnnnnnnnnnnnnnnnnnnnnnaacagttgtgnnnnnttactattactgtgtgttaaatatttaaatcaaa

SEQ ID NO: 3014 - DNA, 765 bp, Macaca Fascicularis
  misc_feature (1)...(765): n = A,T,C or G
aaataaaattattactggagagtagagttcgannngagagattnnncagccctgttcccaagtcttcttttgaactccttgcatggtggttaatgggtaaaatgattaatgcctcctttgggtcnnnnnnnnnnnnnnnnnnnnnnggtaagatcnnnnnnnnnnnnggactccattcccaagaggaatgactgtcattcaggccctgcttttttgtatcaacccaaagggaactttccaaatgtaaaaaccatttggctcatttgcatagtgactgaaaccannnnnnnnnnnnnntccctgtgtaacaaacagaattatcattactagttttcagtaggtnnnnnnnnnnnnnnnnnnnnnnnataaaaagagagaaatgactttactctggggaaacagtaagggttaagagaatgcatctttaccaggactatctaagctgctaaatataattttatttgcactaaagttgttgccaattaagattaaatattagcctttaagtactctatatctaacatgaaatgctcctttttaattgcttttgaagggactgataacttgtgagttcatggagtgagagaatgtctagtctacaaacatcagtagaacatcaagatttcagaataagttcaaagagggctgaaatacatgttcaagtggaaattgttaattttttatgggaatgttttcatgacatgtggcaatgatgctgtattttaagtctttttgtgtttcttnnnnnnnnnnnnnnnnttattc

SEQ ID NO: 3015 - DNA, 770 bp, Macaca Fascicularis
  misc_feature (1)...(770): n = A,T,C or G
caatgcagagttgaagttgactcccaagggctgacatggtgtgtgtgagtgtgggtgtgtgataagcttctcatccctgcatagatgcagtattcttagccttagtagaaaaacttggtttagtggtttaagccttgtgtgacggatagatcttaaagggcaaagcagtatattggtagttgnnnnnnnnnnnnnnctagctctgtctatataaatagagaaatggggttagccatagaggttaaaactacctggttatcccatatattaacacaaactgggtcttggatacacatttgtatttaatgttttacgatctagcctttccagtacaggcactttctgagaaacctttgtcctcatttggggcattttgttgtcgggtttttagtgtttgtttttgtgagtatctgcctcattccacccnnnnnnnnnnnnnnnnacagatgtggttcaaaactctgttctaaggtgtttattgtagtggagtaatgggtttgcagtgataagtcatacttttccaccgaaggggagggcttgggagaannnnnnnnnnnnnnnnnnnnnnngttgttggannnnnnnnnnnnnnnnnnnntttacctttgtgttttgttgctctgtttcctgaaagtaactcggggatgctcctggtgtgtccatctactgctttgattccttggatcccgctcattctttcactttaagaaaaaacaaataattgttgcagaggtctctgtattttgcagctgcccttttgtaagaagcac

SEQ ID NO: 3016 - DNA, 706 bp, Macaca Fascicularis
  misc_feature (1)...(706): n = A,T,C or G
actggtctcaaactcctgacctcaggtgatctgcctgcctcggcttcccaaagtgctgagattacagatgtcagtcaccattcctggcccaataaagtacttttaattaaggcatgtacacatttttttgctgttgttgttgttgttgttgttgttgttttgagacagagtctcgctttgtcacccaggctggagtacagtggtgcaatcttggctacaatctgcacctcccaggttcaagcgattctcctgccttagcctcccaagtggctaggaactacagggatgtgacaacacnnnnnnnnnnnnnnnnnntttatcttttgtagagctgaggacccactatgtcgtccaggctggtctccaactcccggcctcaagtgatcctcccacctcagcctcctaaagctctgggattatgagcgtgagccaccacacctggctgtaccctatattctcctacacaactacaatattttctgctacataactacattatcaaatttattcaaattgataattacctaatatcttccaatactagaacacatagaaacttccccaaaatttacagctgatttttcaaacaaggatccatacaaatatgacacattatctttggttttctctagacagtctctcttaatctagaagagttcctcacacataacccttttctccccttacaactttagtttttgttgtg

SEQ ID NO: 3017 - DNA, 434 bp, Macaca Fascicularis
  misc_feature (1)...(434): n = A,T,C or G
gctttcagaggcagcgtgaggttgtgctctttgtgaaatttcaccnnnnnnnnnnnnnnnnnnnnnnnnnnngtgcagaaggttatggtnnnnnnnnnnnnnnnnntcttcagatacttacaaaatagatcgcggattcaggtgtggctctatgagcaagtgaatatgcggatagaaggctgtatcattggttttgatgaatatatgaaccttgtattagatgatgcagaagagattcattctaaaacaaagtcaagaaaacaannnnnnnnnnnnnnnctgaaaggagataatattactctgctacaaagtgtctccaactagaaatgatcaatgaagtgagaaattgttgagaagaatacagtttgtttttagatgtnnnnnnnnnnnnnnnnncatttattcatattgttttgattannnnttgtgttata

SEQ ID NO: 3018 - DNA, 739 bp, Macaca Fascicularis
  misc_feature (1)...(739): n = A,T,C or G
tccagaatattcaatactacatgatgttcgaagtgatggaaccgacctggcacatcctggagaaaaacctgaaatccgcctccaacattgacgacgtccttggccaccacacaggcttcctgnnnnnnnnnnnnnnnnnnnnnnnnnnnnnnnnccccgagctgctgaaggnnnnnnnnnnnnnnnnnnnnnngtgcgtcatgttcaccaactgcatgcagaaatttacacagagcatgaaattagatggcgagctgggcgggcagnnnnnnnnnnnnnnnnnnnnnctggggctgcccgcaggggccgaggagcgggcccggaaggagctcgccaggaannnnnnnnnnnnnnnnnnnnnnnnnnnnnnnnnnnnnnnnnnnnnnnnnnnnnnnntcaacaagtttgacaagaacttctcagcccacctgctggacctcctggccnnnnnnnnnnnnnnnnnnnnnnnnnnnnnnnnnnnnnnnnnnnncagcgtcatctccaggcttgacttcaatggtttctacacggnnnnnnnnnnnnnnnnnnnnnnnnnnnggagccagaaggccaccccccaagtgcctgtcctgcgggggcccccggctcctgcacccagggtcgcagtcaccgcacagtgagccctggctgtgacaggaaggaagggtgtggggtcannnngggannnnnnnnnnnnnnccataattttnnnnnnnnnnnnnnnnnnnnnnnnnnnnnt

SEQ ID NO: 3019 - DNA, 2436 bp, Macaca Fascicularis
agtcagagaggagagacggagcagcgtggcagacaggctggctctgcacgagctcctggcagggaccagcagcgcctgcaagggggtggagggacaggcgctcgggtggcctgggccgccggcccctcacgctgcccccgctcagccttcatgctctcccctgcttttccacaggcaattggacaacaaccacatcgtcgaaatacgcctagaacagaactccatcaaatccatccctgcaggagccttcacccagtacaagaaactgaagcgaatgtgagtttcccctgtggagaaatgagcccaaatgttttcaatttccgaggtgtgtgggcttggacatacagtgctaagagcctctccaactaaagcaaagtaaaattatctgtgtgggaggtagagatgaattagcctggaaaatccatatcactgttcttattgtcccttggcttcagtgatgtggacctaaaataggagttttggcagagacgtgacggtggccccacagctgtctacaccaccgtcaccaacatccctacagccatgcatacattcctataacaaatactgagtgaatgtctgctgcaagcaaggatctatggatagagcagtgatcagaaactaagtctgctgtcatggagcttgcattcaagtgggagaacacagaaaacacagaaacaaatatcagaaatcagagtatcagtgatggtgggagggtcttttaggtaggtgtgcccatgaaggtctctacgtgcaggtggcctaaaagaaggaagggagtgagccctgagctctcaggaaagactgtcccaagcagcaggaaaagcaagtaaaaggccttggggagcatgtgtcgatggtttgtggaatagcaagaaggagtggaacgagtgaggggagaggatggggcttgtgttggaaaggttggtactagatcacatgcacccttagaccatggcacagactttctgttcttactgcatgaaatgagaagccttggagggtatggtcaacatgtgagcaccccctacatccccgttagctctgttagtcacatcactccaccactgcatcacatcgatgcccggtgacaccaaccccgctgttccttcctcaccacggcagcttggacggcaccattgcatcaccgccctcatccccaccatgtgacaatgtcatcattcttccccatcccatgatgaccttgagcactgctctgtgagtcactcagagctgggggctctgcagggaagccagtaggattcagaaacagcccaaccattgccatctcaggtattaaaattctggacagatactccttccctttttcaggctaggaaatcatttaatagagcccagtaaccaagttgctgttttcattccacttactctttttgcacaccgccccctcctccctgcacctcaccctcctacagaggaaggagagagtcaggtagaaatatgcatggactcagtcctgcgtcttccttccacacgaggctgattcattgctttcccttgagtaggagggcccacgttaaagaggttaagtgtctgctgattccttttatgttaaaaataaatatccctgcgaaacagcggcattggtaggctttaccctcagatctcgggaagccaacttcccatctccctggaaatccaaaccaaacaagcttttctcctggtgcaattccagaagtggaaaccaacataatgaggcagctcgaagcacgtacttcttcccttcccttggcagcattcctgctggaggagctgtataaatataggccttaatatttaaaacctcgggccattaatctcctggtgtccctgcttccccagcccgctctccatgcacccccccaattcatttttaaagctcagcttgattatgcagccagatagtaatttcagtgaaaaatgacaagttcagtcactgccccaacctatatctcttgcatgatttaagttactgctctaattttttgtgaagtccaggtaatttaaagcttgactatgttttactgttccttctccatcctattggacttgccatgatctgtgcattcagaattcataagaccttctcagtcacaacctggaaagtgaatttaatttttgatcacttatgatgctactgatatttattatgatgcccttttttttccccaagaggatggcaatagagaagagagcacacttaaaaattttcgactaatggaacttcagaaacctagaccgaagtgcaatcaatggcttgggagaggtagggtccctgatgagaatggatttcaaaaccctaatttttcctaaatatacatgaccagtttatccctaataactaacagaaggaagttccccgctcaactgtggctgaaccacatcctgctcttatctcttaccaaaaaaaaaaaaaaaaaaaaaaaaaaaaaaaaa

SEQ ID NO: 3020 - DNA, 575 bp, Macaca Fascicularis
aacaaatttcataattggtgatgcaattattgaaataactcaagtttgtagcgtttgtagtcatttgagtgtttttgataaaactttgccacaattgttaaaagctcataggggagtttattgtaagataattaaaagtggttttatacataaaaatatggaaataaaaataaaaggataaataatgattaaaaaatttgtattaatttctttgttggcaatattttcatttgccgaatcaaaatttagtgatcctcaaccaacttttgaaaatccaagaaaagtagtttactctttatatgttggtgatttagaaacagttaatcatacaattggttctatgtataatattctaaaagagtatccaagtgagagtttaaaaatagttgttgttgcttatggaaaaggtttacgaactttaaaaaaagattatgacaaaaaaactcttgatagaatcaaatctttgatggaatatgatgtagagtttgtagcttgcagaaatacaatggagactatgaaatggactgaaaaagattttatagatggtatttcttatactcaagctggaattgttg

SEQ ID NO: 3021 - DNA, 738 bp, Macaca Fascicularis
agcactttggaataagttcttatataaatacccccagccttttgagaatgggacttgttaaaggacgcgtatgtagggccagtacctactggcagttgggttcaggaaaataggattgacttggccttgggtcccttggtccattttaaaatctgggagtagaaaagaacaaaaaatggaatggactcttaaaataatgaaagagcatttatcatttgtcccttgaatgtagaatttgtttttgatttcagaattctgctggtaaacatgtcagttaaaatggtatattatgtgtatgtattataatttagaaatcccattttataatgttactattccaaggtgacataatacatttacatttgggatttgggtggactattatatttaactggagttgttggcaagtgtgaatccctcaggaaaaaaaaaatctgttttaaaaagcaatctgattcttggctcttgaaactattgttacttaaatctccaataattaaaaattttaaatttttaaatcagaattgtcaatactttgacctttgagaaggatttcttagaaatacatttagtaatgttcccaagacatcaatcttacatttaaacttttttctttaaaacatggtattggttgttaacttttacacagttctgagtactgttaatatctggaaagtatcttgagagatcagtggaaagctaaacagtctaaatttaacatgaaatacttctttttga

SEQ ID NO: 3022 - DNA, 793 bp, Macaca Fascicularis
  misc_feature (1)...(793): n = A,T,C or G
gtacacagcaannnnnnnnnnnnnnnnnnnnnnnnnnnnnnnnnnnnnnacagaatggggnnnnnnnnnnnnnnnnnnnnnnnnnnnnnnnnnnnnnnnnnccctctgtcattttattttattctcagtgtctccccacttgatagaggggtaaactgagacatggcagtgcagtaggcttgcacaaagtcacagnnnnnnnnnnnnnnnnnnnnnnaagnnnnnnnnnnnnnnnggcccagcattcttcttttgagttcagccccttgttgtagaggagtataagaggcatccctccataaccaggcaggccttgtcaaaggtgctgagggggaaggctgttgcctctggacgggacagccctgggcccatcatgcctgcctggcctcagtgctccagcccagtggctgccacagactcttcctcccccatttcagtgaaacacaatggagggagcaagagacccagagcctttagaaagcttgttttcattccccagctaggattgttggccagaaggtgaaaactaggagtatggcctcctcgagcacagctcatggttgaattgtttctgccagagcttgaatcaggtctgagcctcatgcagaaaggggccttacggtagcttatcaggaaagtgaagcacctcctccttcctgtgaaatcaccatcagaagttgagttagggcaagcgtggtggtgcatacctgtagtcccagctactcgggaggaaaaggtgaggatcatttgagcctaggaggtcaaggctgtggtcagccatgatggtcactgt

SEQ ID NO: 3023 - DNA, 815 bp, Macaca Fascicularis
  misc_feature (1)...(815): n = A,T,C or G
cctctcctcctcaccnnntnnnnnnnnnnnnnnnnnnnnnnnnnnnnnnnnnnnnngtgctgacgcagccgccctcagcgtctgagggccccagggcacagggtcaccatctcgtgcactgggagcagctccaacattggaggttatgatgtgcagtggtaccagcagatcccagcaacagcccccaaactcctcatctatgacaataataagcgaccctcaggggtctctgaccgattctctggctccaagtctgggaccacggcctccctgaccatcagtgggctccaggccggggatgaggctgattattactgtcaggcgtgggacagtagcactgaatgatgtgttattcggaggagggacccggctgaccgtcctaggtcagcccaaggctgccccctcggtcactctcttcccgccctcctctgaggagcttcaagccaacaaggccacactagtgtgtctgatcagtgacttctacccgggagccgtggaagtggcctggaaggcagatggcagcgctgtcaacgcgggagtggagaccaccaaaccctccaaacagagcaacaacaagtacgcggccagcagctacctgannnnnnnnnccgaccagtggaagtcccacaagagctacagcnnnnnnnnnnnnnnngaagggagcaccgtggagannnnnnnnnnnnnnnnagaatgttcataggttcccaaccctcaccccacccacgggggcctnnnnnnnnnnnntcccaggggaggggtctctcctcccaccccaaggcatccagcccttctccctgcactcaaaaaacctc

SEQ ID NO: 3024 - DNA, 725 bp, Macaca Fascicularis
  misc_feature (1)...(725): n = A,T,C or G
tttgagacaagnnnnnnnnnnnnnnnnnnnnnnnnnnnnnnnnnnnnnnnnnnnnnnnnnnnnnnnnnnnnnnnnnnnnnnnnnnannnnnnnnnnnnnnnnnnnnnnnnnnnnngagaccacagacacataccaccatgcctgccttggcctcccagggtgctgggattacagatgtgagccaccactctgggcctggagtttctctataaatcaaacattaatctcaaaagcacactgaagcatggccagcatctggtcccctgtgttggaaaaaccgagttttcttggaacacagatctactctttaataaaaaaatataaaaggttataaaacattgatggaaatcttacctnnnnnnnnnnnnnnnnnnnattttaatagttaaaattaatcacaaaattaattcaattttaatttaattaaaattagtttccagaagtctgagagagacacattagccttattagacttatttgttatgtaagagttttgtaggaagcattgtcaaatctgaggtggtgtttagcttcctttgggttgtatttatatagatgttaatgtgtgttccaggagcctatgagattttaaaaattctcatatgtcttaatatatattgtcagtagtaattgtgattattgtaattgttgtatgccatagaaataagcaaatttccttgttgactctgtctttaactatggctgtcctaagacttttgtcaccc

SEQ ID NO: 3025 - DNA, 1758 bp, Macaca Fascicularis
  misc_feature (1)...(1758): n = A,T,C or G
agacctgagcagttgctccggcagcggtcggggaaggagccaggtgagcagccgcggtggcggggggcgggggcaggatgctcggcgaccccaccttccaaccccctcctcttccgcccacatccgccggagccaccaacaccaggaaagggggcgtagggcgagggatgggagagggaacagggcatgagagaggatgggatcgggagaaaggcgattcctttgggggaggggcgcgtggagacggagtatgagtgtgtgtgagtgtgcgtgtgtgcaaggtgtggttgcacggatgctggttgcttctgtgtatctgcgggcgtgtgtctctttgtattgtagcctggagtcagtgctccgttctgcacctgcaggatgtccaggtgtctgctgggtgggtctgtacctttgggctttgcccttcgtgtccgtgccttcgccactgggggctggtctatatttgtgtctccgtacatggttctttttgtttctggagagtaaattcctggagcaattgctagacctacctgctgtcacctggctgacacggaggcccgcctccttctctcagcagcctggggcccaggcccgggccaccatggcgctgcctccaagcccagccaccctgcggcacacactgctgctcctgccagcccttctgagctcaggtacacccctgttcagtcgttgaccaagtccttctggggtccaaaaccccctctctcctctgtctgctcttctgtttgggtacctactccaggcccgaaaccctggagcccctgttcccttcacccacctacctaggtccaaccagccagtccctggtgagaggactcaggcgccctttcccttggcctgctgctcctctcactggggcaattcctggtcacagcacagtaccaaccctgcctgaccccttcccagaggccccctgctgtgttccaggttggggggagttggcgccacaaatagatggtcagacctgggctgagcgggcacttcgggagaatgaacgccacgccttcacctgccgggtggcaggggggcctggcacccccagattggcctggtatctggatggacagctgcaggaggccagcacctcaagactgctgagcgtgggaggggaggccttctctggaggcaccagcaccttcactgtcactgcccaccgggcccagcatgagctcaactgctccctgcaggaccccagcagtggccgatcagccaacgcctctgtcatcctcaatgtgcaatgtgagtgaccctgaggtgggcagggagagaggttctctgcccagggaccccccagcacccaccatgcaggtggtccgcagggcatttagcagacacttaagcactttgcaaatatgaactcattttatcctctgaataatcccatgaggtcattattatttttgtcaccattttacaaataagaaaactaaggcggccnnnnnnnnnnnnnnnnnnnnnnnnnnnnnnnnnnnnnnnnnnnnnnnnnnnnnnnnnnnnnnnnnnnnnnnnnnnnnnnnnnnnnnnnnnnnnnnnnnnnnnnnnnnnnnnnnnnnnnnnnnnnnnnnnnnnnnnnnnnnnnnnnnnnnnnnnnnnnnnnnnnnnnnnnnnnnnnnnnnnnnnnnnnnnnnnnnnnnnnnnnnnnnnnnnnnnnnnnnnnnnnnnnnnnnnnnnnnnnnnnnnnnnnnnnnnnnnnnnnnnnnnnnnnnnnnncctcaaaaaaaaaaaaaaaaaaaaaaa

SEQ ID NO: 3026 - DNA, 737 bp, Macaca Fascicularis
  misc_feature (1)...(737): n = A,T,C or G
acttgtgctgnnncnnnnnnnnnnnnnnnnnnnnnnnnnctccttgantttcagtgcnnnnnnnnnnnnngagaccatccgggctaccactgactannnnnnnnnnnnnnnnntcccctttccccacgtagnnnnnnnnnnnnnnnntttgtggtccaaggcccccgccagctgctacatcctgaaaggagaaaccggaccannnnnnnnnnnnnnnnccctgttcaacacagatgcctgtggaggctctattacccgaagcgttatgcccaaagttgctccttggtgtagatgagcctcagcttccagggcagtatgggcctgttggtctaccagggccctgatgtccacgtggccttcctgttcttcactcccttcagccacacacttcatgagttcaccttggctatcctaacagggccaatcannnnnnnnnnnnnnnnnnnnnnnnnnnnnnnnnnnnnnnnnnnnnnnnngtccaaggagctgcaggtggtgaaatgtgtcctgcaggtcccttgggnnnnnnnnnnnnnnnnnnnnnnnnnnntgacaatcagaagtannnnnnnnnatgtccggatagccnnnnnnnnnnnnnnnnnnnnnnnnnnnnnnnnnnnnnnnncctnnnnnnnnnnnnnnnnnnnnnnnnnnnnnnnnnnnnnnngctctgtagaagtaagagctggggtttaaatcatgggctgtctctccagccaagtggagctctgaga

SEQ ID NO: 3027 - DNA, 714 bp, Macaca Fascicularis
  misc_feature (1)...(714): n = A,T,C or G
tcaatggggagcannnncagggacagtaaggggtcggctcagatggggtgggtgggctcctggggttagggtaggaattacagagcttttgttactattgttactattttttaaaagaactcgtgctaaagatacgatatttcagataattcagaagcacgtaaaggatgaaacttgggataacctaaaatcccacaacctagagatacgcaccacccatttttgtcttcccccattttctaggcaaaaatgaaagcactnngtcctcttgaaaaacaattctcaaatgaatatcctatgttacatagaggcctatgtaatgcatttgcgtggccacatggtgtcaatttcatggatatacaataatattaattccctgctgaggacattaactggtttctaaggctgcttgttgtttttgctactacaaataatgcattgatgataaatacttttacatacatggttgtgtgtttatctgaactattttcaccaatatattcacctagtgtgtatgggagtgtccatttttgtcatacccctgataaccctgtgataacatttttaaacattttgctaatggatctcaatgttcttgtttcaatgtatttaatttctagtagaatgagccccattccttgttttgattggctgtgtannnnnnnnnnnnnnnnnaaagcctattcgtgacttagccaatgttgtttcttttct

SEQ ID NO: 3028 - DNA, 652 bp, Macaca Fascicularis
tgcacatcagtccactggagcaggagttctacacattaaaaatgtaatgggatcagcctagcactgtttggggtcggttttcttttgttgtattttttagaatgggggtgggggcctaagtgtccctatgaagctgtggtccgcgacaggagcttgttgggggagtaccagggttctgctgctttcctgcatctgagcaacacaacagagatcatcagttttaaatagagtagccctcacaatcaaaatatcataggatatattgtaaagttatgttgctaattttcctttgaaatataaaatattttaagctttttgtcaaaagtggtaacatcttaatacaaataaaaacccttttgtggttgtaagatttagcttataaatcattcaaattgaagtgaaagaattaccaggtcattgttaatgacttagtctattaagaatatatgtatttttgtaaaggaaaagcacttgtagatatttaatcagtacacgatatgtcttttgcagaaataaaatgctgcttagagattctctttaaatattttttatttttgtgctcaaatgtattttctgttgatctatggaatgttctgtacaaaagctgtatgattgtactgttgggctagatactttttttttttaatctgga

SEQ ID NO: 3029 - DNA, 709 bp, Macaca Fascicularis
  misc_feature (1)...(709): n = A,T,C or G
ccggagtggccaaactgtcgtnttactccagcnnnacgctgcagnctgcgcttgaatnnnnnnnnnnnnnnnnnnnnnnnnnnnnnnnnnnnnnnnagtgcatccctgcgaccaagaaggtagcacggagccagcttctccggcggctctgctctcccgccctgcccaggccgccactgaatttcgtgtctgtaatttttctttgacagacagatccgcggaaggaccttaagcctgccccgcagcagtgtcgcctgcccaccatagtgcggaaaggcggaagatactgagtannnnnnnnnnnnnnnnnnnnnnnncttccggaggcaacaccaggcccgatcgggcccggcctggnnnnnnnnnnnnnnnnnnnccacggagggctggggacgcacctgcgtccgtttcgcgctggctggggctctgggtgctgccctgcgccccgccgcacccgcggcccgcnnnnnnnnnnnnnnnnnnnnnnnnnnnnnnatttgtaaaaccacattctagggttttctttcattttcgttaagaatttggggcagggaatattttgtaactttgtatatgaatcaaaacaagcaggcatttctgtgatcagttgggcgtggttggaaggtgggctctgcgtgtcccctcccagcgnnnnnnnnnnnnnnnnnnnnnnnnnnngagcgcaccacctcttaccagtgacgctact

SEQ ID NO: 3030 - DNA, 619 bp, Macaca Fascicularis
  misc_feature (1)...(619): n = A,T,C or G
ataagaagtagctgnnnacagcannncaaacaaattatttttggtagaatannnnnnnnngccaaatggtaannnannnagcaaaaattattnnccaacttttcgaattnnnnnnnnnnnnnnnnncctagagtagtgttttacactgtcacgaatcccttaatacctttatttaaaatggaaaaaatatggacaatattttagaaatatgtgctacacatctaattttatctgtagtttcttttaaatgatctaaattgagatgcctttgataacgaagagatttaccaacnnnnnnnnnactcgtgccttcaatgcggaannnnnnnnnnnnnnntcggcacagtcctctcctttctgtgtttctgctgcactaattgccagggggtgggagagaaggcagatgaatgaattcatagtagaaggaggtgataggtgcagcaaagagcnnnnnnnnnnnnnnnnnnacactacaattttgtnnnnnnnnnnnnnnnnnnnnnnnattgtgggaagatctcagcttccagggtaaaagttaatgttaaagtgctattaagtttttattaccaaatatatattttatggtttatagtggtatgtatgaaacatttaaaat

SEQ ID NO: 3031 - DNA, 725 bp, Macaca Fascicularis
  misc_feature (1)...(725): n = A,T,C or G
gatgaaactgaaagnnnnncagnnnnnnnnnnnnnnnncaacctgtccgtgttaagttacctgcttnttgggactcagtgtccactgctgagctgaaaaggaaatggattaaatctcttcgaacctgtacggtgatcgatagtttgagcaagactggagaatggacgacactatgaagctgtggctagaaagggactgtcacgtcnnnnnnnnnnnnnnnnnnnnnnnnnnnnnnncggacagatgcctgcgtgggtggcgagggccacacctgcacacgagcaggnnnnnnnnnnnnnnnnnnnntgatgccagagtgtgttcaaaggtgagtctcctgctcttgtggactcttctctcaggccagaaaggctgccggctgcctgagnnnnnnnnnnnnnnnnnnnnnnnnnnnnnnnnnnnnngtcctgagttcgtcgtcggcaggtttccttgtggccagctcgctctnnnnnnnnnnnnnnnagcaggcagaccagaagaccaggcaccggacatgcatgccaaagggaccggtcatctcctgcggacctgtacctgaccctnnnnnnnnnnnnnnncaatccggaacccactttttactcactccccatgtctctgagccttcctcttctttctctttccctctgccatcctgacactgatagtttgtcatataaatccccccggttgtgttttttttctaggaaaaaataaaaaggaaa

SEQ ID NO: 3032 - DNA, 660 bp, Macaca Fascicularis
agtgaggctgcacttgattatatttgattctttgttcataatacatggtaacgatagctaggtgtggtgaaaaacccgcggatccaaagagcgggatttttctctcagatctgccgctaacttttgtattctataggctacttttatctccatggtctcaatctataacatgaacggattgggttagatgactgaagtttcttcaagtgctaaaatgacttctttttctacagtcttcattggatttatgtatttctttttcccaatatgtttaactgggatgtctgtcactagggcagcaagacagacatttgaaagaacagtcacactgctgaactggcatttctgtcaacacaaaagtttagaaaagtcattgtaattgttttctaaaacttgattcagtatgtatcagattttcagtaaggctgcttttaaaaggaaccactctgtccatttaaaggtttcatagttatcttcaatgggttagtatttggggcaggacattaaaactagaagaggattctataggatgaggtgatacctagaaggtaatatattgtaaggcaaaagacgttagaagaaatggggaaaggacagtaaaaggcaagtcagattaaaggttgaaacatgaagatatatattctcaaattgtatttctgc

SEQ ID NO: 3033 - DNA, 321 bp, Macaca Fascicularis
gtttgttgcttttggaggttgaggtgggaggatcacttgaggcctggagaccatcctggacaacacaaccataactataaaaaaaaaacctgaaagccactcgcaggacaggaaatttatgataggtggagcatttcatatttcaagaatcaaaaatccgaaacttgaaagtttttgagtggaacatctgatgctgaaatgatcaatggagcattttggatttcacattctcagtggaatgctcaaccggcaaatatatgcataatatatttaaaaatctgaaaaaaatctgcagattgaaatacttcgttctggttccaa

SEQ ID NO: 3034 - DNA, 638 bp, Macaca Fascicularis
  misc_feature (1)...(638): n = A,T,C or G
gagccggagtgactnnnnaccgagacaggccccccgcagtgctccctacaaaggnnctgagattcggggctcccggaaatccaaggactgcaagtacccccagaagccacacaagtctcggagccggagttcatcccgttcccgaagcaggtcacgggagcgggtggataatccaggaaaatacaagaagaaaagtcattactacagagatcagcgacgggagcgctcgaggtcatacgaacgcacaggccgtcgctatgagcgggaccacnnnnnnnnnnnnnnnnnncggaggtgaccctagagcaggattctttttggaaatgtatgttgagtggaccttggtggatttggaaatggaactgagggaccggtgacatgtgcttcagaccggtctggggtgcggcacacacctgggcccgtgtagggcccggctcggcggcagctctgaggccaactcgatgaaaaagtgaacgcacacgcccctgttcgcgtggcctggcgtggcctggtgctatctgcagccgctctccactccnnnnnnnnnnnnnacgtgaagccaagaatagatgatttttagaatctttgcctatattaggttgtacttatgtacatattttgcagtgtttcacaagaga

SEQ ID NO: 3035 - DNA, 653 bp, Macaca Fascicularis
ttgaaatacgaatcccagaaatctaaatccagcagcgtggctgtcggaaacgactttggctttccgtctcctgtcccaggaactggcgacgccaaccccgctgtgtctgaagatgccttattcagggacaagctgaaacacatgggaaaatccacccggaggaagctgtttgaacttgcccgagccttctcagagaagaccaaaatgaggaagtcaaagaggaaacacttgttgaagcatcagtcgctgggggctgccgcgtcaacagccaacctcctggatgatgtggagggccatgcgtgtgacgaagacttccggggaaggcgtcaggaggcgcccaaggtggaggaaggcctgcaagaaggacagtaaaagatgccagcagctcttccttgccagagatgatctgaaccggtgggggcagctggaaagcaacactggcccccagctgaagggcccagctgcagccggacagatggtgcttgagaaccgaggcccagtgatcctccagccacagtccagcccaaccactgccactttccatgggacttagaacttccgagttgctgccttgcaattggaggaaggacctggggcccctagaggcagcagccaattacagctccttttgtagccaggcgttcctatgtcaa

SEQ ID NO: 3036 - DNA, 724 bp, Macaca Fascicularis
  misc_feature (1)...(724): n = A,T,C or G
attgtacctcaataaatttgttacaaatcacatgacatttatgttaaacatcttaatacatcaataggaggtaacgtttcattcagaaaatagcagcttttccctcagacaccttcagggttacctgtgggttcacatagcctaggttaagcagttggcaacattttgcttcactgtctggttttacaaagctttnnnnnnnnnacaggtataaaagagtctacagagttcaccaggacatctgcttcaaagagagctgtgaaagcacaagccccaagaagaccccgaacaggtgcctccggggagcaggnnnnnnnnnnnnnnnnnntggagcccacagggtgatggggcaagatgctgtgtcctgcatggagcccacagggtgatggggcaagggcggcggtgctatgggatgcnnnnnnnnnnnnnnnnnnnnnnnnnnnnnnnnnnnnnnnnnnnnnnnnnnnnnnnnnacnnnnnnnnnnnnnnnnnnnnnnnnnnnnntatacgtgcatgtgagcgtacacagaggggcccagctgggcatgccgggtgctggggagaggtcacacggtgggtgctgggagtcactctggttatgcgtattcacacagaacacggtgctacaattgggaannnnnnnnnnnnnnnnnnnnnnnnnnnnnnnnnnnnnnnnnnnnnnnnnnnnnnngtttactttttattcactcacacccaggttctt

SEQ ID NO: 3037 - DNA, 745 bp, Macaca Fascicularis
  misc_feature (1)...(745): n = A,T,C or G
gatgacatacttgtgtnannnnnnnnnnnnnnnnnnnnnnnnncattactctctctctttcagtctcttnnnctgagtttgagtgtgcacacatgcataggcaaacacaaagataaaatatgtgatttataaaggaagacttactagnnnnnnnnnnnnnnnnnnnnnnnnnnnnnnnnnnnngttttagtgttttgttataagtggaaaatcattcttgcatgaataagtatttgctattaatagacataaatggactttatgtattgctgttactattctaggaatcctgtcatatttttttttttcatgggtttttgctggacggtctcaattatatttatttatatgtaagacatttctattaactttgaaaggtgtttttggcttagttttatacaaaaatagtaggaaaaaaatgaaatcaaggaaacatgtttaaaattaaatccataaaaatctgattttcagggaacagagtagaacacattgtaaaaaagtttctaaataaataaaacgttatattaaaatattcctatatgtgtttgaatattaaattcagtaaaaaatgcagatgtggtttaagttgtgccttttgtatcttgctatgaattgtaaataaagcttgtagtaatggagaaactgatacagatgaagaagtgttaataaattctgcctctggctatgcttagcataatttttagtacaataaatactagggcgtaattatatgtttaaaaaatac

SEQ ID NO: 3038 - DNA, 679 bp, Macaca Fascicularis
  misc_feature (1)...(679): n = A,T,C or G
aactaatacacacttatctcgtcattcttttttctctccttacctttaccactaataccagtaaaattatcttgctgatagtgaaaaagttctgtcaagattttcactgtaatggctgctaccgagatggaccatcttcatcatcaccagtggtttcttctaattataaaatgtttaaactttctgagaatttaaaaagccaccactgttcccagtcagcatatacaagctcttaatattctgtttattaaacaattcaatgtactattttatattggatgatattgattcttaacattggcttttcagtcatcaacagtcaacataaaaatttcaatttgcagtaatttagtggaaaatatcttatttcttttttcaattttaaaggcttcctgcttttttacacttgtatattataagtgaaaaggatcaacagttaatttgagccaagtaataaaagaaatttnnnnnnnnnnnnnnngacaatttatggtagatacataaatacacagattacaatataaagtctccatttaacctgtttatataagatacagggccacactaaactactcagtgggatttatatattccatccacttgaaacaataaacagtaatgtatccaagaagattatgtgtcctaccctgtctcatggaaaaattaattatatggtgaa

SEQ ID NO: 3039 - DNA, 716 bp, Macaca Fascicularis
  misc_feature (1)...(716): n = A,T,C or G
cacgtgttctatntgcaccatgcttaggaaggagcatgtgtaccaataatggaagcacagaagctggttttcactggttaagagctatctctgtgctagaagctggacaccaataacagtcacttcctgcactgattctgccatgagcactcgctctatggctgttttaaggaacctgcagacaaagaatggattatcattggtgaagaccttggctggatggatagaccagagctgattaaattattcttccatgatgaggaactttaccttatccctcggagtaaggagaatgtcatgcaatgtaagtaataaagttcttgggttgggttgttagttcatgatttctactgtcatttaaaaagataattaaattttaaaaggtcatgcataggcctatgatgagaatgtgttatggaccgaaactaatccaatttagcacaagtgaagtataaggaaaaaaaacttagcttttccattcattttcaatagttaaatgtcacattatatgtttgtctcactgattatttatagactcttctcttgataaaggctgttactcatttatggagtcagtattctagttgttgagtaggatggtggttcaagcttgttcatttgatatctaaaaatgtttcaaattaaatgtagaggggccatggtggaccgatgatgtgaacggaatgcatctgaataaaaattatgatcaatcattt

SEQ ID NO: 3040 - DNA, 1182 bp, Macaca Fascicularis
  misc_feature (1)...(1182): n = A,T,C or G
tctatctggcagagctgatgtggggaaaaaagacaaacctcatcagattttcttgataaataagcagttgtcatgtttcaagacttttggaaatgagcaataatcaaggaagaggacaaagattgcatacgtttataatatgtagaacatcttttgccacagaaaaccctggaaaccgcccacttctggacaccaaacatttggattagtatattttgtggcattccctcactaatcctctcatccttaaaaattttcagaaattttttgcagcaagaaacactgattacaacgtatgatttagggtagatttgtgacccattttttcattgaaatgtataagcaggagtgagtagtctgagtgactaccccagcattgagaaaattgtagtttagagatctttttggaacttctggagaacttttatttctagactgcagtggaagtctaaagccccttggagatgtctgctttaaagggtctttgaccagagtccactgtagagacgtggtccagatctactctatttgcctgctccttacagcatcagaacaactctcactccagattcttggcttggcaggtgcataaagaattgtctactgaattgaaaaacatttcagatatataaaacttgaaatatattgtctagtctgtacaaactcaagttgacaagccaaccctgcaggaatatatggatagaaggggaaggataacatttgttgaattcagctagatgcctcatcagctggaaaaccttggaagaaagannnnnnnnnnnnnnnnnnnnnnnnnnnnnnnnnnnnnnnnnnnnnnnnnnnnnnnnnnnnnnnnnnnnnnnnnnnnnnnnnnnnnnnnnnnnnnnnnnnnnnnnnnnnnnnnnnnnnnnnnnnnnnnnnnnnnnnnnnnnnnnnnnnnnnnnnnnnnnnnnnnnnnnnnnnnnnnnnnnnnnnnnnnnnnnnnnnnnnnnnnnnnnnnnnnnnnnnnnnnnnnnnnnnnnnnnnnnnnnnnnnnnnnnnnnnnnnnnnnnnnnnnnnnnnnnnnnnnnnnnnnnnnnnnnnnnnnnnnnnnnnnnnnnnnnnnnnnnnnnnnnnnnnnnnnnnnnnnnnnnnnnnnnnnnnnnnnnnnnnnnnnnnnnnnnnnnnnnnnnnnnnnnnnnnnnnnnnnnnnnnnaaaaaaaa

SEQ ID NO: 3041 - DNA, 719 bp, Macaca Fascicularis
  misc_feature (1)...(719): n = A,T,C or G
tatacagtagtggccaaattctcatcattttgtaaaagataaaggttatacatcacttttatggtattttgtgaactcagctaagggaatnnnnnnnnngagcctggagttgttacctttacttgaagtcatctcatccagtcccctgctttagggcagaacttcagtnnnnnnnnnnnnnnnnnnnnnnnntgtgtcgccagcttaccctgttctggaatgttgtattccattggatagggctgctatttnnnnnnnnnnnnnnnnnnnnntttaacacttaatctagtaagtaaaaatgagcagaaaatttggcatttaaaaattgattttaagggttggcaaaagtattatttcnnnnnnnnnnnnnnnnnnnnnnntgtgaccnnnnnnnnnnnnnnnaatgtttttgtatctgaattgcttatgtacattttatattatgttgacgtaacaagnnnnnnnnnnnnnnnnnnnnnnnnnnngcttttgctatgtggggctgnnnnnnnnnnngttgaatgggaatgggtcagattgggaagcctaggaatagagttctactgcagatttcctaggcactgctctattgaaagtaggaacataagtctttagcaacattctgatttaattgggtgacactgataacaaagtatgccactcagatccatttaaagtgtgcataactgtatttgaaatgtgtttttgtgtgtgtgtgt

SEQ ID NO: 3042 - DNA, 999 bp, Macaca Fascicularis
tgaattcaaaatagttaatctatgaaataacatcctctcaaatgtttgctgatgaaatacaagttgaaatgtagttattggaaaagtctgtaacctgtggattatatatattcaaagtgagacaaaggcaaataaaaagcagctatctttatgaatagacaaagttgatttcaggaagtatacattatattctgcaccgacccaggaatagaaattattgcatctgtggagcatatatctggagttactatactttactgaagagcaaggcataaatttagactaaaatccacccagattacactcattctttaggccactcctggatacttcatttaaatttgattcttgaggtaatgagatgtcggcaaggtttgtcctgtatattaggcataaaggaaaagttctaaactgcctctccaatgacttgtagtcagtggtagagtatcactttccctgatcatgaccactaaactgtaaattgattgatataaattagttttctctggagttacatccaagtaatgaagacttaagataaccttggttgaaataaatttccaataatttggagactcataaataccatgcaggtgtaaccattgccagtaggctgtttctatgcttatttcctattttgacttttacgttgaagataggaatatctaaattatatctctagggagaaaatgttgtaaaaaattaaaagtgcatccctgatttgtaaaataaagttcaaaaaactgatttcagaaagtctcaaataccaaatgtgttcaatacactagttttgagatgctaggattatactgtgattcttatgtttatagtaaagtcaggaaagcaggaggataggtttttttagccttgagacttatttatgttgccttggtcttttatcattttttaaaaatttagcttatgcaactgtaaaatagcatttctagtatgagagatgttttgaatttaaaaaatgaaatgcagtttttcaaaagtaaa

SEQ ID NO: 3043 - DNA, 776 bp, Macaca Fascicularis
  misc_feature (1)...(776): n = A,T,C or G
gctcagtatcagtactgaagagcaggggctaagctaagcaggggctgcggaggccnnnnnnnnnnnnnnnntttctctgtgccctggtggtgccatgnnnnnnnnnnnnnnnnnnnnnnnttttagcttatgtagtcttttaccacagaagtaaggggagcgnnnnnnnnnnnnnnnnnnnnnnnnnnnnnnnnnnnnnnnnnnnnnnnnnnncctaggctgcgtgctatatgccatgatgtttggagaaggcccttatgacatggtgttccaaaagggtgannnnnnnnnnnnnnnnnnnnnnnaccaactcagcatcccacaaagccccaggcattcttcagcattgcggcagctcctggcctcgannnnnnnnnnnnnnnnnnnnnagcgtcctcacattcctctcctcctcagtcagctggaggcgctgcagcccccnnnnnnnnnnnnnnntactacccaannnnnnnnnnnnnnnnnnnnnnnnnnnnnnnnnctcgtgcctcagaaagagggtccccatccctcattggaatctctacccattccatccaggactgctcttacacttgggggtagcgnnnnnnnnnnnnnnnnnntagtcctgcatctgctcttctgctttcttccaagagcaaagcctgggcaaggggccttactgagtgggagtgggtgggggttgggaaaagggaaatnggtgggatacggagcatggctctgagcaggactgtgagctcnnnnnnnnnnnnnnnnnnnnnnntgggcaggagaat

SEQ ID NO: 3044 - DNA, 400 bp, Macaca Fascicularis
gcaaaggagacagttgcagttaccctgtccaaagggtttttcctctagagaagatggtgggctaaatgtcagaagctggatttctcctgtgcctctgacatcttgcacacctctcagcctgtttccctttctggaaagtgagttaagaccacgtcaggaaattcgaggaactggcagatggggccgcttcacgttcacatccatctgttatgtactggggagtcatttggggagcagcaggatctgttgctgattggttaggccattggtctagggaggcctgggggcccttcccatccagctccaggcaatgacgctttctcttcctccacacagaggacgtcacccccatcccctctgacagcactcgcaggaaggggggtcgccgtggtcgccgtct

SEQ ID NO: 3045 - DNA, 754 bp, Macaca Fascicularis
  misc_feature (1)...(754): n = A,T,C or G
agcatatgtaaagttttattggccttnnnnntacaaaaatggaatattttagtatgaatttgctgaatgtaagaccgtggactgttttttatagtatggcctaattttaaaggtccaaaataatttgtttttaaagtttgcccttgtgctaaagtgccagtgtacgtatgttatacttgattgtnnnnnnnnnnnnnnnnnnnnnnnnnnnnnnnnnngttttataactaaaaaggtttaagctgctaaaactatttttaagagatgnnnnnnnnnnnnnnnnnnnnnnnttttttttcctcctctaagcccaaagattaactggagtccctccaaccttacagatttttgggtttnnnnnnnnnnnnnnnnnnnnnnnnnnnnnnnnnnnnnnnnnnnnnnnnnnnnnnnnnnttttgtttggtcaagggtaggtgcaacccaacggaccatttatgcaaaagatgtaaactcttgcataatannnnnnnnnnnnnnnnnnnnnnnnnnnagagtaaatgcttaaacataagcgaaaccagtagaaggtatgtgggtcagtttaaaaattttgattgttaatgccctattttgtaatttggcacctcttttgatgcctaagcaggttagcagatgcctaagctgtatttcnnnnnnnnnnnnnnnnnnnnnnnnnnnnnnnnntaaatattgatagcctaaagataagtttatatggtacttaatgtacatgatatgaattgaagcataaaat

SEQ ID NO: 3046 - DNA, 766 bp, Macaca Fascicularis
  misc_feature (1)...(766): n = A,T,C or G
cagnnncaattgtgnttnnngcctnncagcctcttgcctcnnnnncgcgtaccatttcnnnnnnnnnnnnnnnnnnnnnagggggtgaaagagactcggtgacagattcaggagtttggatgaatgaatggaggctcgaacaagcaaaggaacagacnnnnnnnnnnnnnnnnnnnnnnnccaggggagaagtctgaagtcctaggatatgacagaaggaacctgggttcctaagagaccttgtggagcagatcctccgttgccaagtgtcattggnnnnnnnnnnnaagaagagactaaaccattactgcatttggcctctcagatttgggggtgttcatttcggcagtctactgtctgaccttccctgnnnnnnnnnnnnnnnnnnnnnnnnnnnnnnnnccatgccagtgaataaaaataaagattccaaactaaaaaatgggacagattttgtttttttcttgtgcagcatcagccttannnnnnnnnnnnnnnnnnnntctatattttatcagaaaatgagatgatgataaaatttgttattcctaccactctaataatgttgacgtgtgattaacaagcagctttgannnnnnnnnncttttagtagaaagtaataaaacctcaagtgtactggcagttttcatttcactgtgtgtgtatatgtatctgcnnnnnnnnnnnnnnnnnnnntatttnnnnnnnnnnnnnnntaatgcattttaacatttttttttgaaannagtgagcnnntgatggttac

SEQ ID NO: 3047 - DNA, 2137 bp, Macaca Fascicularis
  misc_feature (1)...(2137): n = A,T,C or G
attaattaatatgagacgtagttactcttctatgactgctggcattaaactttggaacaagatcttagttcaactaatcttaatatttcttagaaagaataaatgaaagaaagaaaaaggcaagaaaacatcattaaactcctttttctttccctacttaaatctgaactttgcagagaaagaggaaataagcttgactgtatttggtctatttgtacataatgacattggaaaagatcttatttccctctcaagagactcaactaaataatattaatttcgtatacaaaatggagattaaggaaaagagaaattataccaaatcagagaaaatcatatactaagtaggatattgaaagtttatagtattgtggacagagtaccaaattaggagttagaaaagcagggaccttataacagctctgtaactatctagttgtatggccccgggtaagccactgacgttgtgtgctttccatttcctcatgtacgagatgagtatgttgaaccaccaaatgctgttatacttttggtaggtcatcctgaaatggggcacatcaatctctcaaaaatatagctcattattttcttcattcattttacttctgctcatagcctttcaaattgattaagttaaaggtagaaatgcatattgctttcattttgctgaaaatcagaattaaagtcttggagaaaaatcaccgcaattcattgtatgcatatagtgacacacacaaaaaatacaaaaatacataagctcattttacatcacaagcattatggcatatttaacatgtattctgtatcttccctttcattagtttttgcagatttaattgaaagattaatgagtaaatgaccttgtgtttctactgtctttattaaagttaaagcaaaagagatggctaaagttataagaaaatagagagaacgtctatttcaaatctataacataactgatggatggttatctagcttctctctatatgtttctaatattggggaatagaacagtgttcaaggaatagggtttatttttaatcagaaataattatgggaaagtttctttttatattgagttacacatacttctaatgatatttactgctactgtgttatggttttttggcaacatataataaaaattgcatgctgactgtggtagacaaaataacatccttccaaagatgtctgcattctaatccacaaaatctatgcttatgttaacttccatgaccaaatggaatttgtagatgtgactaaagtagggatcttgagatgagaatatgatcctgaattttctgggtaggctcaatataatcaaaatggtccttttgagaggaagactggagacccagaatcagaaaaagaagcaaggatgacaaaagcagagattagggagatgcacttttaaaatggggaaatgatgcacaagccaacccatgcaggctgcctctagaagctggaaagctaaaagaaatggatgcttccagagaccgtttagaaaggaatgcagccctactgacagtttgattttaagctcgtaaaagtcttcaggtttttgtctgccagaactctaataaatttgtgttgttctaaaccattaggtttgtggtaatttgttacagcaacaatagaaactaatacactggcttatatatattagtaataattggtaattgccttattaattaatgtgtacaaacataatcagccacataatgctagagtctatgattgtgaatatgaaaattagaaagaccatagacataaattacaatgtggtctaagtattataaaagaagatagctaatacagaaatgaaaaattgcagctgggaacannnnnnnnnnnnnnnnnnnnnnnnnnnnnnnnnnnnnnnnnnnnnnnnnnnnnnnnnnnnnnnnnnnnnnnnnnnnnnnnnnnnnnnnnnnnnnnnnnnnnnnnnnnnnnnnnnnnnnnnnnnnnnnnnnnnnnnnnnnnnnnnnnnnnnnnnnnnnnnnnnnnnnnnnnnnnnnnnnnnnnnnnnnnnnnnnnnnnnnnnnnnnnnnnnnnnnnnnnnnnnnnnnnnnnnnnnnnnnnnnnnnnnnnnnnnnnnnnnnnnnnnnnnnnnncaaaaaaaaaaaaaaaaaaaaaa

SEQ ID NO: 3048 - DNA, 632 bp, Macaca Fascicularis
  misc_feature (1)...(632): n = A,T,C or G
ccattggtgacttaaaattaagacaaggcagagccaaaatgggaaacagtcattttgttgtaggaataaacnnnnnnnnnnnnnnnnnaaattattcatcatgcagcatgacattaacattaggattgactgtacttggtnnnnnnnnnnnnnnnnnnntaatagttctattatacttaatgatgttggtttttacacagctcatttcatttttcactagaaatcagttatgaaagagagctgacctgggcatcccagccctgagtcctaggcccagtctccagctggaaaaccttaggctggtgtttatacatccctnnnnnnnnnnnncctcttctgcaaaatggtgtgaatagtaatctctgtgctgcttacctcacagggctattgtgaggacnnnnnnnnnnnnactgtaaagtgcaaagtgctgtccgcatgtgaggtaatctgattnnnnnnnnnnnctctcttgtagaggatttcaatgtatttctttatcatttgagtgtgtgtgcgatggatgaatatgtgtgnnnnnnnnnnnnnnnnattgttcgtgtccagttactttgcaaatttgtggacacctgtgattggacagaggggtttgtgctgtggcctaacactcccca

SEQ ID NO: 3049 - DNA, 239 bp, Macaca Fascicularis
tgcagtccatctttgtggcagacgaggaggacataccctgggtgtgtgaggacacgggggtgaaggaccccgaggagattcgcaaatacacggagaggatccggggcagatcttgaccctccacagacacatggtcagacaccagatggggcaacagcggtggaggtcccaccgagcctctcgtgtgccccccgccgctcgtgtggtgcttggtgatacaagtcccccgcctggtcccc

SEQ ID NO: 3050 - DNA, 2335 bp, Macaca Fascicularis
aaaactccatgtcatgctaaaaaaaaaaaaaagaaaagaaagaaaagaaaagaaaagaaaaaaaacactgtatctgaaaagcttagcacaatataactattaaaaaatcttttggttggcttggttagtagtgtgagaatgaagtaaaacgtaaagacttccacgtctcaggaatacttcagataaaaaataatcgtttgcggctccctgcccgggctcccagcagcctcttcccctttgtgcctgagctctgtcccctccgcagggccccagcagacccccaccagtcctgatgtggacagctgtttccaggccctgccagttaatcgcttctgggtttgcacccttgagctgtgtgcaccaggacacccccacctactggaagtactcagggacgcagcctgattcactgacacagcccccagctgcctgaggattccttgaagctctggcctttccacctattctgccgcaagaggccttgacgcctgcttccctggtggaaaaaggaaaagagaaactcaccaggccttcctgctgggtctccaccactggaagagcccggatagtgcaaatttaattggcagggattctattaaatatgtgactttatttggggttgctaatgaaatcaaaggcttgttgtatgacttacagtgtggacattcattgttaaggatgatgggatagaaagttagaccagaagagtttttctacctaaagaattgagagtctagaatttgtggaagggctgaacgtgcccatcttgccgcttctgggacaaacttttccctgacatgtaaaatgcctgcaactgccattaacaggaaagaaatggaagtggtactgattcactcatcagctccaggcaacgtgtgtgtgtgtgtgtgtgtgtgtgtttattttgaaataactttattcgcagcttaacactttgcactgcacacagcatgacttagaatttacttttggtgttgtccagctgctgccaaaaattgggtagaatcagatttgtattctttgttggtgcctggaatagttgccaaaggtacaaaggtgatgttgttccttgctgagacttcgtggaagagggcaaaactttgatcatctgcccttgcacttgggcagtgttggaggtaattggagtacaagtgccaatttgcgggaacaattgtaaacacctttgataccaatgccatcatcccatttttactgattagaaaaactttgctattaataggtgcaaagtccatttcaggtataattggtaaggaactgagtgcactcatgggaagaaaccttgttttgttttttgctcgcttttcttcttatccccttttctcagttttatggctggagacatgatttattgcagccatccatcttgggggctcatccatcacacccgggttgctaggagattgtggcagcagctgtttgctctgaatcagacagaaaagttgtcaatcatcaaaggcaggtgaatagcattagaaacacgctattgtcagacggaataattaatcaaagagagaaaagataattaaaaagatatgacccttgcaagtacttgctctgggttgcctgtaaaaaaaaaaaaaaagaaagaaagaaaaaaagaaaaaagaaaggaagaaagaaagaaaaactgcttggtcttttctagacacttaagcagctgagggctgataaaatatgcactctgcagtgcatagtttttaattaattgaaaaaggttcaacattcaaagacgatgctggagagaagtccgattatgaacagaagtaatatttattgtttgcttgaagggcttgacacagagttctaactttttgttaaaaatctctggcttccctggctggcgaggaggcgcaggctggggtcttcaggtatccgctggcgccccatgtctgttctccacttcccggcccgcagtcttggctcttccagagagtctcagaccccgaagaactggagtgggaccctgccgaccaggatccgatgtccttctacagttctggtgggtctgaaccttcattccttagataaccaggttttttaaaagatgaagatgggaagcttgaaagacatgccatgaggtccaccatcaagatgcccagagtaagctatgtatctcctctggcctctcgcctaactggaacacgctctaggtcctcaggacctagagaatccatccatcctacttcagatccatctccgtgtggtcccacaaagtgtactgcagagtcccagccagagagcgataatctggcatcacattctgaaaaggccccccagtcatggtttaaacaccattctgggtgcccctttcagc

SEQ ID NO: 3051 - DNA, 735 bp, Macaca Fascicularis
  misc_feature (1)...(735): n = A,T,C or G
taaacttttattgtaattaatataaagtcatcaatgttttacaaattgtcaaaaatgctttaagtacaaaaaaaatacattagtaaaatgaaagttatgttgtattatttggtgatacacttaatactgccaacatgcacaacgtatgcnnnnnnnnnnnnnnnnnnnnnnnnnnnnnnnnnnnnnnnnnnnnnnnnnnnntattgtctgattataaattcattgcttcagtcagttttctttcttcaggnnnnnnnnnnnnnnntagtctgctgttggggaatctgagtctgatgtggcaagttctgctgcgtttgcatnnnnnnnnnnnnnnnnctatcatagttgtctgtgtgtaaaggagnnnnnnnnnnnncagtcacagggtggaacacaggaagcgttgacaggnnnnnnnnnnnnnnnctattctnnnnnnnnnnnnnnnnnnnnnnnnnnnnnnntctgaatagcactgtgatgaaccagttggatgtctggtgtttgcatgtttctcttttccacgccttcccgtcggcagcacatgatataagcaagtatnnnnnnnnnnnnnnnnnnnnnnnnnnnnnnnnnnnnnnnnnnnnnnnnnnnnnnnnnnnnnnnnnnnnnnnnnnnnnnnnnntcagaagggggtttgtattccccaccatcaggtaaaatcccctctccacgaatcacttcctgnnnngtggacacttgctttgttttatcaac

SEQ ID NO: 3052 - DNA, 1317 bp, Macaca Fascicularis
aaaggaccaaaggcgacccgtgcaggtgcacgacgccagctcccttcttgggggcgggggcctgggggctgccatggcccccagccacctgtcagtgcgggaggtgagggaggatgagaagcccctggtgctggagatgctgaaggccggcgtgaaggacacggaaaaccgcgtggccctccatgccttgacacggccgccggccctgctcctcctggcggcggccagcagcggcctgcgctttgtcctggcctccttcgccctggccctcctcctgccggtgttcctggctgtgactgcggtgaagctgggcctgcgggcccgatggggctcactgcctccaccgggtggcctgggggggccctgggtggccgtgcggggctccggtgacgtgtgtggggtcctggccctggcccctggcacgaacgcaggggacggggcccgggtcacccgcctgtctgtctctcgctggcaccgccgccggggcgtgggcaggaggctgctggccttcgcggaggcccgggctcgggcctgggctgggggcatgggggagccccgggcccggctcgtggtccccgtggctgtggctgcctggggagtggcggggatgctggagggctgcggctaccaggccgaggggggctggggctgcctgggctacacgctggtgagggaattcagcaaagacctgtgaggctacaggctgacagccagggcagggaaggagggaggggcgccagcacctgaagagcgcttactgtgtgcaggtacttttacgtgctctccctcggtgagtcctcagccacccagggcccagaaacagaggcctgccgaggggaggagcctggcctgtgcccggcagtcggcagtgtgaggtctggagtgtttgagcttctaagagtgaaatgactccttttccttcctggccctcaggggcctctcgaggtcagcctctccaaaacccctacctcagctctgtttgcactgagaaatctccccggtggatgtctgcaaagtctgtgccccaagcctgggagagctatctggggagggggagaggaggcccagcagaatatgccctcgagttagggtttgcgactccgcctccctgggacccagattgggtcagatgcctgtgcttggaggggacaaggttgactgcttagcgggcgcggcgcacagggctgccaggcctggcccctctccgggaaggtcggtcgagagctgagatgggcagccctgtcccttcccccagacccatgtggttttttccaccgtttgttaataaagcctggaaccccaaaaaaaaaaaaaaaa

SEQ ID NO: 3053 - DNA, 705 bp, Macaca Fascicularis
  misc_feature (1)...(705): n = A,T,C or G
tagtagtggttagaaagatgaggagcctttttaannngacttacatttgtaaatgaaaacaagtctgtgaatattcagatgactacttcaaagtaattcagtttttttattagtatttttccagcttatgttctcccacgagctattttactttgctgaattttgtggttaatttggtggatatatcctgccttatttaggattatagctggataagaaaattgccttttcattgtaagtgcccagttttggtctctagtttaaaggtacnnnnnnnnnnnnnnnnaggaaaacactcccctacaccccagtttttgtgttaccaagaaaaaagaaaaaaagtactggtttcataggactcaaccagaattggtcctacacatatgttgagtgtttagtttttgcaaataaggtttttgagtgtgataaaacactacagaagtgctaaatgtattgagaatttgctgccgattgtatttataacaattattttaaaaagtttgcagaaatttagcactttccctccaaatttataggtgtaaaagaagcggggnnnnnnnnnnnnnnnnnnnnnnnnnnnnnnnnnntgaaaatttattttgagattcagattcctaaaaggaaatttcaccacccaagtcatgcacttcttagccttttacaagccaacagactgacatgannnnnnnnnnnnnnnnntaagat

SEQ ID NO: 3054 - DNA, 705 bp, Macaca Fascicularis
gggaggggtggggacaagggacaggtcagaattgctgctgtcctgcctggggctggagagaggggtgcccaggagcaagatggcagatgggtctggccctggcagagcagggtcactcggcagtttttcttgttgctccccaagaaaacccctgcggagtcaagggagcacaaccgggactgcatcctcctcgacttctttgacgaccacgacatctggcacttcctctcctccatcgccatgttcgggtccttcctggtaagcgggcctctcggccaagccgggtgggtgcgtgaaggtagcagctgcctccttctctgtggctgatctggcgtccaccccccaggtgttgctgacactggatgacgacctggacactgtgcagcgggacaagatctatgtcttctagcaggagctgggcccttcgcttcacctcagggggccctgagctcctttatgtcacagaccgggcactctgtcgtgctgtggcgatgagtcccagcaccgctgcccagcactggatggcagcaggacagccaggtctagcctaggcttggcctgggacagtcatggggtggcatggagccttgcagctgtcctctgccaaggaggaggcctgctcccctggaacccccggacgttggccaaattgctgctttcttctcttccatgggcccccgtcctttggctctccatttgtccctc

SEQ ID NO: 3055 - DNA, 1376 bp, Macaca Fascicularis
agtgctagcctagccgcattgtttactcttcacctacccagaacacgctggtgtggcagagagagcacgtatgcctggattttggatgctgagcacagaaagccccatttggtgactcacaccatgcactgaggcagcaggcagtgtggtggggccagctagttaatcttgttaacactcgcgttacatgaactgtgtaggaacggctggaggcgatgatgcgccggtccctggagcgcacacagcagctggagctgaaaaagaagtattcgtggggagcaccactggccattggacctggaggacatgatgcatgtgacaaactttcaacatcaactatgaatttgccaaagccgacggagcctcccatgagtaaacgcctgtcttcatccaccgtggcaatatcctattccccagaccgggctcctcttggccctcttaacccttcttacaagtcttcacccactcgaaacattgagaagaagaaaggaaacagcaggaagaggaaaagaagaaacaggaagaggaagagaaaagaaaggcaggcgaggaggctaagcggaaggctgaggaagagctattgttgaaagaaaagcaagaacaagaaaagcaagaacaagaaaagcaagagaaagccatgattgaaaagcagaaagaagcagcagaagcaaaggcccgggaggtagctgaacagatgcgtctcgagagagaacagatcatgctgcagattgagcaggagagactggagagaaagaagagaatagatgaaatcatgaagagaacaaggaaaagtgatgtgtctccacaagtgaagaaagaagaccccaaagtgggggtccagcctgctgtgtgtatggaaaataagacaaaaccagttgtccccaacaaaatggaaatcaatggattgaacacctgccaggaagtaccgcttacctgccctttctgttcaagagatgcccaagaagaaagcagagaaagagaagagcaataaggaaagagaaagtacgttggctcagcaggctgctggcccgcaaggagaggaagccctagagaagcatgtagtggacaagcatgccagtgagaagcactctgctgccacaggagggaaagccgaaaacagcgcagccttggggaagcccacagcaggcaccactgatgcaggagaggctgcgaagaccttggctgaaaagagaagacaggcccggctgcagaaggaacaggaggagcaagaacgactggagaaggaagaacaagataggctggagagagaggaattgaaaagaaaggcagaggaggaaaggcatcgcctagaagaggaagcccgaaagcaggaagaagaaaggaaacagcaggaagaggaaaaaaaaaaaaaaaaa

SEQ ID NO: 3056 - DNA, 792 bp, Macaca Fascicularis
  misc_feature (1)...(792): n = A,T,C or G
cagatgtgagttggagtgagaatgacagcgtggcaatnnnacgtgaagatgagatgagagggggcacgtactgaggtggatcgggggtgcctcttgtttttggtgccttagacccttnnncaatctggtgaagcctctaagccccttctcagaataagattttttcaggcataaaacaaaatatatagaattaaaagaaaactaattatattgaaatagttattaaaatactaaaacaaatttgtgatatagtaatatacgtacttttttattaataagatctaatggtaggtctaatatgactataattttgaaatattttcaagatacctataaatgatcatgatagaaaatagttaatttctattgttaacaatttgcctatattgctaatactactgtggtttttgggctttgtttaaagttagaagaaatgttaaatttcagttgggggttagtaaaaataaagatgggattttttttctcattcaagttcgcagacccccaaagagatccatgaaactcaagaacttatgttctggctgggcgtagtggttcacgcctgtaatcccagcacttggggaggctgaggtgggtggatcacctgaggtcagnnnnnnnnnnnnnnnnnnnnnnnnnnnnnnnnnnnnnnnnnnnnnnnnnnnnnnnnnnnnnnnnnnnnnnnnnnnnnnnnnnnnnnnnnnnnnnnnnnnnnnnnnnnnnnnnnnnnnnnnnnnnnnnnnnnnnnnnnnnnnnnnnnnnnnnnnnnnnnnnnnnnnnnnnnnnnnnnag

SEQ ID NO: 3057 - DNA, 746 bp, Macaca Fascicularis
  misc_feature (1)...(746): n = A,T,C or G
atgcagctcactaccccatnnnnnnntannnnnnnnnnnnnnnnnnnnnnnnnnnnnnnnnnnnnnnnnnnnnnnnnnngaccacagtcgtcttagtggttccccaccgaagtggagtggccccagggtcagtctggtgggaggacgatgcaacccaaggacnnnnnnnnnnnnnnnnnnnngggaaatgaggaggcagccaccagcgaatgcgaggtctcagactaagcctacctgctctgcaagtctcagtggcttcatctgtgaagtgggatctgtcacaccagccatacccatccctctgtgctgcggaagcaacaggaatcaagagctgccctccttgtccacccacctatgtgccaactgttgtaactaggcttggagatgtgcacccatggggtctgacagagagcaaatacctcaccctgctacacatacaggatttgaactcagatctggctgataggaaagtgaaagcacagactcttactgctaacttttgtgtattgtaaccagccggatcctcttggttatttgtttaccacttatattattaataccattatccctaaatctttcttcccaccccaccctccctggagtgtggctgaggaggcctccagcccatgtatcatctggacagcagcctgctggtcacagcctcctctgtctgcccttcaccctggtggccactcagcttcctacccacacctcccccagaagatcccctcaggactgcaacaggc

SEQ ID NO: 3058 - DNA, 941 bp, Macaca Fascicularis
  misc_feature (1)...(941): n = A,T,C or G
gggaactaggtatacnncaggagaannnnncacctaattcactaatctatgtaaatatccaaaagcttgtcctatctttccgcattatttcaagggatcattttatttttcattctactttcacagcacttttctagtaaattctgtaacacagaaattccgtcttggaatcatttcatgttaccaataattctagacttttataacatttaacatgttgatggaaatagctatctgctagagtcttttgccttaactattcattaacatatgctaatgttcacaaatatggattgactatttacaaacattagaatcttgtcttggttccattttgatggctaatatttgttatcttaattaagactgtatttctgatgttatcattccttgaaaatattgactaaaactgggtccttagaaattccaggtggagctgatttaccgatgactgagggaaaaaatcaaattttactaatagtaatgctccaaatcaattaatgacacatctgttcaataaataaagagcttaaatatacaaaacataagaaatatctgagcaacaaaatttgcggtctttacttttgaatagctactcaagaaaaggttttaaaggtgaaagttatgagtaatgtcatcacaataagctcttgtttaaaattcttttcttttatgtataattaggtttatgtttcatgtctttttaaaactttataaaaggtttaattatcacatctattcttcaatttggaaacattaaatatttttgattgtaaaataatatttatgtacttgtgtctgaaaagttgtaaaatgcttacctaagctaaacaatatctgtgactcccaagactttaatgagtactatttcattaacaagaagtcagaggcaaatagaggaacaccattatcttacttctctctagaatactgttgaaaca

SEQ ID NO: 3059 - DNA, 722 bp, Macaca Fascicularis
  misc_feature (1)...(722): n = A,T,C or G
gctggaaggacagcagtgttctcctgacctcgcnnnnnnnnnnnnnnnnnaataaaaggtgtgcccagcctaacctgtgccctgtggtttctggaaggaaaggcagactttaggtggtcccgccgggacctgcagatnnnnnnnnnnnnnnnnnnnnnnnnnaggtacagaggggtnnnnnnnnnnnnnnnnnnnnnnnnnnnnnnnnnnnnnnnnnggacagacccctcagtgagctgcaggtgtctcacctggcagccgtccagtactgctagcttcctctagagnnnnnnnnnnnnnnnnnnnnnngggtgtgtgggcatctctgagcagcccttgagtccaccttgtgccagatcagcagtgccacccaggctctgcctcctggtgttattctttgccaagagctttactgacatnnnnnnnnnnnnnnnnnnttagaatggtgcctggcacacagctggtgcttgatatggttaagccttgtgtccccacccacacctcatcttgaacggtaatcctgggtgtttagggaaagacctggtgggaagtgactggattatgggggcggttttccccatgctgttctcatgatagtgagttctcacgagatctgatggtttnnnnnnnnnnnnnnnnnctggctccctcctgctgccacgtgcttccgcttcaccttccnnnnnnnnnntaagtttcttgaggcctccccagccatagaa

SEQ ID NO: 3060 - DNA, 788 bp, Macaca Fascicularis
gaatatttgcatataacctgtgtacatcccgtatatttaaatcatctctagatcacttgtaatacgtaaaacaatgtaaatgccacgtaaataactattatttaaggaataatgacaagaaaaatgttcacgttcagtatggctgcaattttttgtgtgtgtgaaatattttcatttcaaggtcagttaaacccattgacatagaaggctgactgcgtgtgtatgtatatgtgaatacacacacatacacatacacacacacatacatatatttctgaaaggtaaatattcttttttttaaaaaaatattattatcacagctaaacaaattaccaataattcttttatcctcatatacccagtgttcagattttctagattggctcctacttttttttacagattatttgaatctgaatcagttcatatactgtaatgtttgataacttaagtgtcctttaatctataggttctcttttatctctttattaaattccttgtaatttattgtactaaatagattgtcttctagaatttcctgtagtctgaattatgtagtattgtttgacatgttccagtgtcctcttattttctgagttggtagttagatctagaagcttgattaaattcagattttctttctgttagatcgtcaacttgatagacagtttcatttgtttcattttgcttttgatacattgttttttagaattacctcctaaaattttgatttaattttataatcatgtaaaatgcttataaagttccaaattcagataccaaaacac

SEQ ID NO: 3061 - DNA, 784 bp, Macaca Fascicularis
gaaaatctgtgaagaaccttctgggtatagggtgaccaactgttccagtttgcatgaagagggtttctgggagcaagactttcaatgctaaaattagaagtcctaggaaaactaggacaagttggcccccctacatggatggtatctttaggaatgaaaataataggcgagttgcttcttacccttctggggaaagaaagtaggccatgccggcccataccctcatatgcgtaagagccaagggacctcctggaattaaggagatcaagaccctgactcctatctttttgcttttttgctttttaaaataacagctttattgatatataattcatatatatatacacacacatatacatatatatatatacccatttaaagtgtagagttcagtggtttttagtacgtttacagagttctgcacccattgctacaatcagttttagaacatgttccccacctcaaaaagaaaccttatattcattagagtcatgcccttttcctccctccaaaacccctcagccctaagcagctgaatttacattccatctctatggatttgcctattctgacattccacataaagggaatcatacaatatatggtattctgtgactgttctttcacttaatgtaatgttttcaaaattcatctatgttgtaacatgtattagtatttcattgctttttataactgaataatgttaaattgtatgaatataacacagtttgtctattcattaattggtggacatatgggttctcactgtgtatatatatatgaa

SEQ ID NO: 3062 - DNA, 752 bp, Macaca Fascicularis
  misc_feature (1)...(752): n = A,T,C or G
tccaggcacatcccggacctgtaggnnnnnagagagggccctgaacatttccctcccgggagaggaggaggtcagggcggcccagagagggctgcgaggatttccctcccaggagaggagatcagggccacctgcacacactctgcttagagcctggaagggaaccacgtgttctgacatcatgtaaacctcagcacacagagatactcggatttgacaaaataacatttgagtatcagattcgccctcaccccctaccctagaaataggacaattcacttcattaaacccaggacaatcccatggaaggcagtgcagaggcagctgtgtgggctgcagatttcctgtgtggggttaaggatagaaaatgcatctccttccggcccttcccgcagctttcctccatcttagatagatcgtactctccaggccgcaccagagggaaatctccctccggcccttcccgcagctttcctccaccttagatnnnnnnnnnnnnnnnnnnnnnnnnnnnnnnnnnnnnnnnnnnnnnnnnnnnnnnnnnnnnnnnnnntattgcttatgtctctacgtggtattnnnnnnnnnnnnnnntttaatgtagctatcatttcttttccaaaattacttctctttatctggaatttaattaatagaaatgaatttatctgaatataggaagcatatacctacttgtaatttctaactccttatgttgaagagaaacctccggtgtgagatataaaatatat

SEQ ID NO: 3063 - DNA, 2936 bp, Macaca Fascicularis
aaaaacacccgtggcccgccgtctctggcggttggtgggtgcggttgcccctagtttgaggcctgctcgattactggcaagacttgggcaagccccgggggccgctccgaccacaacagggaaagggaaccttaatctcatctttaaggagaattactgagtgacgtgaaggacccttttcggttggaaaggctgaattgaccaacactgtttggatgaatttgaccatttcttaggagactcgaatgttaagtttctataaatgaatgaaccagttctctgttgtttggagcaatgctgaaattccaagaggcagctaagtgtgtgagtggatcaacagccatttccacttatccaaagaccttgattgcaagaagatatgtgcttcaacagaaacttggcagtggaagttttggaactgtctatctggtttcagacaagaaagccaaacgaggagaggaattaaaggtacttaaggaaatatctgttggagaactaaatccaaatgaaactgtgcaggccaatttggaagcccagctcctctccaagctggaccacccagccattgtcaagttccatgcaagttttgtggagcaagataatttctgcattatcacggagtactgtgagggccgagatctggactataaaattcaggaatataaagaagctggaaaaatctttccagataaccaaataatagaatggtttatccaactgctgctgggagttgactacatgcatgagaggaggatacttcatcgagacttaaagtcaaagaatatatttctgaaaaataatctacttaaaattggagattttggagtttctcgactcctaatgggatcctgtgacctggccacaacgttaactggaactccccattatatgagtcctgaggctttgaaacaccaaggctatgacacaaagtcggacatctggtcactggcatgcattttatatgagatgtgctgcatgaatcatgcattcgctggctccaatttcttatccattgttttaaaaattgttgaaggtgacacaccttctctccctgagagatatccaaaagaactaaataccatcatggaaagcatgttgaacaagaatccttcattaagaccatctgctatcgaaattttaaagatcccttacattgatgagcagctacagcacctaatgtgtagacattcagaaatgactctggaagacaagaatttggattgtcagaaggaggctgctcgtttaattaatgccatgcaaaaaaggatccacctgcagactctgagggccctgtcagaagtacagaaaatgactccaagagaaaggatgaggctgagaaagctccaggcagctgatgagagagccaggaagctgaaaaagattgtggaagaaaaatatgaagaaaatagcaaacgaatgcaagaattgagatctcggaactttcagcagctgagtgttgatgtactccatgaaaaaacacatttaataggaatggaagaaaaggaggagcaacctgagggaagaccttcttgttcaccccaggacgaggatgaagagaggtggcaagacagggaagaggaatttgatgaaccgactttagagaacctgtctgaacctcagcctattccttccatggacctccgcaaacttgaatcaattgtagaggatgccacatctgaccttggatatcatgagatcccagaagacccacttgtggctgaagaatactatgctgatgcatttgattcctattgtgaagagagtgatgaggaggaagaagaaatagtgttagcaggaccagagaaagaaatcaagaatgagggatcccagcctacttacagaacaaaccaacaggacagcgatattgaagcgttggccaggtgtttggaaaatgtcctgggttgcacttctctagacacaaagaccattcccagcatggctgcagacgtgtccccaggaccaacaattttcaacagtgtgatggccaggaccaagatgaaacgcatgagggaatcagccatgcagaagctggggacagaagtatttgaagaggtctataattacctcaagagagcaaggcatcagaatgctagcgaagcagagatccgggagcgtttggaaaaagtggtgcctcgagccagcgactgttttgaagtggaccagctcctgtactttgaagagcagttgctgatcacgatgggaaaataacctactctccagaaccatctctaggcaacagtcaaaaagaagcaggagttcaagtggacaaatgtatgtgaaaattcatttaacatagaagctgaactctattatggggaatggatacaaaagcagagctctcatattgactttcaattcctcgtcagaagtactggcttctttagagagcggtgagcatggctgcctgtgcttggagtcataagtgttatttggactataccctgagataagcttgtagatcaagtttggctctcttgtaaagcatttctctcatgtgcgccctcagggcttccagcagaattgagtcaccctgaccaatgacctgggagaagccatgtgctcttcatcattttcagctggaggacagagctcagtgcctgactgcctagggtctcgtggactgtgggcagccagccagtgaaggtcactggaccctagcctacaacatgctgagctgcagcccagaagccagacatacctgtcttagctgacgtgtttttggtccacttttgcccttccatgactaacaaggaagaaatgtatgtatttcatacacacacaaggacctggattaaaaatccaaagagtgattctcttctatgatttatttcaaactcatccatagataattcaagatttgtattcaaaataaacatagttttcacagttacaaaataaatcacctattttatctttaaaaaaaaaaaaaaaaaaaa

SEQ ID NO: 3064 - DNA, 2101 bp, Macaca Fascicularis
tgtaaactttttttttttaatttggaatttagtcacatccatgaaattttccaatctagtttctgtggaaattttttaaccgagagaaacaaatataaacatcttcaaatcttcctaagtgaatatttaaaatgcacaattgcttatcttctgtttttctgtattcagatacttagatctgttgtatatattagtctagacactctcactaatatccacagtatttaagactctaaatgagatttcttaagtattttattttattctctgtaaatggttttgtataatctttaaaaatctacactttgcctttgtagatatttaagggaaaccatttggggttgtcttgcatgtatatttttgttgtagataagtgttgcttagttatttctgaaaattttggttgaaatgcttacagactttaatacagtatatattttcaaaatataaacttttatatttctgtgataagttaggatatgcgttttaggcaatatttttcattaatatcacttgttcttttgaaaaatagcatactggtttggtgccaatttttttcattagaatataatgctcttatattattggagagcaggttaatcttttttcaaagtaattgcgtttgaagtataatttcaaaatgtattgaatttgtgaataagccttaccattaggatcagtaaatttttcaactttgcaactacataagtagtttaagatctccccataaattctcactgtgtggcagttgatggagtttgtgaacagagccttaagcttgttgcaaaaaaatttaaaaagggtaatacgggttgtttcctccatgcaatgtaagccgtgctgatggactgaatacagtctgttcattcatggctaatctgaagagtttgattgagttgatggcggcagggaccagatagacacgttggtgattgtctttggccataagaatggaccaaggacaggttttccagagtcaccttcatactgtaaacatggtttagacacagtcatagggaaggctgctggtccatcatttgttctgaacaaatggcatttcctgctcctgaccctggcagttgaccccagatttccttgtagataacttggaaacgtccattctgggtaagctcagcactgcttgagagatgtttgtttacctatgagtcttactgtgtagacaatctgaagtcaattttagttacacaatcagcattcccatgtgtcctcagtgtcttatcaatgaactatatgtatcaagccatactaaactggagtttagcaggacaaaggcaaactagatgtagaacataacgtatcagctgaatatgaacctccagggtaagaatttttcagacatgtctatactgaacagtaggatcctgcacttgccaaatgtctgcctccttttgttcttcattgacccattctaattcctgttaggtgtgagaagaattgtcttcagttctctctccattctcattcgtgatgaaatcattgatccattgaccagttgagaaatgattgatgctgaagaagtggtattctattggtaaggcttattaccaaacttctgataatgaagcaggctaccaaaaacttatccagcccaccctaggagtgtttggatttgatcatggatgtagcatacaccaaaatccaccgagacctttgcaaaattaggctacttgttttattttgccagattatcatgggagagactttaactagttctgaatatttgtaagtctgagtacttcatagaattataaagcaggtacagctgaccccttctcaccatgttgtaaatatttactgagactgggtgcagtagtgagggataataatcttctgatttatcaaatgctgactgtctagagcaaattgtacactctctttgtgaatggtcctgtaacgtgtatgaacacatttctgggtgccttagaagttgtatttttcatgtgtgctaatatgcagtatttatacattgtgagaagctgctttgaataaaaaggttgaaacttaaaaaaaaaaaaaaaaaaaaaaaaaaaaaaaaaaaaaaaaaaaaaaaaaaaaaaaaaaaaaaaaaaaaaaaaaaaag

SEQ ID NO: 3065 - DNA, 712 bp, Macaca Fascicularis
agactccctttcctgttcttccagttgcccttccactctgggcctacccacatttctgtccagtggccactgttgttctttcggtctttgcaaaaggatctttctgtacccagccctgttcctggccttcactttaagctccacagaagaggtttggctattttctgccaagacactcagcttcagagacatctgttgaatgcccactgggtgctaaggctgtaccaggacctgagaataccagtaggatcagaacaccaggcctgacctcaaggaatttacagccaaaagaaatgccacacatctccactctctgggttatcctttgggggctgctttagccagagatgcctccaagaccttaagcacaaatgggaatctttacggactgtctctcatgttggataccccctcctcactccacagattctgtcagcgtctgtgaaaacaactaggatttgactgaactgaaaattcactcatagccccgtagtccagcatccctgggagctcagttgtcccgtttacagtatctgcttccaggatcaagaaaagtgacttaaaacaaacatgtgtgttctttggatatttcctctaggttttatgcaaggaaatgtcttggtgtgagcacttcgcaaatgtgcaagaatattatcagttcggcatgtgtggtgtgctttatagaactgctgcactttgaatgaattaatta

SEQ ID NO: 3066 - DNA, 692 bp, Macaca Fascicularis
  misc_feature (1)...(692): n = A,T,C or G
tagagcactggagttgcaggtgtgagccagtcatgcccagcccctcagtttttaatacaaacaattattaatataacctaggaagaaataaactattatatatgaacaaaacctcacaactgtacagatatccaaggagatgtgaataaatggaatnnnnnnnnnnnnnnnnnnnnnnnaaagcaagcctttttctaaattannnnnnnnnnnnnnnnnnnnnnnnnnnnnnnnnnnnnnnnnnnnnnnnnnnnnnnnnatattactcctgcactctagggcatttcagtaagaaggtgctagaaaggacttaannnnnnnnnnnnnnnnnnnnnnnnngatttcagtcagggtttannnnnnnnnnnnnnntctctggcttggatgctgtcagaggtgggggtatgtctatgacggactatcttaatgaatcttgcccaggagagaagattagttggaggctagtgctgtaattggtaaggaaacaacagtcactatcctgtgggagaaannnnnnnnnnnnnnnnnnnnngtggtttggannnnnnnnnnnnnnnnnnnnnnnnnnnnnnnnnnnnggagaggttctgtttctgtcttgctccctcannnnnnnnnnnnnnnnnnnnnnnnnnnnggtgttctctgaaatttatgttcaacagaataccaaggccagctcccagatgtcc

SEQ ID NO: 3067 - DNA, 775 bp, Macaca Fascicularis
  misc_feature (1)...(775): n = A,T,C or G
agtgagcccccatgtttgctgtcaatgggtttaaaatcagaattaacatttgccaccccccggtggaagtttgaagatttttaaaacagaaatgtgcatttttcaagctgtttttctttatgttttttaaggaccatttttaattagctctttgatacaaagtaactcagaacgtcaaaacctatacccactaaagggaaggctgccgggaaggcagatggaacaggaatggagcctgtctcaggaaggccagctgcaggtcctcaagaaaatcaaagaagggaagaaattctgagtttgaggtacaggggcttcaggggtgagacgtcccttcagggccnnnnnnnnnnnnnnnnnnnnnnnnnnnnnncccagatgctgtgcagggcatgggcggggctgctgttttactggggaggggagcatcctaaaaatggggtccnnnnnnnnnnnnncagacctcacaccgccgaggaggcctttgccacagggcgtcctcccgggatgcannnnnnnnnnnnnnnnnnnnnnnnnnnnnnnnnnncagcacgacgtgtccttgtactgacttctcccggttcttgtttgaaaatactgtagttcagactcttaatctccatggcagatatgaactttgttgtcacaaaactagtggaggaaaatgtaaaaatagacttttggacacacagctgttnnnnnnnnnnnnnnnnnnnnnnatttataacttaacgtttctgtttataaaatactagtgatttgcaatgtattttactgg

SEQ ID NO: 3068 - DNA, 727 bp, Macaca Fascicularis
  misc_feature (1)...(727): n = A,T,C or G
tcataatagagannnnnacggaagtttactgtcatgagtctcggttgntgnncacatgtgannnnngaaggatgaagatggagnnnnnnnnnnnnnnnnnnnnnacctttnnnnnnnnnnnnnnnatttttaaaaattgcattggggccttcattatttaccataatattttaactttcatagttttgtcaccttttgtactacgnnnnnnnnnnnnnnngagcgatttttctctcatgctatttaccccacatacaattttcnnnnnnnnnnnnaaaataaaaacctgttaataggttggaaagctgggtactctattcatatattnnnnnnnnnnnnnnnnnnnnnnnnnnnnnnnnnnnnnnntaattttagagttgtgaaatgattttaccaattaggaattgaatgtgtgtttttttttctatttaataaaagcaaatttgaataaataagccggtgtagataaacttgataatcatgctttttcttgtttggaaataagnnnnnnnnnnnnnnnnnnnnnnnnnnnnnnnnnnnnnnnnnnnnnnnnnttccaaannnnnnnnnnnnnnnnnnnnnntaataataatactcagcatttcttgttgcctaagtgagacgaaacttaaatgttacagtatttacttcatgtattcttgtactgttcatttccaattaattggtattgtatatctaatatgtgatatttgaactgaataaaact

SEQ ID NO: 3069 - DNA, 1512 bp, Macaca Fascicularis
  misc_feature (1)...(1512): n = A,T,C or G
tgacaaatttgaaaagtagagtgcnnnnntnnnattgagatgtgacagtcnnnacacagttaggaataagtgacagttaagtgaatatcacaattactagtatcttggttnnnntgcttcattcctaagtattacgtctctttattgcagatgtcagatcaaaaagtcacctgtaggttgaaaaagctacagcattccattttgtataataataataataataataataataataattagnnnnnnnnnnnnnnnnnacttcaacgtaatactgaaaaannnnnnnnaataccaatnaaatatatgctaaatggtactttgaagagtatgcaaaactagaaggccaggaggaggcaaataatatatctttccgatggtgtctcccaagtgttggtgctttgggtttttataagttgtgaaaaggaagatgcacatttattcattctccatggtgtgcacggaaatgtgtttgaatgtggatgtaaaagaaatcgagtaataaagaattagctggctcatgaaatagtgcaatgttggatgcttcaagaggtataatcctattttattagcacagnnnnnnnnnnnnnnnnnagtttatctttttagaaaggataccatataggttcgtaaaaaatatttacaggaagcaaaatagatctattactactttacccccctttctttaatttgtataatttttgtactatatatcgatgtgtaaatgtttagagccttcattatgaaaatatcaataaatatttcattagtttacatttaactctttgttataaaatgaaacttttaaaaataagtgaaatggatgatttcccagtggaagtacgtcaacagtcttaagatcattgcaagatttcataaaatatttaagtatttgaaaaagaaacaaaatgtcttcatactttagggaaacgaatactctgtataccttctgtacaaatgtttgtgttttcattgttacactttggggttttacttttgcaatnnnnnnnnnnnnnnnnnttttnnnnnnnnnnnnnnnnnnnnnnnnnnnnnnnnnnnnnnnnnnnnnnnnnnnnnnnnnnnnnnnnnnnnnnnnnnnnnnnnnnnnnnnnnnnnnnnnnnnnnnnnnnnnnnnnnnnnaggannnnnnnnnnnnnnnnttgtttagttttgaatttctgannnnnnnnnnnnnnnnnnnnnnnnnnnnnnnnnnnnnnnnnnnnnnnnntcattttctcatacagttgtacagatttaactgggaccatcagttttaaannnnnnnnnngctaattaataatcatctgctttaagacgcaagattctaaattaaactttatataggtatagatacatctgttgtttctttgtatttcaggaaaggtgatagtagttttatttgatactgataaatattgaattgattttttagttattttttatcattttttcaatggagtagtataggactgtgctttgtcctttttatgaatgaaaaaaaattagtataaa

SEQ ID NO: 3070 - DNA, 466 bp, Macaca Fascicularis
cgccgtgatgtttccccgggaccaagacgtggaacatctcgttcgcgggctgcggcttcctcggcgtctactacgtcggcgtggcctcctgcctccccgagcacgcgcccttcctggtggccaacgccaagcacatctatggcgcctcggccggggcgctcacggccacggctctggtcaccggggtctgcctgggtgaggctggtgccaagttcattgaggtatctaaagaggcccggaagcggttcctgggccccctgcacccctccttcaacatggtaaagatcatccgtaatttcctgctgaaggttctgccaactgatagccatgagcatgccagtgggcgcctgggcatctccctgaccctcgtgtcagacggcgagagtgtcattatattccacttctactccaaggacgagctcatccaagccaatgtctgcaacggtttcatccccatgtactgtgg

SEQ ID NO: 3071 - DNA, 304 bp, Macaca Fascicularis
agtatgatcatcagtgattcctttaaatagcaaaaaagcacagtcctctttaggcctctactcaataatagaatacatcactcttaacaaaatcattctacataaacagatagctccttaaaaatagtactatctcattaaatctaatttgacagaaaggagtttaagggaaaaaggagtgttttgtaagtgaaaaagtacaaatctttgacctttatcttgacattttaatatgtcaaaaagccaaaaaccttcatgtaattcaatatagtgataactttttgcaccataatgtgttttttac

SEQ ID NO: 3072 - DNA, 2192 bp, Macaca Fascicularis
ctgggcgcgagcggcggagtcggcggggtccctggcgccgcagaggccgcgggcgaggaccgggaggaaagagaggggaatatgaagtcagccaagccccaagtgaaccacagtcagcatggggaaagccagcgggccttgagccccctgcagtctactctgagttctgctgcatctccttcccaagcatatgagacctatattgaaaatggactcatatgccttaaacacaaaattagaaacatcgagaaaaagaagctcaaactggaagattataaggatcgcctgaaaagtggagagcaacttaatccagaccagttggaagcagtagagaaatatgaagaagtgctgcataatttggaatttgccaaggagcttcagaaaaccttttctgggttgagcctagatctactaaaagcgcagaagaaggcgcagagaagggagcacatgctaaaacttgaggctgagaagaaaaagcttcgaactatacttcaagttcagtatgtattgcagaacttgacacaggaacacgtacaaaaagacttcaaagggggtttgaatggtgcagtgtatttgccttcaaaagaacttgactacctcattaagttttcaaaactgacctgccctgaaagaaatgaaagtctgagtgttgaagaccagatggagcagtcatccttgtacttttgggaccttttggaaggtagtgagaaagcagtggtaggaacgacatacaaacacttgaaagatctactgtctaaattgctgaactcaggctattttgaaagtatcccagttcccaaaaatgccaaggaaaaagaagtaccactggaggatgaaatgctaatacaatcagagaaaaaaacacaattatcgaagactgaatctgtcaaagagtcagagtctctaatggaatttgcccagccagagatacaaccacaagagtttcttaacagacgctatatgacagaagtagattattcaaacaaacaaggcgaggagcaaccttgggaagcagattatgctagaaaaccaaatctcccaaaacgttgggatatgcttactgaaccagatggtcaagagaagaaacaggaatcctttaagtcctgggaatctcctggtaagcaccaggaggtatccaagcctgcagtttccttagaacagaggaaacaagacacctcaaaactcaggtctactctgccagaagagcagaagaagcaggagatctccaaatccaagccatctcctagccagtggaagcaagaaacacctaaatccaaagcaggatatgttcaagaggaacaaaagaagcaggagacaccaaagctgtggccagctcagctgcagaaagaacaagatccaaagaagcaaactccaaagtcttggacaccttctgtgcagagtgaacagaacaccaccaagtcatggaccactcccatgtgtgaagaacaggattcaaaacagccagagactccaaaatcctgggaaaacaatgttgagagtcaaaaacactctttaacatcacagtcacagatttctccaaagtcctggggagtagctacagcaagcctcataccaaatgaccagctcctgcccaggaagtttaacacagaacccaaagatgtgcctaagcctatgcatcagcctgtaggttcttcctctacccttccgaaggatccagtattgaggaaagaaaaactgcaggatctgatgacccagattcaaggaacttgtaactttatgcaagagtctgttctggactttgacaaaccttcaagtgcaattccatcgtcacaaccgccttcagctactccaggtagccccgtagcatctaaagaacaaaatctgtccagtcaaagtgattttcttcaagagccattacaggctacttctactccagttacttgtagctcaaatgcttgcttggttactaccgatcaggcttcttctggatctgaaacagagtttatgacctcagagactcctgaggcagcaattcccccaggcaagcaaccgtcttcactagcttctccgaatcctcccatggcaaagggctctgaacagggcctgcagtcacctccagcaagtagtagttcagtaaccattaacacagcaccctttcaagccatgcagacagtatttaatgttaatgcacctctgcctccacggaaaaaaaaaaaaaaaaaaaaaaaaaa

SEQ ID NO: 3073 - DNA, 588 bp, Macaca Fascicularis
ttctaacaaacctacacattctctaggcatgcttgatttatgttccttctccatgtgcttaactttctgcttaatcaatgaaatgctagagaaaatcctaggttaactgcagagggctagcctttagccagttcacgatatttaggagttcagaaactatccaaccttgaattctaggtcactagagacttcctgggaccaggtgaaccttccagatgcaacttatcaaacaaccaggttccaaacctattaacatcacagtgtaggaagctaagccagtgcatcttcctcagtgttcaaaatcatcctctgagcttgctttccttattaacgttcaagaaagataaaagccccctggctcacattagtacccactccagttggggtgttcctgtcagtgttctgtcttgcatgtgacatagtctatatggaggtataaggggagccattacccacacacatcctcttcactgtcactcagaggacatgtacaggaagtggtggcaactgccccttatgacacacactcagtagttcttgtatctgttccactgccacacctcttaaaggcttgaaaatgcatctaag

SEQ ID NO: 3074 - DNA, 738 bp, Macaca Fascicularis
  misc_feature (1)...(738): n = A,T,C or G
ccttcattcacagagtaaataaaatgaagcccaatgtcacagataactaaagttagcacttggtctagaaatcttctctttatttaaattttctttattctccactgaacaaggagaaattggaagaaatacaaggtatctccccacttcagacctacagtccacctctccacagtcaatcttcaaaagaggcaggtggagagccatgtgatggcattttcaactgttgcaaaagatcttccctgcnnnnnnnnnnnnnnncttcttcatgcctgcctccctggctcacacagaataaatccactccttnnnnnnnnnnnnnnntatcctgagaaggagtcgtctgtaaaattgcatgcatttataaannnnnnnnnnnnnnnnnacattaacttgccgatataggtccaatcaagcaaagccgatttccaataataggaagctggactaacgcagatgacttgaggctccacacaaggcttgcatgcacacaattagagtctacggatatcgtttggcttgaacagaattgaatcatactgatttctagacaagaatcctaaattgtannnnnnnnnnnnnnnnnnnnnnnnnnnnnnnnnnnnnnnnnnnntctagggaaaaacaagtttgtaaggacaataataacatgcaagtaaatacatttttactaaagaatgggagggtctctcacaccaaaaagaaaatgttttactattgtgaatagtgccgcaaaaa

SEQ ID NO: 3075 - DNA, 729 bp, Macaca Fascicularis
ggtttttaaggataagtacagaaaaataactaaataatattgaggggatagtttaattttttcgtctgttggtgtggttgtcttctgctataaatagaaatgacagctgagaagcaggtagaatgcagttacaaatacattgtttttgcatctctgtgatcatccaaattgtgtgtcacatctgttatggatgttaaaaatattctttcccaatatctcacttgattttatcacgcaaaaataattagttttatgtaattaagtatcttagatcttatcaaaggttttatatttttcccagaaagttttccccactccatcagcttttaacatactcatatgccccattttaaatgaaaatcctctctggatcctgctcccatgtctttttgcttccctattaccctcctcttttgtataggcaaagttcttgaacagttattaatacttttcccctccatctttgcatctccccctcactcactcatcagtgtaaccactgtggctcctggtcctttcctcccaaggaaaaatgactctacatagctccccagagacctccatggtgctaaaccagttgtcttcatatttggtctccatctaaactctttcctttcctgtgataccacattatcttagatctcctcctctatctctagtctctccttgtctatttctcttataggctcatctgcttttgccaaacctttcatttttttaaccctaaac

SEQ ID NO: 3076 - DNA, 747 bp, Macaca Fascicularis
  misc_feature (1)...(747): n = A,T,C or G
cagagtcaagcatacaccacaatggcagaaaaannaagagctaatttttgtatnnnagtagagatgggttttcaccatgttannnnnnnnnnnnnnnnnnnnnnnnnnnnnnnnnnnnnnnnnnnnnnnnnnnnnnnnnnnnnnnnnnnnnnnnnnnnnnnnnnncattcccggcgtgtnnnnnnnnnnnnnncactcatttaacatttatttattggatgcctactacatgccaagttctaggtgctggagacataacagtgtagcagaggccttgccctcttggaacctacaatctagtagnnnnnnnnnnnnnnnnnnnnnngaagaaatacatacacagtannnnnnnnnnnnngaaaaacgtaagttggcgaagcacaagagaaattgttttgaaatggttaatttttattgcgttcattagaaaatagagtaagtttctttgttgttttgaattgaattagttctgtgagagtggtacaaattatgtatgtgtcttgcacccataaatatatatttttgctatgttactttaacctaaagatagatgttatatttacaacataacatgatctgttgggttctctattaatttatttcattcattacagattctgggttgataaattcnnnnnnnnnnnnnnnnnnnnnnnttttgtctcaaatctgttacaatgtatattggttggtgcaaaagtaattgcnnnnnnnnnnnnggaaagtaatggcaaaaaccacaatgcc

SEQ ID NO: 3077 - DNA, 686 bp, Macaca Fascicularis
  misc_feature (1)...(686): n = A,T,C or G
gatnnnnnnnnnnnnnnnnnnnnnnnnnnnnnnnnnnnnnnnnnnnnnnnnnnnnnnnnnnnnnnnnnnnnnnnnnnnnnnnnnnnnnnnnnnnnnnnnnnnnnnnnnnnnnnnnnnnnnaaaaaaaaaaagtccctctttcgtgcccccagtccagtgttggctggaagcgtgccggagttccaccggcagggcagctgttctgggagcaaacaggcccacactccaattgtttagggcattatctgaagagtcagtgacccctgaatgtgttctgactcccaggcctcctcagacttgacccaggtctggtcagtgatcctgaagaggaaactggggagggggcttccatctgccctgcgtggaagaggagaggaaggtgcccctgactgtgggctgggagcctgtggaggttttgccattgatgatcttgatagaatcataaaccgatttatagatgatacaagttccaggggagagaaatcataagttatgattaatgtttttatgcgatataatgtattgcatgtttttaaggatattttccccattgtgatcctaagctcttaaaaaacttgagagaaaacatctaatttataaaagagaaagctttccattgaaaggtaaatactttgaggagtaaaaagacttctttgaatgcacagtaaacacctcatttatttggt

SEQ ID NO: 3078 - DNA, 699 bp, Macaca Fascicularis
  misc_feature (1)...(699): n = A,T,C or G
aaggctcagcacagcgaaggcttgcacccgcctccgggacccctcaggtggccacttccgctgccaggcggtccaggtcctcagcttcccggggcccttgttccacgaactctgtgctcagctgccnnnnnnnnnnnnnnncctgggcatcgcccgcggccaannnnnnnnnnnnnnnnnnnnnnnnnnnnnnnnnnnnnncagnnnnnnnnnnnnnnnnnnnnnnnnnnnnnnnnnnnnnnnnnnnnnnnnnnnnnnnnnnnnnaaacagnnnnnnnnnnnnnnnnnnnnnnnnnnnnnnnnnnaccaagggccgcactggggaccagcgcacagcaaacagatacttgagggagagctgcagcgaggtcaggggaggggcctgcagcatggagtacaggtggacatgcccatcggtcnnnnnnnnnnnnnnnnnnnnnnnntggaagggggaacagctcacagagtagacaggaccaccatggggggagaaggtaaactgtgccggggcccgcagggnnnnnnnnnnnnnnnnnnnnnnnnnnnnnnnnnnnnnnnnnnnnnnngaacacttgagcgggaagccaccttcttctttagcttggtgctccgtggcagttgctgcatgaccagggcgaagccctccgtgagccgcagctggcccgccccgacgccgcgccagagcagcaccttcccgtc

SEQ ID NO: 3079 - DNA, 1909 bp, Macaca Fascicularis
ttcgcttttttacctgccaatcaaactgctacaagacaacaccctgatctggcatggacatgtccgtgtttaccttaatattacacctcgattaaacagaaaacagtgctttattttgaagagcgccgaatatgtatgcattttgagaaacccagtctcaccctttccggatacccaggaactgaagcaagtcataacttaagagagaaaaaggagaaacttcggggggcaggaaggttgattggaaataacttaaggaaagtctgcataattcttttttttacaacttttctgagtttccagcgggtatatttagtgtgagtttgacagtaacaggctaggaagggcagagattggagaagttgggggtcgggggagtgattatggaagaaggttagtaaggaacaaaacaatgcaccgttttgtaaagataataaatggaacgtggctggtagatactattcagtatctccttagggtgagtaagggtagaccagggaaggagggggcggagagagtgttacagaagaaagaaaataagtaaccctgatggtttaagccctttataaaaaagaaatggcatcaggtttttctgttttgtttttttttttctctattcccccccaccccgccctttgtagtcaagtgcattttacccacaaagatcccaacaagagagtggaaggaaacttagacaaggctttgtttgactccgtgtagcgacaacaagagaaacaaaactacctatttgtaacggacgtgctgccattgccctccgcattgagcgcctacctattgaaatctttacgtcgggacaatgggagagcggctaaaattaccctcttgggtcctgggcgggcaagattcctgagtccctacccccgcctccatctcatcctcctctaacccgggcattgctgggctcccccttccccagtcccagccgccttctcccagtgtgcgctgcctgcacctgtgcctggagagcatcgaccccgcctcccaagacttgagcccctttacggcgcagccccagccttgcgcggcctgggctttgcagccaccacagtggaaatcgacgggggaaatgccagggctggttctgctcgagtcctgggaactctgcgtgggagggagtttgtgactgcggcccaaaagccacctccgtacagtgccgtgggatgccaggaagttgaaatcatcctcccccatcgcctgcacttttgagcgcccttccgtctgtctctttccccagcccccatttgaaacccgcacgaccgaaacccttctttcagggaggcatgggatgggaatggggagtggggggagacagtaggagcatcccctttgctacggttgaatgaagacagtctagtgggagatgtggctggggctaagaggaagagctgcagtttcctgggccaaagagctgagttggacagggagatggcagcttaccaaggcctgccggttctcagctctagagtcggcctcatggtccgagcaggatttatttttaagaagagagcaacgttacgtggaagcaaggaaggttttgaggacagaggtttaggtctcctaactgctagtcgggactgtgagaagggagtgagagagtgttggcacctgtaaggtaagaggggagagcggaagagcgcggtacgggagcggcaccagaggggctggagttggggggggggggagtgctgtggatgagcaggagaacaatgacacaccaactcctgcactggctgtttccagaaatacgagttggacagccgccctgagccacccactgtgccctgccccacccccgcaccttagctgcttcccgcgtcccatcctcatttcagtaccctgcaccaaaaagtaaatcaatattaagtttaaaaaaaaaaaaaaaaaaaaa

SEQ ID NO: 3080 - DNA, 732 bp, Macaca Fascicularis
  misc_feature (1)...(732): n = A,T,C or G
catgcagcattaactggggacgtagaatatgatcaaggcaacattactgctttaacttcagaatgacttcctatttattaatttgaacagactgctgtttccacaannntagccttgaaggtctttcattttctcccatcaagctatgtcagtttaggtgatgtagaaatatttaccctctggcttaagctggtttagaataactaactagannnnnnnnnnnnnnnnnnnngtctgcacgagcttcttgtcaggtatttcttgctcttccgtcgcattacttactaaacctcccaactctcatcatattcttcatttaaccacctcctacatgttttcttttggaccatggcctaaaatttaattgtttgtgttttacttgcgttggatttcaaatattatttgatgcttatttttgttttgtgtcttcttgtttctgatttttactctgtcacggctccatctcttacatgtagcttatgtcccttttaacatccccccatcagcctccccctccccctcctgcctctgcctcaccctctgctgttcccaacggcccccagtctcccaagcagcaaaaggaacccctctcccaccgcttcaacgagttcatgacctccaaacccaaaatccactgcttcaggagcctaaagcgtggnnnnnnnnnnnnnnnnnaatcctgtctctctggcgtgcttttgttgcatgtttggttctgcataactaattttg

SEQ ID NO: 3081 - DNA, 795 bp, Macaca Fascicularis
  misc_feature (1)...(795): n = A,T,C or G
tacgagagagtacannnnnncaggtccaggtggcaggggatatgctacccaactcaactgagnnnnnnnnnnnnnnnnnnnnnnnnnnnnnnnnnnnnnnngagtgtgtcaaacagatctgcgtggtcatgttggagactctctcccagtcccccccgaagggcgtgaccatcccnnnnnnnnnnnnnnnnnnnnnnnnnnnnnnnnnnnnnnnnnnnnnnnnnnnnnnnnnnnnnnnnnnnnnnnnnnnnnnnnnnnagcnnnnnnnnnnnnnnnnnnnnnnnnnggcaatgcaacagtctcattttcccatgacgcatggcaacacnnnnnnnnnnnnnnntgaatccagctctccagaggtgaaaggctattgggcaggtttggatgcatctgctcagactacttctcatnnnnnnnnnnnnnnnnnnnnnnnnnnnnnnnnnnnnnnnnnnnnnnnnnnnnnnnnnnnnnnnnnnnnnnnnnnnnnnnnnnnnnnnnnnnnnnnnnnnnnnnnnnnnnnnnnnnnnnnnnnnnnnaggcaggttaccatcactgnnnnnnnnnnnnnnnttnnnnnnnnnnnnnnnnnnnnnnnnnnnnnnnnnnnnnnnnnnnnnnnnnnnnnnnggagcagctnnnnnnnnnnnnnnnnnnnnnnnnnnnnnnnnnnnnnnncaccaccacccatgatccatctgnnnnnnnnnnnnnnnnnnnnnnnnnnnnnnnnnnnaatagtnnnnnnnnnnnnnnnnnnnnnnnnnnnnnnnnnnnnnnnnngattttaataaa

SEQ ID NO: 3082 - DNA, 2094 bp, Macaca Fascicularis
  misc_feature (1)...(2094): n = A,T,C or G
atagaaaatcctccagttaatatcccccatgggtatctggcaattctcagtgaagctaaatgggctccaggtgtttcaggcaacaaaaagattattaaaaactggactatggagcaaatagtgacctttgtggcagacacctgcaggttcttctttgaaaggggctattctccgaaggatgttgctgtgcttgtcagcaccacgagagaagtggagcactattggcatgagctctcgaaagcactgaggaagaaaagggttgtgggtctcagtgatgcgtctgatatgtcgggtgatcgcattgttttggacagtgtccggcgattctcaggcctggaaaggaacatagtgtttgggatccatccaaggacaactgatccagctatcttacccaatattctgatctgtctggcttccagggcaaaacaacacctatatatttttctgtgaagtgactattaggaagagctccaaaccaaaatgctatgtaaatgtctatgggtgatagctgctgatggtagaaacctttctttttagttcacaagttggttagagatttggacagagctgacacaaagagtttggagctcccccatttctggctctcctttcggggattcctcccccagctcttttcaccagcggtggttgccccccattctgacccctgactcttccagccagaaagatggtggttttctaaaggaactttagctgccctgcacaatgcagatctgtgtcttgcactctgggtaaaagccataaaaataagaaactcagcctgtgacctttcctccaaggctggagttctttttttacgtgacttcatgtagtttgttgcttttaaaaatttgtgcagaatcgttttctgcagaagcatgatctgttagtagcttacaggcctagcagaagcgattgtttcctgaattcttgacatttatctttgctgtattcatttagggcttgggggagtcccaagataattcagtcactgtcagattaataattttgtcagaacaaagaatatcgttatgattacttaatccttaaaattgtaatctccagagcttgttctcagaatggcccagacccaggcttaattgtaatagtgaacattaatgatacatttacagagaaattataggccaagagaaaatcctggcttttagtagaagttaatattagagaccaaaatctggttctgaaggtgtatatcagccctaaggtgaacgaacttgggaaagattgtctttaaaaatcaatgaatgttagccgggcacgnnnnnnnnnnnnnnnnnnnnnnnnnnnnnnnnnnnnnnnnnnnnnnnnnnnnnnnnnnnnnnnnnnnnnnnnnnnnnnnnnnnnnnnnnnnnnnnnnnnnnnnnnnnnnnnnnnnnnnnnnnnnnnnnnnnnnnnnnnnnnnnnnnnnnnnnnnnnnnnnnnnnnnnnnnnnnnnnnnnnnnnnnnnnnnnnnnnnnnnnnnnnnnnnnnnnnnnnnnnnnnnnnnnnnnnnnnnnnnnnnnnnnnnnnnnnnnnnnnnnnnnnnnnnncaaaaagaagaagaagaaaaaaagcagtgagtttatgttattaagttgtaacatctcaggttagctctatgcattaatctatagcatacctacttaagttttatgtcattcttgaattgtgatttttttttctatctgctctcatagtttggtgggccactgttatggactgaatgtgtcccactgtcacccctaaattcccatgttgaagccccaactttcagtgtgtagctggggctgctaaggaagtaattaaggttacacatagtcacagtggagaatctgatctgccaagattggtgtccttatagggagagaccccagataacttgttcccttcctccctgtgcacacagacaagagggcatgggagcacacagagagatggcaaccacctacaagctaggaggggaagccttataatgaaccaccccccgctggcacctctgtcttggacttccagcctccagactgtgagaaataaatttctgttggctcagcaaaaaaaaaaaaaaaaaaaaaaaaaaaaaaaaaaaaaaaaaaa

SEQ ID NO: 3083 - DNA, 725 bp, Macaca Fascicularis
  misc_feature (1)...(725): n = A,T,C or G
agatgggagccatctnnccagtccaccatnnncatcgtgggcattgttnnnnnnnnnnnnnnnnnnnnnnnnnnnngtcaccggagctgtggtcgctgctgtgatgtggaggaggaagagctcaggtggaaaaggagggagctactctcaggctgcgtccagcgacagtgcccagggctctgatgtgtctctcatggcttgaaaagcctgcgacaactgtcttgtgtggggctgnnnnnnnnnnnnnnnnnnnnnnnctccttttgtgacttcaggagactctggcatctctttctgcaaaggcatctgaatgtgtctgcgtctctgttagcaaaatgaaaagctgaccaggacttaccatcaacnnnnnnnnnnnnnnnnnnnnnnnnnnnnnacaatctactctctctgaagcctggcacctggaggcttgatctgcatgagaaaattttggactccacaacctcttatcacaacccggacattcctttctattgataataactcaaccaattaccaatcagaaaaattaaaaatctacttataacccagaagcactaccccgcaacccttgcttgcttcaaattgttccaatgttttggactgaaccaatgtatagcttaaatgtatttgattgatgtcacatatcttcctaaaatgtataaaaccaacctgtgtgacaaccacgttgagcacatgttctcttgagggctgtgtcatgggct

SEQ ID NO: 3084 - DNA, 747 bp, Macaca Fascicularis
  misc_feature (1)...(747): n = A,T,C or G
ttttccagataatcnnngggcacaatatataagcagttacaatgaaatgagaagcaatatagcagttgggctatatgcatgatttaacgacaaaattaccacttttaatttagtataagggacaatttaaaaagcatttcttggcccnnnnnnnnnnnnnnnnnnagttagtgtttgtatgtgaatactaagtttgacattcctttctcccatagaaccactttggtgatctggatggtggcnnnnnnnnnnnnnnnnnnnnnnnntcattcacccaggcctggtatagctttgatgacacacgagtcagtgagattccagatacttccgttcaaaatgctacggcatatctcctgttctatagctgccagcccttttccataccaatacaaaagcattaagagccaggaannnnnnnnnnnnnnnnnnnnnnnnnnnnnnnnnnnnnnnnnnnnnngtagaattttgcttggtcattaaactcgtagaacttacttgcattattaacatttttatgccttgtgggcatgttatacaaccttttatcttaagataagtctgtcaatcagaagatgggtgctgggtcacttaaaaaggcagtgtgaatataatacagtgctaatggatggaggccttcaaaacactgcagattatatagcgagttcaggtttcaaaatttggcgtttatcannaantatctcttaattatatatattcaacaaatttttcccaagnnnnnatgagcta

SEQ ID NO: 3085 - DNA, 699 bp, Macaca Fascicularis
  misc_feature (1)...(699): n = A,T,C or G
taggtattaatgccnnnannntatggatgaggaaactgaggctcagggagattgagtcatgctcccaaagtcannnnnnnnntaaatgacagaactgggatttgaaaccagattgagcttggctccaaagccnnnnnnnnnnnnnnnntaccaacagcctttgagcctaccccgggccctggcacaggtttcttgcctgaatggatgtgcagaaaaagaaagataggtggacaagagaacgaatgatgaggcccagcatttttagtgatattgactctagctttcttttgccaaagcccccttaccacccctcttattctcccccaccaaccctgaccccttgtttcagaagcctggaatcccccccagcttgcagccccctgccaactactgctgcccagaagggtggcacagtgcctggacttcaggcaggatctatcannnnnnnnnnnnnnnnnnnnnnnggaggtcacctcatctagtcctctgttcacacccagccctgtcatgaggacaggggcagacagggtcggggtagtgggcagcagcaggatgaagtgcccatctcttccttcagctgccctttctcctttctcacttcttacacaatttatattggaagtcctnnnnnnnnnnnnnnnnnnnnnnnnnnnnnnnnnactggccagaatcgggagtcctgtggtcataggactgacc

SEQ ID NO: 3086 - DNA, 1610 bp, Macaca Fascicularis
  misc_feature (1)...(1610): n = A,T,C or G
ctttaactttaagaagaaaagaaattaataataaaactgtggtaatgacattatgggtcatttttttctcttatctataattttctgtattttccagatgttttaataaggccatgtgttaattttgcaatgtatttgtaatagcaacgttatatgtattttttattactttggaagcatattgactgaaaatgatagcagctactgctaatcgagtgcttactatgtatcaagcattgaacttgtacatgcatataataactctcttttccttcctattccataccacattccacctgcatcatacctgcgttcatgagttatcataaacctaggttaaggcacattgtgtccaagttgccgccaaccaaataagtgtagaattaaactgtcttgcattgcaattgtgagtgatatttaggctttcttaataatggaaatatttatctgatgtaagagacctggatttctaagaaaatgtcaaaggtagtagttccaaatgagaaataagcacaccttacctattatataaaactagtagacagtgaccccatcttctctcttgagaccttacactattactgtatatacatatatatgacagcatgaatatgtagctggatgtttttaattgctgtagccaatgcttacattcctggttagtcatatatcattttatactcactatggtttgggtaatgaatgtcataaattattgataactaaataaatactaaaagtatggtaaggtcaacttttaatatttgtactttgtttcactgctcatggaagaaatcttactgaagcaaatctctgcttagattcatctggcctgactacaataactggagagaccttaacccttgaatctagtatatctgggttttaatctcagcattaccatagactatgtaaacttggaaaaatttaataatccagtgagatgttaattttcttatctttgatattggagtggaaaaggcttcaacatagtaaggctattataaatcataaataatgcacatgtggtaaaataatgctttctcctccaaagatgtccatatcctaattctctggacctgtaaatatgctatttctcatggcaaaaggggctttgcagatgtaactaagataaggtctctggctgagcacannnnnnnnnnnnnnnnnnnnnnnnnnnnnnnnnnnnnnnnntgagagaccaggaggtcaagcccagtnnnnnnnnnnnnnnnnnnnnnnnnnnnnnnnnnnnnnnnnnnnnnnnnnnnnnnnnnnnnnnnnnnnnnnnnnnnnnnnnnnnnnnnnnnnnnnnnnnnnnnnnnnnnnnnnnnnnnnnnnnnnnnnnnnnnnnnnnnnnnnnnnnnnnnnnnnnnnnnnnnnnnnnnnnnnnnnnnnnnnnnnnnnnnnnnnnnnnnnnnnnnnnnnnnnnnnnnnnnnnnnnnnnnnnnaaaagacaaagtccacaggatgtggtannnnnnnnnnnnnnnnnnnnnnnnnnnnnnnnnnnnnnnnnnnnnnnnnnnnnnnnnnnnnnnnnnnnnnnnnnnnnnnnnnnnnnnnnnnnnnnnnnnnnnnnnnnnnnnnaccaaaaaaaaaaaaaaaaa

SEQ ID NO: 3087 - DNA, 2537 bp, Macaca Fascicularis
tcttctctggacaaagttcaggctggaaaaggatcctccagccagctgtaccgagagagcgccacaaccatggaaaaactggctgttctcaaagcttgggcagaggtatatgtggttgctatgaatattaaaaaggaagcagagtcaaaaccaaaaagagcaattaaaaatactgacgatgatgatgatgactacggtaccatcgatgaactgccaccagatagtttaataacactggtacaacccgagctgccaacactcagtcgcctgtggttagcagcattaaaagattatgcactcttgactttaccagctgaattttctagtcagcttcctccagatggtggagcattttatacccctgaaactattgatacagctagacttcactatcggaattcctgggccccaattctccatgcggtggcactttggttaaatagcacaggatttacgtgctcagagtctacagaagcagcagcaatatctggtttacaaaaacgttctactactgtcagtttaaaccaggcgtcaggagcagtgggtagtgctaaatctttgccagaaattaacaaagacagaatgcatctgattttaggtgtgagtatacagtttctttgttcccctagacctgaggagcccattgaacatgttacagcatgcctacaggccttacataccttgttagactctccttatgctcgagtccatatcgcagaagatcagctgataggtgttgagttgctgagtgttttgcaccgcctcctattgacctggaatccatcatctgtccagctgttggttactggagttgtacaacagatagtaagagctgctcaggattatttgcaagaaaaaagaaacactctaaatgaagatgatatggaaaaagaggcctgtactgtattgggagaaggaggtgacagcggtggtctcattcctggaaaatctcttgtgtttgcaactatggaactgctgatgttcattttagtacggcatatgccacatctcagtaccaaggtgtcagactctccaagtcacacagccactaaaactcgactgtcagaagaaagtgctcgtttggtggcagccacagttaccatactctctgatttaccatccctttgttcacccgctggatgtatgacaatcctgcccacaattctgttcttaattgcaagaatattgaaagacacagcaataaagtctgcagataatcaggttcctccaccagtcagtgcagctcttcaagggattaaaagtattgtgacactttcaatggccaaaactgaggctggcgttcaaaaacaatggacagctctgattcgtagcacgcttgcatgcatcctggaatattctcaaccagaagactctgtacctacacctgatgaagtcagcatgctaacagcaattgcactcttcctgtggtctgctagtagtgaaataataggagtccagtcattacagaatggctgcatgaacagatttaaaaatgcattaaattcatgcgacccatgggctcaagccaaatgttaccagcttctcctctcagtcttccaacattccaatcgtgccctttcaactccttatattcattcattagctccaatagtggttgaaaagctaaaagctgttgaaagaaacagaccagccagtaacatagagcgtttagcggttcaagaaggaataaaagttcttgaaacattggttgctcttggtgaagaacaaaacagagtccagctacttgctcttttagttcccactttgatatcttatctgctggatgaaaattcttttgcctcagcaacttcagcttccaaagatcttcatgagtttgcactccagaatttaatgcatattggacctctgtatccacatgctttcaagacggtaatgggagctgctcctgagttgaaagtgcgtctagaaactgccgttcgagcaagccaagcaagcaaagctaaagcggctgccagccagccagcccccgccatacattctgcaccaacaattaagctaaaaacaagttttttttaatttgtactttcatttatttgtatttatattgtcacctagcacctaattagtgatggcctctgtatcattccaggctatctgtgggttctgttgtatttgtattttggtattacagtgcttccaagtaggatgagtgaaataatgctcacaccacttattgatttttaaggagtgatttttttttttatcatgtggtgaatatgttttctttttcctcctaataatgtttctcttttgttaatttatttatttttcaaacactgagccatagtcttaaatttaaatgctaaaaacataatcgtatcatgtagtcgggcagcctattgatattgtcagggaaaaaaaatgggtcagaactcagcatctgtcatgaaaaaaagcgatttgaaaaacaagctgattttaaattttgaagtaaccaaaataatgcaaagtgtctgttttgtggtgtatatactatgaataaaatcacagcattttctaaaaaaaaaaaaaaaaaa

SEQ ID NO: 3088 - DNA, 699 bp, Macaca Fascicularis
  misc_feature (1)...(699): n = A,T,C or G
cagaaaattacagcccatactctttattatcgaattcaagtttggaaataggccctttgttttaaatcatgatgggtcttngtcccaaccatttatctaggtcatatttccaactttggagttctaggaaagaaccttgaaaacccgatacgattctgcagcgtgaggtcgagggtgaccatttgggcaaagctccaacggcaatcatttattgtgttttgcatttcctgggatttattgaaataagannnnnnnnnnnnnnnnnnnnnnnnnnnnnnnnnnnnnnnnnnnnnnnnnnnnnnnnnnnnnnnnnnnnnnnnnnnnnnnnnnnnnnagaggcacaatttaatcttggcctccacaagcatattaaagctcatgtgttaatcaatgcattcttatgctcctacattaaatgccttgggtaaatggataaatggacatgtgcccagctttattttttnnnnnnnnnnnnnnnnnnnnnnnnnnnnnnnnnnnnnnnnnnnnnnnnnnnnnnnnnnggtgtatctgtaaatctgaatgttgccgttacttctgccagtctgtataaccatgtgattcatgctgcaaatgaaatcaggaagcagtgaagtgttaaagcaagactattgtccaattcgcttgtcttcnnnnnnnnnnnnnnnnnnnnnnnnnnnnnnnnntnnnnnnacatactta

SEQ ID NO: 3089 - DNA, 773 bp, Macaca Fascicularis
  misc_feature (1)...(773): n = A,T,C or G
cannnnnnnnnnnnnnnnnnnnnnacacgnnnngttttgtcccctctccannnnnnnnngtgaatccctttattaatactggaaatccctcactgctgcttttgnnnnnnnnnnnnncactgcagatattaaggatgttaggagagatttgatttaattgactctgcctagatcggtctcattaaacagagtgaagatttcannnnnnnnnnnnnnnnnnngaaagacagacctaatgactggcatttgagatgctgctggcattttgaattcaacatctgctgaaaacggtaaaactaattagtgcccacccaccctccccnnnnnnnnnnnnnnnnattgaaatttgttaaagcactcatctttatggaaattaatcattatcctaaagaagtgtttctctcccatcatccggatttctggttgtggcccagcaattaacaaaaacagcattcaactgtttgaattttttgaaccaatgtaactctggcctcaatcatattcctctgggatttctaaacaacagttaagctacaaaaaccaaacaaaatcacacatattgatnnnnnnnnnnnnnnnnnncatatccacccttgagaagtatgtcaagagactgcagactatagatttttttttaaatataggattataannnnnnnactgaaagaccccagagcagttgtaagtannnnnnnnnnctagaactcatattctaaagggaagtgatttcnnnnnnnnnnnnnnnnnnnnaatatgtattatttattttaaca

SEQ ID NO: 3090 - DNA, 637 bp, Macaca Fascicularis
  misc_feature (1)...(637): n = A,T,C or G
agctnngatcagctcactgggtgannnngacagcttcctccccaaagcttcggtcctcacctgtgagaatgtggtgtcccaggccccctgcaggcaggaacccaccccagctcctctggtgggcccacttggtctttcttacctattggcttgtgagacccagttggccaaacttgttgtcctatttttattttggcctttttcttagtgtgtgttttctctaactactgctgtgtagaacctttatatgagttttaggtagagaatcttgcccacccaggggtcccccaccccagagagcctccactttggcccccccccggtctggtcctgcctatgctccgcttggtgtgactgttgagtgtgatcgatccacacagctggttgaccctgcatctctttccttcttgttgctgaggccggttctgttctctctttctccacctgaactgcacttgaagccatgacgaaggatgagaagtggttgctaagaaggaccctcctgcnnnncatttgctgtgaggaggctgcgctggcccagcctgtcatttccttgtctaagcccagtccagaggtcggcaaggggcagcctgtccctgcctgcttttgtggctcgtgaatcaagaatggattttac

SEQ ID NO: 3091 - DNA, 720 bp, Macaca Fascicularis
  misc_feature (1)...(720): n = A,T,C or G
gtcagtcgaataatnnnannnctgacctctagatgtcaaaaattccgcttcaagcctctgtcagataaaattcaacagcagcgatnnnnnnnnnnnnnnnnnnnnnnnnnnnncaaaattagtgatgagggaatagcttatcttgttaaagtgtcagaaggagacttaagaaaagccattacatnnnnnnnnnnnnntactcgattaacaggtggaaaggagatcacagagagagtgatcacagacattgctggggtaataccagctgagaaaattgatnnnnnnnnnnnnnnnnnnnnnnnnnnnnnnnnnnnnnnnnnnnnnnnnnnnnnnnaggtaaagtcagcttactaactttggggaaaggaatattaaatgatcataccaaaagttttttttttaataggacttaatagatgagggtcatgcnnnnnnnnnnnnnnnnnntcaactccatgatgtggttgtagagaataatttatctgataaacagaagtccattattacagaaaaacttnnnnnnnnnnnnnnnnntgcacatgtcaattaaacatttaactacctgaaggatgctaatnnnnnnnnnnnnnnnnnnnnnnnnnnnnnnnnnnnnnnnnnnnnnnnnnnnnnnnnnnnnngcaactcatcagcctttgtgcaactgtgatgcagcaattatctcagaattgttaaaaagtgaatatattttgatgtggggtt

SEQ ID NO: 3092 - DNA, 735 bp, Macaca Fascicularis
  misc_feature (1)...(735): n = A,T,C or G
aaatgaatttgtttaatatttttgtttttaaacatgattgaaatnnnnnnnnnnnnnnntgtgatttttttttttaatgaccaaaactgttctgaagaatgtacccaggtgcctttttgctaatctgatactataatagaatgagacataaaatgaattaatggaaacatatccacgctgtactgtggtataggtactctgattgaaaactttggacatcgtgtgatctgttttaaagttgcggggtgggnnnnnnnnnnnnnnnnnnnnaaacatgtaaacctattttcctatgaaaacattttaaatgtcccacttgaataatgtaattctttatagttttttttaatctatggataaatggaaacctaattgtaatgaattatttagnnnnnnnnnnnnnnnntcttctgggagttatcaattttaaagagaacttttgtgcaattcaaatgaactttttataggtaattgaaaatgacaacacaataacactttctgtataaaagtatatattttatgtgatttattcctactaaatgaaagtnnnnnnnnncctcatgtaaagactcttgcacgcagagcctttaaatgactaaggaacaacatagatagtgagcatagtccccgcctccacccctcacaatttatttgaatacttcaattgtgcctctcaactttttgtaatgctaaaaaatcagtatctagatggtttttaaacgtattatctggaaa

SEQ ID NO: 3093 - DNA, 1111 bp, Macaca Fascicularis
  misc_feature (1)...(1111): n = A,T,C or G
gagangaanngaagtatnnnnntaatattatnnnaatattttctcattctttgtgtatagaaaattttaaaatggtggtcttaattagtactactggttgaacaattatctcttccaatttattttcttgctgcactgcactactgtttgtatttgatcctttgtatattcagtcacttaattagaaattaaattgtcaagcctcttattctgacttcaaagaattaatgtatcttccaacaataaaatcacttctgattttaatttaggannnnnnnnnnnnnnnnnnnnnnnnnnnngctgtttgtttctttgaatatcaatnnnnnnnnnnnnnnnnnnnntttaaaattcccacctacattgttaaatatatatttttttatatctcttttggttttgataaatctgaagtgtgtttttcttcttttggcttcccaaacttcatttgtttagatgaattaagaaaaatattgccatcaagaattacttgtgtttgcacagagatagactctactttatagagattgttgtgtatttaatatgaatatcctaactttagaaaagaagtaaactggatataaaaagttccnnnnnnnnnnagtcatttacagcataaaagatttgtttactttacaaaaggcttgtgtctgtgtgtgtgtatatattttaaactatttgactcagtgacagctggggtggaatggcaagaacactcacaaccaaagtcatgggcnnnnnnnnnnnnnnnnnnaattagtaataaacataagacatattaattcatattaaaatgatactttagtgttgtgtgcttacatggacatttttctctttttaacactataaaccattaaaatacagtcatcccttgtatacgctggggactggttccagggccgcacgtctaccaaaatctgcccctacgcaactcccacagaaagtcttgcagaacccatatgtagaaaagttggccctccaattgaccctccatacacaggagtttcacatcccatgcatgaatgctgatctgtgtgacctcacctgcttttgactgaaaaaagtatgcacataagtgtacccacccagttcaaacccacgtgtaagggtc

SEQ ID NO: 3094 - DNA, 752 bp, Macaca Fascicularis
  misc_feature (1)...(752): n = A,T,C or G
gagtacgagctgaccaggtgctgcactgacgnngggccacacgctgccnnncagcactgctggcacagggtctnnnngcgagggctgcnnnctgcagagcgccctgcgtgtcagagaaccagagacccaagacagggcccgggctctggaaccgggtcctgccctgccaggcgaggctgacttcacatgagatggttgattaaggtgggatttttcgggggcgtgaggcctgtgtgatcctggcctaagctcgggcacacccaaggcacctgcctctctgagccttgggttccaggtcctaacatcccgttccccgctgggaccacctcctggggccgggtccttttcttcccagggtcctcagcgctgtctctgctggtgccttctcccccactactactggagtgtgccctcgctggggatgtggctgtgccctcagttgccccaagcgctgagtgcccaccatgccccttcctgtttctcctacctctgccctgtgagctggcggggagctggcggggaggggagatccacaaggctctcagatgggacaatgtgggaaacgctttggccatggtctgggggcagagaacaagcgaggagacacaagcagacctcaggtagaatgagactgggcggagccaccctagggcctgctcccagggggtactcgaggcgcatcaggcccatttttttaccagtttatatcatggtcttcatttttaaaagtaacgctaactttgtacggatga

SEQ ID NO: 3095 - DNA, 497 bp, Macaca Fascicularis
  misc_feature (1)...(497): n = A,T,C or G
tctccctccacgttggcttcaagccaccagggacacannncccccccaacacccttaatcttctcctcagctcttctgctgaagaatttggccttcacgatgacaggctgctttgggagctttccctttcccagaactttgtagtagcccgatcgcaccacatcaatgatgggagcagccccagtcttgtttttagcagcattcacccgtgtctgctcactgaccaaagtccacaatttgtcaaggttgacagttgggcagaagctctggttcctctttaagtggtaatgcctcataccaactttcccaaagtagcctgggtggtatnnnnnnnnnnnnnnnnnnnggtgatgcannnnnnnnnnnnnnnnnnngcctccggggtgcttccggtgcttgcctatgcggccgtggccgtggctcacgtggccccgaagtttccgggtcttcctcagtctggatggcatgtcggcagcccagacgaaaaaaaaagggcg

SEQ ID NO: 3096 - DNA, 2015 bp, Macaca Fascicularis
atcagtcgacacgagccgcaacgccatgagtcgggaatgacgcccgtgctccctcccctcgttcctgtttctcggagtttttcgacccgtgagcgcgtcgctgagtcaccttaccgtaacgcgctcgggacgctctggacccagcggggactgcccgggggccgcgcagggcgaaggcgcacccgccgagacgcgcgcggagctgcggccccagggaccccgcgtcccagcctgtgccccccccacccgcccggggactctcgggtaccgcccgtctgaccccccaagtgttgggaaacggggccgagctgcctgggtcctcccggagaagacaccgcggaggcgtgccggagttcagggcgccgcccggctaattggctgcgtgctcctcccggacctgcctcttctcgacttttaagaagcgatgagagagatccagccgccgcagggaatgacgccggtgctcctacagccacggctccggacggggagggcgagccccacagccggccctgcgacgcccgcctgggcagcaccgataaggagctgaaggcaggagccgccgccacgggcagtgccccgacagcgccagggaccccccggcagaggaagccacgggtcgaggttatggatccagcgggcggcccccggggcgtgctcccgcggtcctgccgcgtgctggtgctgctgaacccgcgtggcggcaagggcaaggccctgcagctcttccggagtcacgtgcagccccttttggctgaggctgaaatctccttcacgctgatgctcactgagcggcggaaccatgcgcgggagctggtgcggtcggaggagctgggccgctgggacgctctggtggtcatgtctggagacggactgatgcacgaggtggtgaacgggctcatggagcggcctgactgggagaccgccatccagaagcccctgtgtagcctcccagcaggctctggcaacgcgctggcagcttccttgaaccattatgctggctatgagcaggtcaccaatgaagacctcctgaccaactgcacgcggttgctgtgccgccggctactgtcacccatgaacttgctgtctctgcacacggcttcggggctgcgcctcttctctgtgctaagcctggcctggggcttcattgctgatgtggacctagagagtgagaagtatcggcgcctgggggagatgcgcttcactctgggcaccttcctgcgtctggcagccctgcgcacttaccgtggccgactggcctacctccctgtaggaagagccggctctaagacacctgtttcccccgttgtggtccagcagggccccgtagatgcacaccttgtgccattggaggagccagtgccctctcactggacagtggtgcccgaccaggatttcgtgctggtgctagcgctgctgcactcgcacctgggcagcgagatgtttgcggcacccatgggccgctgtgcagctggtgtcatgcatctgttctatgtgcgggcgggagtgtctcgggccatgctgctgcgcctcttcctggccatggagaagggcagacatatggaatatgaatgcccttacttggtatacatcagtggatggggaattgatggttagcgaggctgtgcagggccaggtgcacccaaactacttctggatggtcagtgattgcgtggagcccctgcccagctggaagccccagcagacgccacctccagaagagcccttatgacccctgggccacgctgtgccttagtgtctacttgcaggacccttcctccttccccagggctgcagggcctgtccacagctcctgtggggtggaggagactcctctggagaagggtgagaaggtggaagctatgctttggggggacaggccagaatgaggtcctggggtcaggagcccagctggctgggcccagctgcctaaggccttccaatttgttctaggacccccaccccatgaaccaaatccaaataaagtgacattctcaaaaaaaaaaaaaaaaaaa

SEQ ID NO: 3097 - DNA, 761 bp, Macaca Fascicularis
  misc_feature (1)...(761): n = A,T,C or G
ttggtctgtgctgctgccctacnnnnnnnnnnnnnnnnnnagccatgggagggggctgagcccnnnnnnnnnnnnnnnnnnnnnntgccaaggccttgccnnnnnnnnnnnnnnnnnnnnngggagggaannnnnnnnnnnnnnnnnnnnnnnnnnnnnnnnnnnnnnnnnnnnnnnnnnnnnnnnnnnnnnnnnnnnnnnnnnnnnnnacagactagaatggcagccaggctcgcacacccttgtgnnnnnnnnnnnnnnnnnnnnnnnnnnnnnnnnnnnntggaannnnnnnnnnnnnnnnnnnnnnnnnnnnnnnnnnnnnnnnnnnnnnnncctggtagcctgagccccctgacctaggcgctcttgggcctggctctttggatagatcacacactgaagtgggtacaggccagggcgggccattccctcagggcgtctggnnnnnnnnnnnnnnnctgagagggaannnnnnnnnnnnnnnnnnnnnnctctnnnnnnnnnnnnnnnnnnnnnnnnnnnnnnnnnnnnnncnnnnnnnnnnnnnnnnnnnnnnnnnnnnnnnnnnnnnnaccctcccaagatcttgcatttcttggcctgttggtcctctggctgtgtcgggctgtggggcgtgcatgcagcaacnnnnnnnnnnnnnnnnccgtgaaacagnnggagccagctctggcannnnnnnnnnnnnnnnnnnnnnnnnctccttgatcnnnnnnnnnnnnnnnnnnnnccntgctgtc

SEQ ID NO: 3098 - DNA, 714 bp, Macaca Fascicularis
  misc_feature (1)...(714): n = A,T,C or G
tacaaatagtatgcncnnncnctcaannnnnctaccaaaaagggggaaataataagaaattcaaaaatagaaaacaacatcttgttaagtgtaaacttatcctctggagtttttatattacatatgctagaaacatgcatttatttctgctcagatgtacgaaaatatgtctatcagtattacttataaatcagattaatcctcaagacaatggactcgctgttagaacaccatttcaaaccttagtaaattacatcgttagcaaagttataaattctaaccacaagcagaatgggttgaagttacacccaatgagaactacctctactctttatattgttgctcatttgttagtttcctattgttgcaaagtcagtgctatgttaacaaggaacttgttttcctggaaccccagattaaactccttacagaagttaactctgcagactgagaagacatgtgaacagagagagtcaaggggagtgatgactacttcagagacaggaaaggacggaagagatgaccaaaggcacccccaagggatcaaggcacagaggaagagggacttcatccacacaggagcctggcttctgcaggccgtggcatggctctcggggctgccagcggggctccccataacataggtatgctctgcggtgggcccttgggcaaggtcctgaggacagtgccagggccaggctccagtgcagcaca

SEQ ID NO: 3099 - DNA, 713 bp, Macaca Fascicularis
tgtgggaatagcaagaacaaagctctggaaaggtgcctctgctgcctgttcttcagaggttccagaaggacaaaccaggcttcagatttgctttcctcttcattcacagacagctgtgggttgagaggctggtgagttcagggactatgccctcaggaggatagcagtcctggcgcctcgcttctgtcaggacgaaggttccttctgggagcttcagtattttatggaatttccaacttgggctttactgtgggtacaaagctgttgggatttcaggtacaggtaaagctacttgatgctcctgtcattatttcattctttctgggcatgtttgtttttgttttaaatgatacagttgaagccatctggttatgacaacatcagagccccagcatactgttcataaacctcccactgccaccacccccctcccttagctcccccacatctgaaatttaattcaagttaactccacaatctggggcatgagctgtcactgcagagatgtccgtgccagtgaaacagttggagatttcaattccacaaggatatggcttatttatcaaaacagtatttcaggcaagtagtttcgcagaaccattggagttgcagtttcagatccacatagagtatctggcatcatgagcatctcccctttccgtgtgtcagctccccccatatatccgaccacctatggaaaatttccccatccc

SEQ ID NO: 3100 - DNA, 709 bp, Macaca Fascicularis
cgcttctcccagggtagccatctggctgctcaccggcgcgaccacgcccccgaccggcccttcgtatgtcccgactgcggcaaggccttccgccacaagccctacctggcggcgcaccggcgcatccacaccggcgagaagccctacgtctgccccgactgcggcaaagccttcagccagaagtccaacctggtgtcgcaccggcgcatccacacgggcgagcggccctacgcctgccccgactgcgaccgcagcttcagccagaagtccaacctcatcactcaccgcaagagccacatccgggacggcgccttctgctgtgccatctgtggccagaccttcgatgacgaggagagactcctggcccaccagaagaagcacgatgtctgagacggtgggcggggcggtgttggctgagagagggctggggtccttcgtggtgggagtcgcagtggcctgggggtgcctgtctggtgctggagtaggggacaatgggaatcccagaggggacagaagacgcggggagtgatctgggtgggccctgttagcgagagaggtcaaccccggtggctagggaacccacttccaagtgcagggacgccagcctccagctggtgtgtgctgaggttccatcctgactgccctgtgccctggaaaagtagcaatagcatctgccccttagagccctctggctagaggagccaccagt

SEQ ID NO: 3101 - DNA, 2063 bp, Macaca Fascicularis
  misc_feature (1)...(2063): n = A,T,C or G
aaaaaaaaaaaaaaaaaaaaaagaacgaatttgggctctccaggccacaccccgaggcctcaggttggccggccgcccctccctgtgctctgtttcggtcagggctagaaaggccgctgccactcagtgggagtcgggcaaaggaaaaccaaagagcaggcccggggaagagctaacggtgtttctgttggaagcacagacaagatggaggctctaaggtggagaaagaggccgaggccttacaatgtcctcagcgggagactggaaaagcagacatgcaattgtgggaagaaacccaaaggagtaaagaactcacagcaaaagtccaaaatctcatccacgtgcaggcctctctgcaggggggaaagggcacagctggagggtgagctccggggctgcagagagcttctactctgtctgcactgccctgagaacaggtgatgggcctcagagggagtccgcggaggaagacgcctactgccgggaccttgatgtgagacttcgcaaggctcagaccacttgaactgcgtgtgtcagacttggcgactgctacaagacgacgtcccaaggcctagccccggaattgaagaaagacacttccagttttcatagggagctcttcttccatgagaacacggcccaggaaggctggatggccaccatgtccactgagagagcactccaggagctccagaaagaaaatgagcacaacgggcagaaacctgctgtgaggccaaggtccagcctttcctgaatggcactttggctcctggggtttcgcttgcagcctacaggggccctgaagtgccaggggtaccttgggccaccaggagcgagtcaggtcacgattttagggcttaggtctagagcacctgccggtttgatgctgtttaccttgtcgccgggtcctgaatgcccagagactcggcagaatatcagctggtgctgctccctttaaagcacttttgattgatttcttgtcagttagctactgttcattagtttatgtggaaattgttcttattgaagtttgatgagtggtgttaggtttgtaaggtactgtttttcaaataaagatacacacacacacacagatagagagagagagagaaactgactgactccggctctctagagtcaccctacttggatgcaactcccagatctgccacttgctagctgtgtgaccctgagcgatttacttaatctctctgtttactgcatgccataaaaagtagaactggaatggcaagaggaccttcctctaaggactgagttaatacatttaaagtatgtagaacagcacccttaacataataagcagttgataaatcataactattattattaatgagagcttaaagatggataaatagacattctggggaaggagcgtaagtgtgcatcatctgcaaacatcacagggagcaattgtataaaatgctacagttgaatcctcgcagtgtgaatattttaaacttgaaatactcagattgagattctcattgtggttggccaacccagagcatgagaaattgaatttcaattattcatattttttgcactgacaactagctgtttcagagctgctctgtggaactcaggcaacgcattaaatttaaattctgaactcctttcccttcttctcactgaagagaaaattaacaagaagcatgtggataaatgtaaagcaagcagaagagtcataatgccttggagagactcaagagtatagttcagtaaaaagtcatcatctctggccaggcnnnnnnnnnnnnnnnnnnnnnnnnnnnnnnnnnnnnnnnnnnnnnnnnnnnnnnnnnnnnnnnnnnnnnnnnnnnnnnnnnnnnnnnnnnnnnnnnnnnnnnnnnnnnnnnnnnnnnnnnnnnnnnnnnnnnnnnnnnnnnnnnnnnnnnnnnnnnnnnnnnnnnnnnnnnnnnnnnnnnnnnnnnnnnnnnnnnnnnnnnnnnnnnnnnnnnnnnnnnnnnnnnnnnnnnnnnnnnnnnnnnnnnnnnnnnnnnnnntgagactctgtctcaaaaaaaaaaaaaaaaaaaaaaaaa

SEQ ID NO: 3102 - DNA, 2602 bp, Macaca Fascicularis
aaaaaaaaaaaaaagcgggccggcgtcctggcctggtccagcacctgcgccgccctcgtgtttggagggctgggctgagctgggaacgggcgggacgggccggaggcggcggcggcggactcgccttctctctggggctgggaccccgaggctaccggctgcagatgggagcccgcggagccgaggatgcgggcgggccggggcgcgacgccggcgagggagctgttccgggacgccgccttccccgccgcggactcctcgctcttctgcgacttgtctacgccgctggcccagtttcgcgaggacatcacgtggaggcggccccaggagatttgtgccatgccccggttgtttccagatgacccgcaggaagggcaggtgaagcaggggctgctgggggattgctggttcctgtgtgcctgtgccgccctgcagaagagcaggcacctcctggaacaggtcattcctccaggacagccaagctgggccgaccaggagtaccagggctccttcacctgtcgcatttggcagtttggacgctgggtggaggtgaccacagatgaccgcctgccatgcctcgcagggagactctgtttctcccgctgccagagggaggatgtgttctggctccccttactggaaaaggtctacgccaaggtccatgggtcctacgagcacctgtgggcagggcaggtggcggatgctctggtggacctgactggtggcctggcagaaagatggagcctgaagggcgtagcaggaagcggaggccagcaggacaggctgggccgctgggagcacaggacttgtcggcagctgctccgcctgaaggaccagagtctcatcagctgctccgtgctcagccccagagcaggtgctcgggagctgggggagttccatgccttcattgtctcggacctgcgggagctgcaggatcaggcgggccagagcatcctgctgctgcggatccagaacccctggggccggcggtgctggcaggggctctggagagaggggggtgaagggtggagccaggtagatgcagcggtaacgtctgagctcctgtcccagctccaggaaggggagttctgggtggaggaggaagagttcctcagggagtttgacgagatcaccattggctacccaatcacggaggccggccacctgcagagcctctacacagagaagctgctctgccacactcgggcgctgcctggggcctgggtcaaggggcagtcagcaggaggctgccggaacaacagcggctttcccagcaaccccaaattctggctgcgggtctcagaaccgagtgaggtgtacattgccgtcctgcagagatcaaggctgcgtgcagtggactgggcaggccgggcccgggcactggtgggtgacagtcatacttcgtggagcccagcgagcatcccaggcaagcactaccaggctgtgggcctgcacctctggaaggtggagaagcggcgggtcaatctgcccagggtcctttccacgccccccgtggctggcactgcgtgccacgcatacgaccgggaggtccacctgcgttgcgagctctcaccgggctactacctggctgtccccagcaccttcctgaaggacgcgccaggggagttcctgctccgagtcttctctaccgggcgagtctcccttagcgccatcagggcagtggccaagaacgccagccccagagcagccctgcctgcgggggagtgggggaccgtgcagctgcggggctcctggagagccggccagacggcggggggcagcaggaactttgcctcgtaccccaccaacccctgcttccccttctcggtccccgagggccctggcccccgctgcgtccgcatcactctgcatcagcactgccagcccagggacaccgagttccaccccatcggcttccatatcttccaggtcccagagggtggcaggagccaggacgcgcccccactgctgctgcaggagccgctgctgagctgcgtgccgcatcgctatgcccaggaggtgagccagctctgcctcctgcctccaggcacctacagggtcgtgccctccacctacctgccagacacagagggggccttcactgtgaccatcgcaaccaggattgacaggtctccgtcatggcagtgatgaaaacctaacaggtggctccctatgccagctcaggtgactggaactcaagggcctgacaggttcccagcaactgggccggccagccttgcactgtgagggctggtcctgagtcttggcctgcctcccagccctgccagggggctgctgcctaagagtccacgggaagcctccatcatgagagactcagccctgggggcaagcaggtgctgcagaggaagggcgggaagcttggcggcttctgtcgcgcctctgagacggcagagactccaggatcccagagcttcccaggatccctcccagatcctcctctgctgactccacacggaagcctcacacccacagggtagggcagcagatcttctttatacctatgtattgtttgcatcacttttaggatgtaactttataaataaacatgaacgctgaggattcgcaaaaaaaaaaaaaaaaa

SEQ ID NO: 3103 - DNA, 783 bp, Macaca Fascicularis
  misc_feature (1)...(783): n = A,T,C or G
agacatgagtagagtcatgtatatggtgctgaannnagagtatcagtgaaaagacagggaaaatgtcactactcatctatgttacgcagaacagtcaggtgtaccggggctggatactgctctttgacttgagcatcggttgattaaagttttaagtatcattcaggnnnnnnnnnnnnnnnnnnnnnnnnnnnnnnnnnnctttttttgttaaagaaaggnnnnnnnnnnnnnnnnnnnnnnnnnnnnnnnnnnnnnnnnnnnnnnnnnnnnnnnnnaggtaaaatgctgacctatagaaaaaaatgaactctacttttatagcctagtaaaaatgctctacctgagtacttaaaagcaatccatgaannnnnnnnnnnnnnnnnnnnnnnnnnnnnnnnnnnnaacnnnnnnnnnnnnnnnnntgacctttggccccaaccacaagagctccaagccccaccagctgaccaaagaaagcccaagttctccttctgtccttcccacaacctccctcctcccaaaaccatgaaattaatttgaccatattaacacagctgactcctccagtttacttaaggtagaaaaaatgagtttacaacagatgaaaataggtgctttgggtgaacagtattccttttaacagatccaaactattttacattaaaacaaaagttaaactaaacttctttactgctgatatgtttcctgtattctagaaaaatttttgtactttctatattatttttnnnnnnnnnnnnnntnnttaagggatgatgactt

SEQ ID NO: 3104 - DNA, 726 bp, Macaca Fascicularis
  misc_feature (1)...(726): n = A,T,C or G
atattaaatgacgaaaatgctccttttggtgacannncnngcaaagtatttgctgttatgaacataaacgcccacattcataatatctaatatttttgacaagtgatgttttgtgctgtcatctgaaccctagagaagcnnnnnnnnnnnnnnnnntggtgtcacacgtgtcttagcaaaagggttaccatgatagagggtcatgtgaccaaaagatgctccagagaagcttgcgaatttgtttcagggtgggaggagggttggagatagaaaaatcactttgctctacaggnnnnnnnnnnnnnnnnnnnaagaaattctgttttctctttcaacacctggaaagacacagcagcccactgaggcgannnnnnnnnnnnnnngcacaagaggaatgttttttaagcaaggcgtcccttgcctctcaaacaaatgccctccaagtttgttagggtttctattcctgcaacttnnnnnnnnnnnnnnnnnnnnnnnnnnnnnnnnnnnnnnnnnnnataaatgttttcccccttctaagaaaaaaaaataaaatgacagtgctcgtatttgacacttgtgtattggactctcttttgaatgaataaaaaggaaagggtttggtgtaattcctgatggggtgtgtgttgtttttcatgccatgatttgtgaattgtaattgtggtttcccatttcgttgtcataactgggcagaaataaaaaaaaaaa

SEQ ID NO: 3105 - DNA, 733 bp, Macaca Fascicularis
  misc_feature (1)...(733): n = A,T,C or G
atgtagaatataggcatgtggagtgattcagaaatatcagtctgctngtatccatgagcatattcatttgtattttagggtctctgcttgctgcttaagagagcaaatcagatactgtcgttaaacttacaactgaaattactagctgtcacttacatgatgttgctgggttcttactgaataattttttttttttttttgagacagagtttcgttctnnnnnnnnnnnnnnnnnnnnnnnnnnnnnnnnnnnnnnnnnnnnnnnnnnnnnnnnnnnnnnnnnnnnnnnnnnnnnnnnnnnnnnnnnnnnnnnnnnnnnnnnnnnnnnnnnnnnnnnnnnnnnnnnnnnnnnnnnnnnnnnnnnnnnnnnnnnnnnnnnnnnnnnnnggtcacactgttctcgaactcctgatctcaggtgatccacccgcctcggcctcccaaactgctgggattacaggcgtgagccaccacacccggccttactgaataattttatgtcactgtcgttttttaagaaaacggacctgttggttttgaagagtgaaggaggagctttggtcatttttaatatggagtatttaagatagaagagtttcttttcagttttattttatatatctcttgtatttattttttatgggtagagttcacccttagtatttatgggagattggttccaggacccttgtgcttaccacaaaatgcatggatgctcaagtccttggtataa

SEQ ID NO: 3106 - DNA, 820 bp, Macaca Fascicularis
  misc_feature (1)...(820): n = A,T,C or G
aaaatctcacttnnnnnnnnnnnnnnncctggaccaagccagactgtatgaagagtaccgaggttgaagttctccttccaaaatttnnnntgcaagaggannnnnnnnnnnnnnnnnnnnnnnnnnnnnnnnnnnnnnnnnnnnnnnnnnnnnnnnnnnnnnnnnnnnnnnnnnnnnnnncagcggagggagacctgtgtctgtccaagttcgtgcacaagagttttgtggaggttaatgaannnnnnnnnnnnnnnnnnnnnnnnnnnnnnnnnnnnnnnnnnnnnnnnnnnnnnatggaatctggcccgaggttctgtgctgaccaccctttccnnnnnnnnnnnnnnnncaacagagccaacagccttctgttctgtggcaggttctcatctccataaagggtgcacttactctgcactcagccatttccctcttgctgtgtccccagacccccactacaactccaagaggatgggcctagaaagccaagtgcaaagatgagggcagattccttacctgtctgccctcatgatttgccagcataagttcgtgatgctttacactcagctcttccatactgaccactcatttatcctacttaatcagaatcttgagaaaatagaccataatgattccctgttgtattaaaattgcagcccannnnnnnnnnnnnnnnnnncaaagttcttctagaannnnacaagcaattcactctnnngaccccnnnnnnnnnnnnnnnnnnnnnnnnnnnnnnnnnnnnnnnnnnnnnngtggtaataaannnnnnnnnnnnnnnnnnnnnnnnnnnnnnnnnnng

SEQ ID NO: 3107 - DNA, 737 bp, Macaca Fascicularis
  misc_feature (1)...(737): n = A,T,C or G
cagtcgttcccatnnnnnntcggagccaaaagacacaggaaaaccacggctgggtgtgaagggaatggctgcagggccacagaagccacacccagctaaggcagcacccagtacgcaggcagaggtgctcaccctccagcatgaaggatcgtcagcacacaagagctcttcctgaaaacacagattccagccggcaaagcaacccagagtggaatccaacttcaggaatagagaagcggcagccactgtgttcacgagagtacggggtcgtggaaagacggcccatacccnnnnnnnnnnnnnnnnnnnnnnnnnnnnnnnnnnnnnnnnngcaaagcaggacaatctaaaagcaaggataannnnnnnnnnnnnnnnnnnnngaggaaaagaggcagaagaatcaacacacgaattcttcatgttttacggccatgtctaaaagtgtcatatatccttaaaagatgactcgaaccttgcagtgctttgtaannnnnnnnnnnnnnnnncagagagcactctcaaaaataagttgacagagaactactcatttgccagtcaaaaaaactccgtgagtttccttttctcatcttaagctcaagtgaatgaaatttaactctgactgaaaatagcacctgcagnnnnnnnnnnnnnnnnnnnnntccgttattcacctggagtcacgatcactggataccagtgccagcttttnnnnnnnnnnngcatttttttcctgg

SEQ ID NO: 3108 - DNA, 767 bp, Macaca Fascicularis
  misc_feature (1)...(767): n = A,T,C or G
cagcagtgactaaannnngatagcatgacaagagttgcatttctnnntgattcatctccatgagtgcacaatccctgaactcactgtcttttctccacacttgtnnnnagccaaggtagatttgtatatagacagacgggtgagcaagcattatattttatttttacacttgcatgacattttcattttcatcagtaacattatttggcctgagcttgtgggtctgttcagactgtctcctctcatggtttgaaaccgcatctgaatgcctgccttcaaatcctggccaagttggagtagagtagacaggcctgagaaaactatgattatgttcacatttactggtgcatccttgatcctctcacagatagacgtcttaaaggttgaatcatataacattggttagtagaagaaccttctactaaggatgatgggctttctacaacctgcttaccactaacagtaaggaatctttcataaacacacagtttatgaaacacacagtttgttcccagtgggcttagagggaggccctgatgactgattccaggatacttgtacttctaataaaatttttccctaatcatgagaaaatttccacagatacttccctcagaaaatttgctataaactctgtatcattggtagcacgaatttgagggagaccttgtcaactttaaggtggaaataggaaggaccacaacatgacccgtaagtgaagaaggtagacatttcctattcagcttccttgcttagtctcctttcag

SEQ ID NO: 3109 - DNA, 710 bp, Macaca Fascicularis
  misc_feature (1)...(710): n = A,T,C or G
gctagcagagcccaaaggccgctgcnnntccccagcccgagaggggccgtggaactgagccctgcagagcccnntctggggtgttcagtgacagcagacttttgcaatgaccttattttcccaagcagaaggcaggacaagtgggaaggtagcacaggcaggatgtgcctcctgaagtgtgtcgagtgtcctctacgtggggtgctgtggaggtgnnnnnnnnnnnnnnccccaggnnnnnnnnnnnnnncgtaacgctgcnnnnnnnnnnnnnnnnnnnnnnaaggcccaggaggccacgtagtcaggacttggtctaggtgtgtctgtcttcggctccttgtccctgggtgagcatgaattcagctccaagtagagactccgcagctctactccgcgcagggctgcctggggtctgtcacggtctggtggcatgggacaaggcaatcagggctcctaaatggtccagtgtgagaaacaatgtttgaagtccccatgtagctctcccagtcccttttggcagaacaaatggattttccagagaaagaccagagtaagcacctctgggcacacttgtcatcagctgggagccaccaaaagtcttaacaaagctctcacgtgacaccgtttcttgaaattggtcttcagaaagtacttgcttgccaaagtggagtgcaatgttcaggtctaaaaccaacgaagcacgtgaa

SEQ ID NO: 3110 - DNA, 697 bp, Macaca Fascicularis
  misc_feature (1)...(697): n = A,T,C or G
cttgaacccatgcnnnntgcaaggtaactttgcagtgcctcctattcatctgttttccagttattcaaatcnnnnnnnnnnnnnnnnngatttgctcaaaagaatgagatagcaatattatgcagacttaggttctaggnnnnnnnnnnnnnnnnnnnnnnnnnnnnnnnnnnnnnnnnnnnnnnnnnnnnnnnnnnnnnnnnnntagggctggcctaccagaggatgggatcagatgtgnnnnnnnnnnnnnnnnnnnnannnnnnnnnnnnnnnnnnnnnnnnnnnnnnnnnnnnnnnnnnnnnnnnnnnnnnnnnnnnnnnnnnnnnnnnnnnnnnnnnnnnnnnnnnnnnnnnnnnnnnnnnnnnnncagtacgttatnnnnnnnnnnnnnnnnnagttnnnnnnnnnnnnnnnnnnnnnnntattgtctcaaaatctctcattcccccttnnnnnnntattagtctgatacttcagacttagaatttttttctgtagcaatctatatgtggctttcttgtctccagcgtgnnnnnnnnnnnnnnnnnnnnnnnnnnnnnnnnnnnnnnnnnnnnnntcctatcgtatttccnnnnnnnnnnnnnnnnnnngaggagggtgtttggattgtnnnnnnnnnnnnnnnnnnnnnnnnnnnnnnnnnnnnnnnnnnnnntcttggtggttgggagg

SEQ ID NO: 3111 - DNA, 708 bp, Macaca Fascicularis
  misc_feature (1)...(708): n = A,T,C or G
tactgccatcgcgccnnnnnnnnnnnnnnnnnnnnnnnnnnnnnnnnnnnnnnnnnnnnnnnnnnnnnnnnnnnnnnnnnnnnnnnnnnnnnnnnnnnnnnnnggggctgtgctgcgtcggatcccattggctgtgctctttgggatcttcctgtacatgggggtcacgtccctgtctnnnnnnnnnnnnnnnnnnnnnnnnnnnnnnnnnnnnnnnnnnnnnnnnnnnnnnnnnnnnnnnnnnnnnnnnnnnnnnnnnnnnnnnnnnnnnnnnnnnnnnnnnnnnnnnnnnnnnnnnnnnnnnnnnnnnnnnnnnnnggtggtcaagtccacggcggcctcactcgcctttcccttcctgctgctgctcacggtgcctnnnnnnnnnnnnnnnctgccccggctcttccaggacagggagctgcaggcgctggactcggaagannnnnnnnnnnnnnnnnnnnnnnnnnnnnnnnnnnnnnnnnnnnnnnnnnnnnnnnnagtgtgacccttgaagacagtgtccctcagagaccccaagaccttagggattgacatctgggcnnnnnnnnnnnnccagccccgggccggggggctcctcaggacccagannnnnnnnnnnnnnnnnnnnnnnnnnnnnnnnnagagtggccccnnnnnnnnnnnnnnnnnnnnnnnnnnnnnnnnnnnnnnnnnnnnnncagaccg

SEQ ID NO: 3112 - DNA, 781 bp, Macaca Fascicularis
  misc_feature (1)...(781): n = A,T,C or G
attgcgaagctttggcccttggggcnnnnnnnnnnnnnnnnnnnnnnnnnnnnaggccagtgggacgtctccccagtgctgcttaggctttaacccagcactnnnnnnnnnnnnnnnnnnnnnnnnctctctcctggctgccaccactgaggcccctggtgagtacttcttttccgatgggatccggctaaagaaatatcgcggtatgggttcnnnnnnnnnnnnngacaagcaccttagcagccagaacagatatttcaggtgggacaggnnnnnnnnnnnnnnnaccctaatcctacactgacagtctcatctctgctgtgaccttgcccgtgtctctgcctctcnnnnnnnnnnnnnnnnnnnnnnnnnnnnngcccagggggtgtctggtgctnnnnnnnnnnnnnnnnccatccacannnnnnnnnnnnacctgnnnnnnnnnnnccaannnnnnnnnnnnnnnnnnnnnnnnnnnnnnnnnnnnnnnnnnnnnnnngcttgggnnnnnnnnnnnnnnnnnnnnnnnnnnnnnnnnnnnnnnnnnnnnnnnnnnnnnntctgcccctcttcagagnnnnnnnnnnnnnnnnnnnnnnnnnnnntgagaagagaacgtccnnnnnnnnggtggaaggtggtgtccatagcctccattcgtaagtcaccctgtccttggtggggcctctgccatgcctcatgcctcctttctcctgccctcaccttacaggtagtctttctgcctgcaggtatgagaagcggcttttctgaacaggga

SEQ ID NO: 3113 - DNA, 1686 bp, Macaca Fascicularis
aaaaaaaaaaaaagaaagcttggacatggtttgcagctttcatacaccaagcagatgattgataaaacctgggagtaagtaaggtaagaaaaaggaacaaatttttatctaaaaattcctgtcaccacaagagggcatcagctgctcctttgcagggaactgaggtattgtacttgacagttgtacatgaaattaatgaaagagtatattttaaatatattgtttttaacattaaacaaatatgaaattaaagtaaattaaatttcaccctatttaaatatataagaaaaaaaaagaaatgcacttgtaaacagaatgtttattacctcaaaagtgcatatatagtttgaaagagaaggcattaaaaagaagtgcaattcctttttagcaaggataaaaacattgccttgtgttacaaattcgatctgctgaagagtattccactttctgtgtactcgaattgctttctgtttgctttaccactgcacttgctgttattacaggggaaatatatatatatatatacacacacatacattcttcgttacagaaaatgtaactagatcttatgcccaagaaaaacagccagaagcaaagaaatgcttcaatccttagttgcttcataggcattcatgacattttagtgctttcacaacttgttggttgtactttatacttgggttatatattagacttttataggcttaaaatcttccatcacataagaaaatagaaatcatattaaaagcgaattcttctagaggcttgtgtgcactactggttgttttagttgggccttttatatgaaagttatactgtacttatctttttgttgttgtttaggtttgttggctaccatttctgccttcctttctttggttttggattaagtccaacagtttatttgtaagccctgcagcagatttctttgataatttagcttttactgaatctcttgcaatgaagaaagctatttcatcagtgatttatcactttcaattcattgtgtgaactggaaatattattttatatgagagctatagcaaaataatctgtataaacaaggaatgtgttagcttaaactggatcattttactttttggcatcatgcatctgtactgtgtaccaaaagtatttatatgtctgcaaattaaaggtatattttcataatttctttatcatttttagcattttatatttgaacatgggcttgttatttcactgaagtgcctgtcatttgtttgtttttagggttaaatgtgagtaaactgtagtattctgctatattaaagtttatattaaactaattcattactcaattaaacattgggtaaattattaaatgcgtgtgtagttatagacatatatgtagtagaaagagagtatgcctaaatatttgatgtaagttcatatgaaaatttgcacccatgtatgtgcacattcatattaattgattatagatttaatatcattacgcattttcattttaccacatatttataacaaatcctctgttagcagtgttgcaataacttgcgataatttttaaaacaaaaatactctgcaaaaaaagaaattgaatgcaaacaatcaagttcttttagatttgtattagttaactcatttatcttatttttcttcagtttgagaatttcggtaaataaaataataagtatatgaggcagc

SEQ ID NO: 3114 - DNA, 579 bp, Macaca Fascicularis
agtgctacgtggggtcagagctgggaaaggtgtcaccagcggtggtggccacctcctcctccactgagttggcctccagtgccaactctggagacagctatgcagtggaaggtgcccctgcttgtggggctcatcgtgctgagaacccatgtctgcagctgcaaatttgtagacattgataagaactcgaaggatttcgccagtgctgtggagtatgctgtgtttcagttcaatgaggaccaggaagacgagtttgcctacaagtttctgcaggtacgccggagccagcacaagagatggacgttgatatatttaatggacttggagatggggcgtacagtttgtaagaaacatgatgaagacattgacaattgcccattgcaagaaggcacagaagagaaaatgttcaccctcctgaacagcacctgtgtggagagaaggtggtgacagagcccatggttttttgcagcagaagtcccctcttcctccagagtgtgacagtctgtagtcctagatctgcgcagcctggcagaattaaaggcatttcaaagcaaaaaaaaaaaaaaaaaaaagaaaaaa

SEQ ID NO: 3115 - DNA, 743 bp, Macaca Fascicularis
  misc_feature (1)...(743): n = A,T,C or G
caagtgagaaataagaagctggtcttttttaaggtttttgtnnnnnnnnnnnnnnnnnnnnnnnnnnnagattcagaaagtcacaaatctaaggtgctctttccaggtgtgtttcaaataagacatgggactacaggttgaggnnnnnnnnnnnnnnnnnnnngacataaagtggagtaactaaactctannnnnnnnnnnnnnnnntactcttgagcaacacggaaaaacnnnnnnnnnnnnnnnnnnnnnnnnnnnnnnnnnnnnnnnnnnnnnnnnnnnnnnnnnnnnnnnnnnnnnnnnnnnnnnnnnnnnnnnnnnnnnnnnnnnnnnnnnnnnnnnnnnnnnnnnnnnnnnnnnnnnnnnnnnnnnnnnnnnnnnnnnnnnnnnnnnnnnnnnnnnnnnnnnnnnnnnnnnnnnnnnnnnnnnnnnnnnnnnnnnnnnnnnnnnnnnnnnnnnnnnnnnnnnnnnnnnnnnnnnnnnnnnnnnnnnnnnnnnnnnnnnnnnnnnnnnnnnnnnnnnnaaaaaaaaacaaaagaaagaaaaagaaaaactcaagaaggtcagaggagaatgacagccaacttgaaggaacactgaaagaaattatggctggaaaaaagtaacagctggctgcagatattgaagaactgttgaatgtaaaagtagactttccctctgttttatccagaacaggcttgtccagcccaccgcccagcatggnnnnnnttcaccaacacaaa

SEQ ID NO: 3116 - DNA, 435 bp, Macaca Fascicularis
ctgggattgggacacactttctgggcactgctggccagtcccataatggaacataaggaagtggttcttctacttcttttatttctgaaatcagcactacctgagcaaagccatgtggtccaggattgctaccatggtgatggacagagttatcaaggcacatcctccaccactgtcacaggaaggacctgccaagcttggtcatctatggaaccacatcagcataatagaaccacagaaaactacccaaatgctggcttgatcaggaactactgcaggaatccagatcctgtggcagccccttattgttatacgatggatcccaatgtcaggtgggagtactgcaacctgacacgatgctcagatgcagaagggactgccgtcgcacctccgaatgtcaccctggttccaagcctagaggctccttccgaacaa

SEQ ID NO: 3117 - DNA, 757 bp, Macaca Fascicularis
  misc_feature (1)...(757): n = A,T,C or G
tagagagtagaatgtnnntaccagtggttgggaaggatgttggggatagggagtgaagagagattggttgatggtacaaaaacacagaaagagtaagttctaatgttcctagtacaatggggagaatagttaatgataatttattgtatatagcaaaatagctataatgtttccaactcaaataaatgtttgaggtgatggatatcctaattaccctgatttgattattacacattttattgatgtatcaaatatatataccccataaatatgtataattatatatcaataaaaataaattttaaaagcaattaacgttgataaatttgctttatcacatatttgcccatctgtccatctatccatctgatttactgcattgcatttcaaagtaagttgaagacggcagtacattttaccttaaatattttagctgcatgcttgattctagaattcacattcaaaaattaatattatttattagacttaaattaattgcaagtaaggtttaaaaggctgaatgtgactacaaagaagtttggaatattctcttgttcaaaatattggctgggcgcggcggatcacttgaggtcaggagttcaagactaccttggtgaaactccatctctactaaaaataaaaaagtagcctgcatggtggtgcacgcatataatcccagctacttgggaggttgaggcagccgagaagcagaggttgcagtgagctgagatcactccactgcactccagcctggcaa

SEQ ID NO: 3118 - DNA, 1783 bp, Macaca Fascicularis
  misc_feature (1)...(1783): n = A,T,C or G
agaattgctggagcagtgttcttcagtaagctgtaggaaatgggaaaaagtacagaagtgtaggggattggcaacaggtaagagcaaaggatatattttctctagaataagagaaaggagagagtatggagtatggaggctgataggtggtagatgtgggaatgtggaatttctctttcagtggtttatgtcaatgaaaaaggaaggaagttcatcagttgagaccaaaaataggagaagtgtcagaggtttgtggagaatgcctaagaaaatggttagtcatggaggagagtggctaagggaagggcttagggaagtgtgatttgatttctgcacaatgtcaagagcccacttgagttgtggttattaattaaagtaagaccagtatgaatgggtttgggttttttctaaccatattcaacagcacaggttcaggcatagattaggtttgtgagtcggatttagatgagagagggtcaagggaggtggggacatgtgcacaggagtgattatgactggcaatccaactgaaagagggagaaggcatgaggcaagtggagaatagtgaaaggtggttggacctgtggagttttccagttgcgcaaacctcactatggaaacagcagtttgcaatatggttttaggtctcagcattggaagttggagtatgtttaagcaagcaatcaaaagaaaattttgttgtgagattcttgtagggctccaattttaaacaaaatcataaattgaagaaatgtcttaaggtttttctcattttgttccaactcacaatcattagttaaaactttgatttatggccaggtgcggtggctcaggcctgtaatcccatgactttgggaggctgaggtgggcagatcacctgagatcaggagttcgaaaccagcctaaccaatatgatgaaaccccgtctctactaaaactgcaaaaaaaaccccccaannnnnnnnnnnnnnnnnnnnnnnnnnnnnnnnnnnnnnnnnnnnnnnnnnnnnnnnnnnnnnnnnnnnnnnnnnnnnnnnnnnnnnnnnnnnnnnnnnnnnnnnnnnnnnnnnnnnnnnnnnnnnnnnnnnnnnnnnnnnnnnnnnnnnnnnnnnnnnnnnnnnnnnnnnnnnnnnnnnnaacaaactttgattcactttaaagaaattattgggataatagtaaagagtgttatatattcctgttgtgtaacttgccactaccagattccagttggctgatatgcaaaggaaatgtaggtttggtgatgacctgtgtgttcttgaacagaagattaaatgaatgataattgtttcttttttaaaacttggattgcccacttttttttaaaagatgatttataaatgatgtgtacaggttagattgtgaggggactgttttctgtttacgaaataactcatttttgctgggtatgatgcnnnnnnnnnnnnnnnnnnnnnnnnnnnnnnnnnnnnnnnnnnnnnnnnnnnnnnnnnnnnnnnnnnnnnnnnnnnnnnnnnnnnnnnnnnnnnnnnnnnnnnnnnnnnnnnnnnnnnnnnnnnnnnnnnnnnnnnnnnnnnnnnnnnnnnnnnnnnnnnnnnnnnnnnnnnnnnnnnnnnnnnnnnnnnnnnnnagtcagaggttgcagtgagctgagatcgtgccactgcactccaacctgggtgacagagcaagactccatctcaaaaaaaaaaaaaaaaaaaaaaaaaaaaaaaaaaaaaaaaaaaaaaaaaaaaaaaaaaaaaaaaaaaaaaaaaaaaaaaaa

SEQ ID NO: 3119 - DNA, 727 bp, Macaca Fascicularis
  misc_feature (1)...(727): n = A,T,C or G
tcattatttttgcccttnnnattttannncatcaagtgaagattcaaaaacaaattttataaaatgtagaatagtatnnnntctgttcctgtaacagaatctcagtggagttttttttgcaaaactaatatggatttaatctgatgttattatttcttaaattttagattttgttgggtaccatttatatgattgnnnnnnnnnnnnnnnnnnnnnnnnnnnnnnnnnnnnnnnnnnnnnctgaagaggttttattaagatttagtaatacttaaatagcaaccttctctgctatttttttttttttaatctagaattttgaccattttgactctttaaatgtctggcatctttaccaagtaaacttggaaggnnnnnnnnnnnnnnnnnnnnnnnnnnnnnnnnnnnnnnnnnnnnnnaagtcatttgattgataataaacactacaaatactatgtgttatttataaaatcataaataatacnnnnnnnnnnnncaaaaatttgtatatacttccagaccataagagttgatagtattatttatgactttgtagattaagttatttatgtatgaaacaaagcaggaaaatacattgtgaagggatcgtgtttacagaggacttctttaatgtgtcacattttaaaaatgtaaacatatatttttaatgcacacttaagtaatatttaagaaactaaacaaaataatgatacaattgcagtgttgt

SEQ ID NO: 3120 - DNA, 704 bp, Macaca Fascicularis
  misc_feature (1)...(704): n = A,T,C or G
tacaggcacatgccaccatgcctggctaatttttatatnnntagttgggggggggggggggagagtttcaccatnnnggtcaggctnnnnnnnnnnnnnnnnnnnnnnnnnnnnnnnnnnnnnnnnnnnnnnnnnnnnnnnnnnnnnnnnnnnnnnnnnnncgtgcccagccttgnnnnnnnnnnnnnnnnntgacttgaaatgcagtatgatcctatgtggggnnnnnnnnnnnnnnnnnnnnnnnnnnnnnnnattctgagcgacactaagaaatccctctttcccagtcatattctgtaacacattnnnnnnnnnnnnnnnnncctgcagctttttggcccaggtnnnnnnnnnnnnngccattttgatgattttaaaatggtcgtgggagttgaacatagtcatgaattcaggattnnnnnnnnnnnnnnnnnnnnnnnnnnnngaaagaaacgttcacttagagaagttgaagttagaaagaggaaacagtttatgctaaaaaaaatttttaaaagtctttgagaagaatttttgatttagttttgacnnnnntgaagctggtagttatgcatagtttgtaccaccgtttatgaagatagagaatctagtcagcacgtgttggtttattctaggaatttctatggaacnnnntatgttgctggcaccanntgctgaatatggnnnaaaaaacgactcgc

SEQ ID NO: 3121 - DNA, 732 bp, Macaca Fascicularis
  misc_feature (1)...(732): n = A,T,C or G
cacaagtaccctctaaggtctggtcaggactgactgccaaatctctaccacagcctggacctcctcgtgaaatatacctaacctgccctgcagtcagtgtgtcaagtcctnnnnnnnnnnnnnnnnctttgaaatgtgttgttatttccctttaaactgcagccagtgaatactaatttacttgaaaatagagggtatggattttgcctgttttgtaatcagttttcttgttttagtactcagggctttttatttgttgtttaatttttttaattgtttttaagtcagaaagatctctgggttatctcatgtgctaagggaaaactattttggtttttccaactttaatagttcgtatttctaggggaggcaatcaggacaagatatgccattaactgttggcagtgtgaaatctgtaagactcaatctctatgatctcaaccaaagctttctgagtcctggaactttgctttgggacaatctgactttactcatttatatactgtacttaacagtttgtagctaatatatgggatcataacctttttttttagctaatttacgggggtcatatcaatcgtgaatagccttttaaaaaaaatttataatccctaaatacaaaaatggaaatggaaaatttataatcataaccctcctaattgggagtattataagtttgtaatgctttaagcactgcctcttacgatggtaaatttataagatgataaattt

SEQ ID NO: 3122 - DNA, 1770 bp, Macaca Fascicularis
caatctctatggagtccttaaaaggcacaggagattcagtagatgaacagaattcctgcaggggagaaataaagagtgcatcactgaaggatttatgtcttgaagacaaaagacgcattgcaaacttaattaaagaattggccagagtaagtgaggaaaaggaagtgacggaggaaagactgaaagctgagcaggagtcatttgagaagaagatcaggcagttggaagaacagaatgaactgatcatcaaagaaagggaagctcttcagctacagtatagagaatgccaagaacttctaagcctgtatcagaaatatttgtcagaacaacaagagaagctcaccatgtctctctcagaacttggtgctgctagaatgcaggaacagcaggtatccagtagaaaaagcactctccagtgttcatctgtggaactggatggttcctactcgagtgtagccagaccgcagacctactatcaaaccaagcaaagacctaagtctgcaatccaggattcagcttcagaatcccttatagcatttaggaataattctttgaaaccagtaacccttcatcatcccaaagatgatctaggtaagataccatcagagaccacaacatgtaattatgaatctccagggagaaaaccagtagatgcagtcccaacagagaaaatgccacaagaagaattgcacatgaaggaatgtccacaccttaagcctactcctactcaatgctgtggtcatagacttgctgcagatcatgttcatgagagccattctacaaacacggcccctcaacatcctaagacacatccagaatcatgcagttattgtgggctttcttgggcgtctctgttgcatggtggaggggcgctgcaaccaaatgaaactttgaaaaagcagatctcagaagatagaaagcagcaactgatgcttcagaaaatggagctggaaattgaaaaggaacgtcttcagcatctgctggcccagcaggagacaaagcttcttctaaaacagcaacagcttcaccagtctcgactggattacaattgtttattaaagtcaaactgcgatggctggctgcttggaacatcatcatccgttaaaaagtaccaagaaaccccaaacagtggagagaataggaaggagaagaagacagttgggtttcattcgcatatgaaagatgatgcccagtggtcatgtcaaaagaaagatacgtatagaccccaaagaggtacaatgacaggagttagaaaagatgcgtccacatctcctatgccaacaggaagcctaaaggattttgtcaccacagcctcaccatcattacagcacaccacctcccggtatgagacatctttgttggatttggttcagtctctgagcccaaactctgctctcaaatctcagcgctgtccctccagagaagctgggacctggaatcatggtactttccaactcagtcttccaaaatcgacctggaagaagatggggatgcacagaacccctgaagagctggaggagaatcagattctggaagatatatttttcatttgacatattgcaaaattttcttaggaaatttgtgggtttccccacataccgatctagcattttaaattatttcattgcaaagtaattgtgtctctcttttcacagggacctatctcactagcatcctgttatgtattgaatatagaaatcattctaaaaaaaaaaaaaaaaaaaaaaaaaaaaaaaaaaaaaaaaaaaaaaaaaaaaaaaaaaaaaaaaa

SEQ ID NO: 3123 - DNA, 1741 bp, Macaca Fascicularis
gtcgctcctaagaatccattgctggggctggccggcctgtgccttggatcctctaaggagatggaactgcgctcaaccaggatgagaggctgcccgaccaatgcagctgccgcccccctctgctgcagaggctttgctttttgactccttggtgaccctaaagttgaagagcttccggccggaggccattagatgggacacccggaaggcggaacatccattgtttgggggtttttcagtcatacgcccagcagaggagagaaaggtctagtaagcacccctcctgtctttcataatttccagctcgtgcctggctggttctcctcctcccacggttgcctggaacttcgtcagactgtttcagcacttgtcttcagagggttctcgataggcgcagagcagcaccagggctgtggcctgtggcagctctcacagctgttgggagagcccagcacagagtggaagaggcgccatgaggggagccatgtctgacctctggtcaggggtcatcagtgccaggcaccttacgggtgatgtcacctgatatatttttagggagatagctgtttcgctccctttttactcaaccattgggagtttgagaactgaagggatttttcctgagatacgagcaggaagcagcagagcccagacgggaactggggcctgactccagggcctgactccagggctggtccttgtcctgcagggccattcgctgtctctgaaggctgtgcatgttcagctgtcacactgcgcacctggccgagctcttgctcagtaggtcctcccttggctccagagattcctgctccgttaaacaaggcctttcctcagattccagtcccaggctgaccaggacccacgtgttgactttgagcctcagcctccttgtctccacaatggagtgattcgtcagtgtcaagcccgagctctttcctgcccatgccattggacagagcctttccccagtctcctcaggcacagccgctggcctccgttaggctcaggcccttagctggttgccgagttgttccctacagcctgtatgtgggtctctgtgacaagaatgtctggtggctcctgcccttgggaggctcaggcttctcagccagtcacacagtgactgctggtccttcctgggtctgtttttgagcacgtactctgcaggcaagccatcttctgtgtggtgtagtctcatgtacttgccatggcagccacacagatggagatcatcactcctttacacatgaggaaactgagcctcaaagagggcatcagaccccaggatttagacccagacaattctgcttgtaaagcccttactgttttctcttcactctgcctcccctcagttttttattgctggggactagagggagctgggaagaaaacaggccctagatgggcagggcagccctctccccgggggcctggcaggtttactggttgtggcagcagcttcccttaggggaggggcttcggccacatgccctgaactgggaaacccaggccttcctgttcaccctgagctgcttcctgagacaaatgctcaagcgaggctgcagggtggtgtggtggggccgagtgtgaccgtttgctaaataaagtgaaatacccaacctcaaaaaaaaaaaaaaaaaaaaaaaaaaaaaaaaaaaaaaaaaaaaaaaaaaaaaaaaaaaaaaaaaaaaaaaaaaaaaaaaaaaaaaaaaaaaaaaaaaaaaaaaaaaaaaaaaaa

SEQ ID NO: 3124 - DNA, 633 bp, Macaca Fascicularis
cacctgggcgcggcgggggcctgcaaagttcaaatcccagcctgcctcttaccgaaggagtgacctgacagatggctcagctcatcgaggccagaaaggtcactacaattgcaagtgtcgagagagcaggcgtggagtagagcaagaggggacaggacctcacctacctagagagacatctcctatttagttcactctcaatccccagcacaggaagaagaaagtctcattcagtgataatagcctttaacacctctctctaatatttgctaatctcccttcttaacaaagagagggcagaattcaggctcacaggtaaccgtatttaattagaatctaatgacattattgtgcttatgtaatatttgtttctactttctatttatggcaggtgataatgaattctcatttaacatagtgtgataatatttctgtttacaatttatttaagtgaaaatgaaaagtgagtccatttaaaagtagagtcacaaagatatggcaaaaaagatgatatctgaaggactgattttggtgaaaatgtagttcttccacttagtatcagcctgttttctggtgacttctctcagttagatttttaatctataaaatgagattaataatagagctttttag

SEQ ID NO: 3125 - DNA, 766 bp, Macaca Fascicularis
  misc_feature (1)...(766): n = A,T,C or G
aaactgatatttnannnnnngaatgtnnnnnnnnnnnncgctgcagtgctagatttgctagggnnnnnnnnnnnnnnnnnnnnnnnattgcttgtattttagtcagggtttataaatgtagatggtcaaatttatattgcttagtgatggaaaattcaatttttttgattttttttttccaaatattaaaaaaggctctgtatgcatggtggggctatgtaaatactctacaagtatggccctgttnnnnnnnnnnnnnnnnnnnnngggtcaagcaatgtaaactgtataaatgtaaaaacagccccccacacataacccctggaatatatggtaaaaacaagtagaagctgtttcagtgagtgggttttttccccctgcctgcggagggtgcctttctcattnnnnnnnnnnnnnnnnnnatctcatgggaaatgacaaagatctacttttgtggcagaggactttgtagatttgttattttaagagaggttattcctttttattccttccctcccgctaatttgttggcctttaacagcaattttggaaactgggtcttctggttatgtttttgttttaaaatctttaaattagaggatgnnnnnnnnttgggtgctttaagttaatatgagtttctggttcaaggaaaacttatgttggatctgaactaatgagcagatatttnnnnnnnnnnnnnnnnnnnnnnnnnnnnnnnntcctaactaaaggttctagtggcatccaggaccntggggaggcatta

SEQ ID NO: 3126 - DNA, 1586 bp, Macaca Fascicularis
agtctacctcctgtcagctgccaccgggcgcatagtgagctcactgctgctggagccggaggactgcgcggcagccgtggcctactgcctgccgcgcgaggcgctgtggctgctgaccaaggccgggcacctggtccgcgccaacgcggcgcgctgccccatgagcgtgctgcaccgcgtgtgcccgccgccgccccctgcgccgcagccttgctgtctgcacctgtacagccacctctgccccagcccactgacatgccacccagcatcccacctgtgcccgtccctgcttgcagcaaggccttgcctctcatccatcgtcggagggcaacatctcagccgaaggaggtggggtgggtcctcctgaacccgccctgcccaggctcaggccccagccttcagccctggggcaggcctgggatccctgtggttgtctgggcagcacgtagcaaggctcaaggaagagcaggctgatccctgaaccctgactcaggacttggacgccctagtggcccgggaccgagaccttcagcagttgaggctggggctagtggtcccagcagcccggcccccaccctcctggcagcagcgccaagaaggctttgacaattacctccgtctgatctatggctctggcctgctggacctggggcccctggaccagcacttctcccatcctccccgagtcacagtgccgatcccacccacccaccgtagggtgcacagcaaggcatcccagcttttggcccgctcctcactgagccactgcctgggtctcagtctggatctacagctgcagttggagcagctccgagggaggacgaccatagccctggacctgccatcctcccacctgcagtgcaggatcccactgctgccaaagagacagcccaaggaacctctttctagccttgggggcttctttcctgccaccgtgcagccccacaagtactgcctgaggcctatctgcttccccggctatgtgcccaactcagtggtgctccagcagatgtggctaaatgcggaggtcagcggcctcggatccctgactcagctcgcctcccagagaaagctcaagtaccccaggccatcccaagcccagtggcagagaaagctgctccagtggctgggggataagcctggagaggaggaggaggaagatcagaaggaagaggaggagaaggaggaggtagaggaggagctggaccgggcctcggcttccctgagctcgcactccagccagcagctggattcttgggaactggaggagcagagtgctgtggactggacccgggagccccggcggcgcacctacgagaccgccaggacccaccctcatccctggcaccgtcatgggagtttgcttttggatgagcattacgcgcatctgcccaagtttctgcatttcttcatctaccagacctggttcaaagagttgttccccgtcttcaacctgcaggcatacccggaggcgggcacagtggagggcctggcctcagcctgcctggctctggggcttgccattggtatttggccaaggcctgcatcgggaataaagtccagagaatttcaaaaaaaaaaaaaaa

SEQ ID NO: 3127 - DNA, 716 bp, Macaca Fascicularis
  misc_feature (1)...(716): n = A,T,C or G
aaggagattgccacagtgagacttaagtaaatgtttgctnnnnnnnnnnnnnnnnnnnnnnnnnnnnnnnnnnnnnnnnnnnnnnnnnnngtttattctctaattccaatatgtcttttgcttccaaaagcaagaacaagtttcttctctcccctccttcccacccttttttcaaaggcaccacaagtatagacagttgcactacatcaaatctgtttttgacacttgtagaaaccagtacacttttagattagacagtatctttttttaatattttgatttgttttcctttagtttgagaagttgtataatacttaattgactgtagcaaagttttatatatgttagcgtagctttaatttatcctcttataaaactgttctgaattttcttttggtttttaaaaaacaaaacttgttgcttagaagccatgaactattttattttacttcaactgtcaaaacttccttgtttttaaaaatgatcatttgggttcactcaggaaatgcatgtcaggaacttgtattataagtttattagttgtgatgtatcagtaactgctgttacccctttttcaaagaaatataattgattttgaagttttctagattgtcacatgctttgtgactaatgcaagaaagcaagtcttgtgttgtatttgttctagtcatttctattcaggctatatattgtagcttaatttttatttgccatta

SEQ ID NO: 3128 - DNA, 757 bp, Macaca Fascicularis
  misc_feature (1)...(757): n = A,T,C or G
cattttacagatgaataaactgaggcacagagaggtgaggtaacttacctnnnnnnnnnnnnnnctaagtggcagagccaggattcaagtccagcccctacttctgcttcccatacctctgcccacccctgcaggcctccatcnnnnnnnnnnnnnnncttcctggaaaggtctcctgcttctatctgcctcagaccacccccagattagtggtaactcagcagcccttgctgtgacattctggggcctcaaggatggggcggtttggannnnnnnnnnnnnnnnnnnnnnnnnnnnnnnnnnnnnnnnnnnnnnnnntgccctcctcaagcccctcctgtgattactttttgacagccctcgaagcagctcagagagggtnnnnnnnnnnnnnntcaccttcccatcccggtctctgggaaggaggctttgacagatgatgatgagctgggtcccannnnnnnnnnnnnnnnnnnnnnncacatctgtctggctccccctccaaactcaagcccactcctctccccgcaagcaggccagcctcccccagcagctggcaccctgccccatccccacttagaactcatccctgcaggggatggaggccactcagccctgtctaagggagaagccgtgagtgggggaagggacactttgctttggcagcatctctaaaagaggtgccagcttcaccccaagcagcagcgagcagcgccggaattttgtggtggaattgtttgacattgcctgttggttt

SEQ ID NO: 3129 - DNA, 751 bp, Macaca Fascicularis
  misc_feature (1)...(751): n = A,T,C or G
aaatgaaggatggcataaagagtaaatcttgaggagcagtaataatactttctttccacaccccagttcgttgtcttgtgcgtcctccagaagcatacgctttacctaaagactgcnnnnnnnnnnnnnnnnnnnnnnnnnnnnnaaacatgtatgatgttcctcttatgatatatggagaaatcctagagatttggagtttttcaggagagcttattgtccgcttttgaaatttcacattaattctttttgataaattcccagataatcatccattaccatatgtannnnnnnnnntcattcatattactttcgtcagtctgttgtctcttatcttcatgttaggtatgactctttttattttactnnnnnnnnnnnnnacttgtttgggccttatgttgtattttaccaacaaatttagaattatttcaagttgttttatgttaaaatatataacaagttacattttcttgctgcattaatacgttttttatttttaaaatctgatattggccnnnnnnnnnnnnnnnnnnnnnnnnnnnnnnnnnnnnnnnnnnnnnnnnnnnnnnnnncacgaggtcagnnnnnnnnnnnnnnnnnnnnnnnnnnnnnnnnnnnnnnnnnnnnnnnnnnnnnnnnnnnnnnnnnnnnnnnnnnnnnnnnnnnnnnnnnnnnnnnnnnnnnnnnnnnnnnnnnnnnnnnnnnnnnnnnnnnnnnnnnnnnnnnnnnnnnnnnnnnnnnnnnnctggcc

SEQ ID NO: 3130 - DNA, 703 bp, Macaca Fascicularis
  misc_feature (1)...(703): n = A,T,C or G
taggtagtgtaagtgcccctttgagaaagatcaaaacagcaaatgggttcagactgaaaatggccaatggcttctagcagataagtagataaagcttgaggatatgcatcctnntaggtctcaccaaacgctagcagctaagcaaccagtttggagacctgacctggaggtttctggaccnnnnnnnngtcttaagatgtccatgagggtttttcctccctggctgtctgaggattgannnnnnnnnnnnnnnnnnnnnnaagtatccaaactaggaaggtcatgaccaactgactacttcagaggaaacaaatggtcatctatgtccttcacctgggaaggcaacaatacctgagatagaaattcaggacaaactagccaaaatgtacaagaccacactgaatatcatctatgcatttggatttagaactaattttggtggtgggaaaacaactagctttggcataatttatgattccttggattatgcaaagaaaagtaaacccaaacatagacttgaannnnnnnnnnnnnnngagaagaaaaagacctcaaaaaaacagtgaaaggaacgcaagaacagaatgaaggaaattacggggactgtaaaggccannnnnnnnnnnnnnnnggtgggctggagattggatcacagccaaaggagtaaaggggcggcagtgatgttatctgcggccattgtgga

SEQ ID NO: 3131 - DNA, 676 bp, Macaca Fascicularis
  misc_feature (1)...(676): n = A,T,C or G
agacagggtctcactttgttgcccaggctggagtgcagtggctcaaacacagttcgctgcagcctcaacctcccaggctcaagcagtcctgctgtttcagccttcaaagtagctgggaccacagacatgcaccaccacaaccccagctgannnnnnnnnnnnnnnnnnnnnnnnnnnnnnnnnnnnnnnnnnnnnnnnnnnnnnnnnnnnnnnnnnnnnnnnnnnnnnnnnnnnnnnnnnnnnnnnnnnnnnnnnnnnnnnncacgcccggccagagtgagccgttcttatctcttagggaatggtgggaaccctcctggaatctatgttcctagacaccagtcaagggcaaccttgaagcaggcctttccaaagatcgcagttgaggcctgctctgttactgtttttctgcacagtatgcaacaccacacagatgcccagtttccaccaaggtctgtggatggcaagataattttgaggaacctcctttttcgctaacatttttcttcttttgtttacactccacattctctattgagtctagattcaagatgattgatcatgaatattgtgcatgattttgggggtctcctctttgtgaaattttgaggtggcagatttgacattctactttaaactcatcttggtggtacttttcttgactcaccacctgagg

SEQ ID NO: 3132 - DNA, 698 bp, Macaca Fascicularis
  misc_feature (1)...(698): n = A,T,C or G
ctgcccannnnngattcgacctggccttgctgcagctggccacccgnnnnnnnnnnnnnnnnnnnnnnnnnnnnnnnnnnnnnnnnnnnnnnnnnnnnnnnnnnnnnnnnnnggacgagtgctggctgaccggctggggcaggacgtcctactacacgccactacacccaccctnnnnnnnnnnnnnnnngcacatcccactggaagaccatgaggcctgtgaggagggctacaaggagtatctgcacaccagtgcccacgggagggtcatcccggaagacacgctgtgtgccggcagcctgggccgcggcccctgcatgggggactccggagggcccnnnnnnnnnnnnnnnggaggctcctgggtccaggtgggcgtggtcagctgggggatcggctgctccacnnnnnnnnnnnnnnntgtcttcacnnnnnnnnnnnnnnnnnnnnnnnnnnnccgccgggaaatcaggaagtgtgggtgagccccgggtgggcccgaggatccacggaggaggcggaggcggcagctttgtcccgactttccctagtggggctttctgatcccctccacccacacctcccgcccacttccccgtgcttcagccccgctcccatccccctcttcctcccctctccttccccgccagttccgagaggagggcagaggcgcccatggagctggggtgccatgcggc

SEQ ID NO: 3133 - DNA, 742 bp, Macaca Fascicularis
  misc_feature (1)...(742): n = A,T,C or G
aaaaggctgaatgcaattgccagcaggcagataaccagccagccttgtttagnnnctgtctaaccagtgcttggcagcccaggagtggtcctggagaccacccaagcctagagttgggcaacagagtgacctccatgccatnnctgaannnnnnnnnnnnnnnnncaaggcctgggggacacagagagagagagaagcagatacaagtagattgcacagcactaaccagggcaggtcaggagagaaacaggcaaaaggannnnnnnnnnnnnnnnnnnnnnnnnnnnntgttgaaggttaggcttgttttaaaatgaaaacttttaagcacgtaagaatagagaccagtgaaacctacacactcatcccccagnnnnnnnnnnnnnnnnnnnnnnnnnnnnnnnnnnnncgatgaaggttaatagggagtgacagaaaagggggtgaggtgctggagtttcagacaggagccaatatatgaagatctttcnnnnnnnnnnnnnnnnnnnnnnnnnnnnnnnnnnnnnnnnnnnnnnnnnnnnnnnnnnnnnnnnnnnnnnnnnnnnnnnnnnnnntatgtaataaggaaagggcgatggacttgggtgaatgacaagaacaaggatgaagaggatgacaggactacacacagggccaggcacagtggctcacgcctataatcccagtgctttgggagaatggggtggacggatcactgagcccaggagtttgagaccagcct

SEQ ID NO: 3134 - DNA, 709 bp, Macaca Fascicularis
cttgtacttctaaaatatttttttgactatttttttcaattaaataatccatcaaactttttttagcttctactttttcttctaattgattattttctaaaataggttttccatcttctgttgttggtatcaataaattatcaatagttttattagcatcatttgaagtttgagtattatcactttttataactgtatttccttctgaagttacagtttcttgaagttctttaaaattactatctaaagaagctttattatctacttttatctcttcatttttttgttgattattttcgatatttaaaatattatctttttttgtagtattttttttattctcttcttttgatatttctgtttttatgatttcgttattaataacttcattttgaattttattatcttttattatatcagatgagttgttactcgtttcttcttttatttgagtatcgtttggtaaaataggatttttagtattttctgttttttcactattttcttctaaagaagtatcctctttagcattttcttcagttgaaatatcaactgttttttcatcaactacttcaatatcactttctttactacttttattatctaaatttggctcatttttaagattttcatttggtttgtttaaagaattattagaaactgttttgtcttcagatagttcaccttttgcttcaattattagtctaga

SEQ ID NO: 3135 - DNA, 2196 bp, Macaca Fascicularis
caggaagagtaataaacttttactttggacatgtggcaacatcataattttgctaagtgaaaactgggaaatatagtaggtaattttaaaatttggcagttagtctcagcatatcaatacagtactgaacgtgtatttgagtaattcatttcagttattcagttcttgatttatgataggaagttatgatttaagtttactagaagaatctgtgagggtgtatgttaaaagtggaaatgccctttatataaaacattttaagaggttctggcaatacgtaattgtaacagtataggaagtagggttgaactggtctcctaatgagattttttttggcaacagatacagttataatgtgctaactcaaaggagacattgcagagaatgttaaagttaaggataatcaaaaaataacctggtagccttgctgtttaatccaatttgctgtaaaggtaggccttggttatattccattcaaatttaagaactttgttacccgtaccactttttctctagccagacgcagaatatatccacaacttatcaatgagaagttggagaggcagtacttttcctagtatggaagccaatttaggggatttactaacactggcttggaaatttgtttaaaaaaaataataagcaactatgcatggatctttgaagtaaatcttaaaattgattatttttattatgtacaagcctgaaattgttttcatgtgttctttatattcctgttgtttttacaaattaaatataggcataacttttccaagtcgatctgattttttcttttctgccagacttgaattgtgttcttcctttactttggctattctgtgaataatttaaagcattcatattcttctagaggaattaccaatggcatgtggaaattgtttcagatctacagaaggaatacttactttaacatatggttattttatgatttaagaaagttatcatggtaaagtaatatggagcacaattcataatccaaaattaacgaggaaataacttgggtacattaaatgtactaatgtgtggaccaaagagatttaaactcttgtttttactctagaatgaaagtataattgaatggttaatggtttgtagagtgtcctgcagttatctcattatcaagttgctttacattatgaattgtgtgtgtatgtatatactttcaattttaggggttatttttgtttcctttgctgttttcagttatttccatggagattttgtgcaactgtcactcttttgatgttttgagatgcagttgaatagtgtgagtttatgaattgtcttaatagctatttatatgctgagattttttaaaagttagtagctttcctatagacacaagaaatgtttaatgatatatatacacacacatatatatcattatatacatatatagagagctgctatatatgaatacagtctacttggaaagctttttttcaatgaacactttcatgttctagtggaaaatttgttcagtgtaatgatcttttaaatagctttgaggatgtttgagaattttgaattttgggaaaattttcttcatttaatagagctggagacccttgtttgggacatgacaaaagcccttattgatgtatttgggttatatactttgttaaaatttatatatgatttagcagtacattttcttcgtgacaaatgcaggaagggagggaggatcctctatagtggacactcctttatttaaaaagtgtttaataaaatattgtttacagaaaataattgtttctccccaaagaaagaactcctacatgtccaaactaattattgtttaacatactgattaaaaatgcccatagttgacagctagtcaggaggccccaaataaactacaaataatgcttaaaactttaaaagaaggagaactagtagtcttccccatgagacagttccaaggtaataccctaccttgcttaggataaacagagtcctaaatgatggctctcttcagggcctgtagctgaattattctttagatcttaatgtttaccaaacagtgttacagtttgttacccaatatactttcttagtatttgcagcatacatttcactgctcgaaaaagtataagggttgggttttgtttgtactttaaatgagagaaataaagaaatgagttggcctctaaaaaaaaaaaaaaaaaaaaaaaa

SEQ ID NO: 3136 - DNA, 678 bp, Macaca Fascicularis
  misc_feature (1)...(678): n = A,T,C or G
gtgtatnnnagaatatatnnnnntcatnnngcggagctcttgtnnnnnnnnnnnnnnnnnnnnnnnnnnaatagtgttgggcagacttacatagtacatctgaaatcagatactggtttattcgaccatatttctaagnnnnnnnnnnnnnnnaaattgttttgttttttgagnnnnnnnnntataannnnnnnnnnnnnnnnnnnnnnnnnnnnnntgattttacagaatctgttttaagtaccaattttggtttttcaaatcaatgtttccgannnnnnnnnnnnnnnaaagtggttttaaatggatattctgaatctagttctttagaatcctctttgaattgtgaaatgcaaaataattgctagcagtttaacctgaaagatctttttacgtgataaatgggggaggagaaagactgaaatgaaaatgttcaagaccctggtttgaaattgagtaaaggtctagatactgtaagttttagaatagctttaaagacaaagctaatatcccactcggtgagatcaagtaacttgtgatttaaaatttaaagtaaccagtggccattttaacttcactaatttctcttagaggagctaatttctaattgctcataattgtaaaagagatttctggatggtaaggaagatncnaagatgatttgtcttgaagaatggt

SEQ ID NO: 3137 - DNA, 720 bp, Macaca Fascicularis
  misc_feature (1)...(720): n = A,T,C or G
gggctggagttcaacagatgtaaagacttcggtgaagcaataaacacaaaactctgggagaagatatccagaattttgtgcactactctgtttctttttcaaaaatgaggcagatcagatgtccctgagctgcccctttttttctgattccccactgcagtgtcctcagtcagtgttgtccctnnnnnnnnnnnnnnnnnnnnnnnnnnnnnnnnnnnnnnnnnncttgagctgagcatcagtcacctgtgacgtggccaccttctgtcctgctcccactcccgacccatgctggaccccggaggacctcctgccctgcccctaccacacacccatatcccccaccattccaatttgttctttcccgtggggaatttttttccccaacgtctccatccattccttcatatccacacacgcacaaattggtctgatcttttttccattggttaaacatttaactccatgccagaccttgttttaacccctctcacatcatgttctttccttttttgcgagttattttgcattaaccaactttgtcagtgacagatgcgtatctgagggtgtcacgcacgaccnnnnnnnnnnnnnnnttctgggccatggaggaccgtctaatacatggacttataaactgactgcatgagcaatgaaaaggccaaattattctgaatttttttttgaatcactgtaaaaaaactgatttcttttgtatag

SEQ ID NO: 3138 - DNA, 1134 bp, Macaca Fascicularis
aatcactccaccaggtgccaaaccttattctccggccagaacttcaaaagcgcaatctccaattcttattaaagcacacattacttatcctaacgtctatttatgggtgcgagagcctccactccccaccgtgctaaatgcagaggtgtagtcacattacttatcctaacgtctatttatgggtgcgagagcctccactccccaccgtggtaaatgcaggggtgtagtcagggttggaaaagcctctctgtgaccgacattctgacacagtccctgcgagtaaccaacacttttaacctgtccccttgattagttgatgactaaggatcaggaaacctccctctgggctgacttctccaggtgtggtctgcaggcaggaggcctctgcactccctcagggtcacagccacctgactcaaagtgcagacagctggaaagaggcttcccgcttcaacaacttccgtccaccaaccagattgccaggtcttcatctgcagcttgtcagaaatgcataaaccttaagccttacttgagaccgactgaatgaaaatctgcattctaagcaatcccagcgttacagcttcagaagcccaatctgcatcctctcctttgacgctacatagactccctccctggatggagctcgtcttcgctagtgtctttataacacacaattttctatatttttagaacaaaacattcttctcagtgcatatcaagaggaatgaaataaaccacaaaaacaaaaaacaatcgagctgttatccaattccaaattctggagaattcaaccgtttcttcctgggaattttctggtaggttactggacaagttgtcaatacgttactaaaagggatgaattcaccaagaaaatgaggatgatacgtgttgggtttctccaaggaattcactgccagtaaatgagaccatgcaagttagaacctcataaacaatcgcatcatgtaaacggttattaacactaataatgatcattaatactaataatcataagatggaaaataaccccataatttcctgagtaactcagtaataataaaataaagaaaatatcaactgtgaaaaaaaaaaaaaaaaaaaaaaaaaaaaaaaaaaaaaaaaaaaaaaaaaaaaaaa

SEQ ID NO: 3139 - DNA, 126 bp, Macaca Fascicularis
gacacacttgatagatccccacagtgagatttgataagacactagatagatccccccagtggaaacccatcctcaccaacaacccattgagccgtaggcacggtcgtccctcacctccaccttctc

SEQ ID NO: 3140 - DNA, 2416 bp, Macaca Fascicularis
aaaaaaaaatgattttattactaatagaccagactttaaaaagtttgttcgtgtgtttgtgtggtcatctagccttccacagtgtgccctttcattgtagcaaaaggctagaacagggcctttggactaagccagtccagtgttttcatctggacccaaatatggttttagtccttacgggtgagccaggtccagaatatggttctggttggttacctggtcacatattgtttaagatctgctggccgcttgctagttgatgaagtagattatttgttttagcatgtttcctgagaaaagaaactgttagactaggattagataggaggcctatgcttgggctttgaggtgactcaaacttactctctcactagaggatcaaactgatggaaaggatggtaacattgagtccttaaaggaggaggtagtggcaggcagaagcaaaacaaatggggctagaatgggagagtaaattaagattaacctgcattaacaaagaggatcccaaatgcaggtgcttaaaaagaggactcacagtacagtgggttctttcccttttacggaacaatcccgaagtgagtaaaccgtgttggaggtgttctctgctccatgcgatcatttgggatgcaggcttttttctctcttcttgtgctgttacctcctagtgcattgtcttcatctgtgtggttgaaactgccatagccatgctcacatccaaggtgggatgaggaggagcatggagggctattcccaaggtttagagttcacacaggaagcacacatgcttcctctcatattccacaggtcagagctgagtggtaacctcacccccagcttcaagggaggctgagaagtcttctctaactgggaagccatgtccagctacaactgcactgcaatgagacagcaggtttttggtggacagctagcaatcttcctgcaaaaagacttgcagaaagaccaaaaagagatgcaagcaagccatttgttgatgtgatggtgactgttctaagataaattttatctagaaactcaaattataagcaaaaactacaaaaatattagcattcttctagaaaatgaccttttaaaaattaaaacattagaaattccactaacattcttaacttatatcaaagagaaatttcaccggacactttttaaaaatggtgaggaagacgttattcaatactatggcaatagaagtcaaactgttgtaatagaggagagagattgaacccaactctgaattcgaggaccggacagcggaggactcagagccaatggtcagggtgaagggggtcagtggacggaagtttactaagaggaacttggttagatatcaagggtgagtggatgggaaacttaattggaggtcaagggtgggagatttttccataaactgacttagcaggatataagttgctaaaactgacagaccaaggatgaggcctagtcatgaataggactcagaggagtctgactaaagcttggttaagtaggaagtccttgtcaactgttattacgatttaaaatgagttaactcttagattatgtcgttttgctactaatcattttggagagcatagaaagacagaaatagtgtaaatagacacaaactttacataaatatttatatcgtagagagaggtaaagaacaatgaatatttgtagtcaacagaagctacctcatttcacttttctcctttatacagtctgtgtgtggggttgtgacaaggcatgctaaaggaattcttaagattccttctacctctatagttctcttggttaagttagatagtaaagttaggtgatagaacgttttaaattttatttaataaagctatataggattactattttcagatcagtttataagcaacaagtttttaaaaatcacgatctcagttcaatgatatcttgaagtgcttagctttgtaaataaatataatttctttgtagttttcaaatatgaagtccaactaagtagtcagtgaaaaaacttgtattttgaagcagtgcaatacatgtttgttatttattttcttatagctttatcatcctaacgttgtacgttattacaaaacatttctggaaagtaagtatgagttttcatgatatttctaaataaggaaacatttttgtcacatatatttttatattagaatgtcgcaaaagaaaccttatcaactactttattgacctttttttgttaatatgacagtagatgatcttaagcatcactttcttgactagcgaaacaatgacctagtcagtgacctgaagatagttataaaatacttagctccctgtgtgaaaaacacatgaacaaatgaaaatagttattgctgttctcatatacaaaaaaatcacttaataggatcaaaaaaaaaaaaaaaaaaaaaaaaaaaaaaaa

SEQ ID NO: 3141 - DNA, 761 bp, Macaca Fascicularis
  misc_feature (1)...(761): n = A,T,C or G
aggatacagtatcgaactactgcactgagacctggaacccccnntctcacggtnnntcagaatcatcccnnnnntccacgtcctattccagccccgcccaccctgtgtccacagactcgttggccccatttacggggacaccagggtattttagcagccagccacattctggaaacagcactggcagcaatcttccaaggaggagctgcccttctagtgctgctagccctaccctgcagggaccctcagactcgccaacnnnnnnnnnnnnnnnnnnnnncagcacaggaactctgagttccacctcctttcctcagaactctaggtnnnnnnnnnnnnnnnnnnnnnnnnntatcagtctgcccagtgctgggcagtnnnnnnnnnnnnnnnnnnnnnnnnnnnnnnnngtttccaattcacagcactacccacaccgtgggagtgggggtgnnnnnnnnnnnnnnntccagccactgcaagggtcaggagtcaagactcagacaggactttcctagggcttctggatttgggcaaacagaactgaatgagcccatagctgcttccttccagctgcctcttgaacctaggccgagcatattgctggggaagggggggtacaaggtgccagaggattgggtctggtggacaannnnnnnnnnnnnnnnnnnnnnntggcctctggccttggagaaagatgtaaatcttgtctgaagcagagactatnnnnnnnnnnnnnnnnnnngtcaagggtacattgt

SEQ ID NO: 3142 - DNA, 396 bp, Macaca Fascicularis
ggcttgatacctttctcagcttctccctcccgcagctccagtgcccgagcttcggctctcccagttccccaacccaccccttcccctccccgacaatccccgctagagcccagtggggaacccccccgatcctcgaccccaccctaagcccccagaagctgccttctcctccccagtcccttagcttggggtccagccagcccggtggacccaggcgcctgagcaggagggtaacccaggccacccggccccttcggccctctcggccccaccccctgcagccggagccgcgccccctctaccacagagccgggagacgaggacagaggagactgagcaaaggggggtgggctccaggcgacccctagcccaattctgcccctctatcccaagggg

SEQ ID NO: 3143 - DNA, 754 bp, Macaca Fascicularis
  misc_feature (1)...(754): n = A,T,C or G
aactaatttgtaaagatgattttttnnntgtaatatttccactcatgagtgccagttaaaatgaccagaggaagaaaactacgaagatgatgcctgctcctatctcacccctggctaattcagctagttccaaaagcatgcttgggatttctctgccctactttgcctgtttagccatagcccaatgtatgttctagtttcattgcaatctttttaacatagagagaaatcactgtaatcatcctagtcgatttactgagttccctttcactcaaatatttacatctagataaagtatttcaattattttcttttaaagtaaaggaaggcctgtatgaatcttagataacagtctaagaattctgctaatctctattcatatgtttcttcccaattatgtctttaaggcctaagaccagacactctactaccctatgcctgcctttggagtttgagcggggatgggacagggaggagggaggtaggggttagggaagttccccaaggactgccaggaggaggaatgggtgctgggcagacgaaaacaccagcatcctccctagattctcgctgggcaggaagccccaccttccccctttcctcttcccatcttcctcattcccaaaataatctccctccataacctgagnnnnnnnnnnnnnnnnnnnnnnnnctgatactctgatttatatactttaaaacaaaggtgtgaataatacacaagtcccctagggatcttgtaagaaaagaagag

SEQ ID NO: 3144 - DNA, 726 bp, Macaca Fascicularis
  misc_feature (1)...(726): n = A,T,C or G
gaatcacattcatccttgctctgaaggaaagcgttnnnnnnnnnnnnaagaaaggcaaacannnnnnnnnnnnnnnnnnnnnnnccggtcattttcaaagaaaaatgactgcaaccatacctgtagaatgtttctgtgcaaacgcactaattttctatcacctgcatgctgtatataatacatttgcctgtatactaggaagaaaacccaggctgttttccccgagtacaatgccgcttggatggctgggagcgtaagccttccatgcatttgtatagtgtacatatttgtatatacnnnnnnnnnnnnnnnnnnnnnncacagattttgttatatttgcttgtttctgtttcctaccaaactggcccacaatggggattcttttgtatagaaaaaatatgcttgtaattttttcctggtcattctctttcaatagcttatgaaagaattagatctgagtttacaaagaaactataagaaccannnnnnnnnnnnnnnnnnnnnnncgtccaattgctggatctagggaggaaccaacgtcctaattcagagttttccttttacaggcatgctttacccccgtgggaaaactgcacactcatccatgtagaattattctctttgtattttatctaatagtgcctgaaaatttttttaatgtcttcttagaggaagaattcataattgtcaaaatttgaaacattagcttaattttgtttttatgac

SEQ ID NO: 3145 - DNA, 230 bp, Macaca Fascicularis
acgttgttccgtatggacttggaagccctaggtccaaacgagccttggagaatttacttcccacaaaggcaacagaccgtgagaatagatgccaatgtgctagccaaaaagacaagaagtgctggaatttttgccaagcaggaaaagaactcagggccaaagaccttatggagaaaggttggaataaccataagaaaggaaaagactgttccaagcttgggaaaaagtgt

SEQ ID NO: 3146 - DNA, 735 bp, Macaca Fascicularis
  misc_feature (1)...(735): n = A,T,C or G
gaataaataatggaaaaagatccannnntgtggtatcatgctagtgctgacaggagttggtaatgcacatcctgtcactgctgctatagcaaatggggagctgtttgggaccctgatagagtagggttggaacagatggtaagcttctgtcagggttttaacattttcttgatgaaacaataaaaagaggtgagctttttcatctttttttttaagttttaaataaactcagatataatttgaatactgaagaaattaagagactttgaacaaaatcacctcttcccaaatctaaaatctgataggggaggtggagattccagggatgggtgaaagaagagatggaacttagtaggcagactttaaaaaaaaaaaaaaaggtcatcatcgtaatctcaattttgtggctatgactcctaatcatgcttcctaagaagcaaaggaggacaaatattcatgtgctagatagcactctggtgtgaacttgaactgggattgaccttaaattttatattcctcaaataaaagagaggcaacaacaaggcacctcattatcagatgcttggtttaaacattttgggactaaaatacttggtgatgaaacgacatacacctttaaacttcttatggagatagtttaatgtaaaaccaactatagaaaaccctcaacttaaggatacagcttggaaattggaactgctattgccttttattaaaannnntatggtgtgatgt

SEQ ID NO: 3147 - DNA, 709 bp, Macaca Fascicularis
gaaacagcgggaggaggctgcccggaagaaggaagaggaaaggaaagcaaaagatgatgccacattgtcaggaaaacgaatgcagtcgctctccctgaataagtaaccgcgacgcgtgggaggagatgccggggacctgggccgcgctgccaggacctctgctgtgtcttgcccaccctgtgccctggcgccgctgcaacagcccctcacggccaggagccccccacggcctggggcctccttttcatcttggcacagaaattgtttggggaatgtgggggggggctgggggaggggcagctgctatctttgagacagaaagatgcaggacagcatttcatatgtaaccatttgaatgttttcgctgtttttagaattcagagcccttgctggggggtgcctgggagatggggtaagaagagctttcatttgtctggtagatagcatgtaaggggatggttgtcccaggaggcagctgccgacaggtttgctatacccagccccggactgtgttgcctgggtgctcattcagagaggggctgtcatccgggagcctgtgcccctgggtcttcgagggtcatggcttgtccctggtcagtcctgtctggtcgaggcctcgcctgtctgcccttccctgcccggttcctacccacccggccagggccagtgcccatttttaaccctacccattgatcatttcaagaaacct

SEQ ID NO: 3148 - DNA, 228 bp, Macaca Fascicularis
cgggcgcggtggctcatgcaagtaatacaaaaaaaaaaaacggttattcgacaaagttagttttaagaaccgttatttgacaaagacgttattcctattaccaatagtgtggaatgataattacagaaacatatgtgggatccgttttataacttcaaatttaagttcatttgtactttggagcagaaaatggaagaaatctaaatcaagagttacttttttatcttc

SEQ ID NO: 3149 - DNA, 890 bp, Macaca Fascicularis
  misc_feature (1)...(890): n = A,T,C or G
ggtgctaaagtctgggtgggtggagggaggcaggtggctggataggagggtggccagattcacagatgagaacacagggcatttggttaannncagacatgcaatagtggggaggtcattttactaagaagttatttgttgtttatctgaaatcacatnnnnnnnnnnnnnnnntttcttccgggatgcagtgggggctgagtggcaggacaggacttggaccctggaggggtctgagcagcgagaggctctggttnnnnnnnnnnnnnnnnnnngggnnnnnnacacagggcagcctnntcacaggtgggccgggctgccaagggctccaaggcccatcatcttgatcctcaagggactgtggccaaggcctctctgagctctggcctgagacagtgaaggcagcccagcggcccctgcagggtgggggtctgtggcagagctgcgagcccctccctgggaagccctgggtgcaggtgcagagggagaatttggcggcatcagacggagggctgggctcctggggttgtcctggcggctcttgtggggcagctgggggcccacggccaaggggagtcagagacgagttgggaaggtcggtgaggggccgaaggtggcagaggaagggggctgcctggctgggtgccaggtgggggtccccgggtgggggtcctgccaaggcagtgtgtgcagggtcctcaagactgtgggagatcctggcnnnnnnnnnnnnnnnacgtgtacgcggcaccaataaaattctttcttttctttttctttcttcttttcctcgttctctctctttccttctcttctcttctctctctcttttctgttnntgttctttctcgtccggtggtgtcagcatctcccgtgctgccctatggcgc

SEQ ID NO: 3150 - DNA, 714 bp, Macaca Fascicularis
  misc_feature (1)...(714): n = A,T,C or G
aggacttagacatttcagtgtacttgatntttaatttaactctttttcacagccatgctaagggtaaaaatgaataatttctgtttgtcttcctttttgagtatttctggataagggattcaaaaaactaaaactgtttttgtttgatgtaatataaaatatggaattgatctttccagggtcagagatgattaatgtttttgctatatacttttatacattattttcttatcaaactagttaacaagnnnnnnnnnnnnnnnnnnnnnnnnnnnnnnnnnnnngcataccttgtgtatatgtaaagataagtatttaannnnnnnnnnnnnnnnnnnnnnnnnnnngaaaaacaagtggaaactacagannnnnnnnnnnnnnnnnnnnnnnnnnnnnnnnnnnnnnnnttaccnnnnnnnnnnnnnnnnnntatctactcaagaaaacttcccaatagagtacaacaggatgagactctgaaatcagttttaatattccctgctagatattgattgttatatgaagtattaagtgtaagcttttaatggataattagtataactgtggatggcatctgattttgtttttaattctgtggattgtgtttaagcaattcaatagtatgttcctgattttgagatgctaagtggtattgcannnnnnnnnnnnnnnnnngtgtgtacaacagtcccatgaagtttatagagcata

SEQ ID NO: 3151 - DNA, 737 bp, Macaca Fascicularis
  misc_feature (1)...(737): n = A,T,C or G
aattttgaacacataaattgcnnncctcccttcattactcataacagatcccatcttgacggcaactggttgtgattctgcctgccaccaggttgtttcttttttnnnnnnnnnnnnnnnnnnnnnnnnnnnnnnnnnnnnnnnnnnnnnnnnnagaaatttgtcggtatttgatacctagaacagttagacttctccacagccgatttttgttggagtagggatttgatgttttgcttgttttaagtagataattgctaatagtaatgtctaatcttgatgactgtgactgaaaatagaattatgattttcatagtaattttatcttagtctatattaaccatttctttttgccttgtaagctgaattttttgtttaattctaaaaaatcgtgtgactgnnnnnnnnnnnnnnnnnnnntaaatttattaatgaaaactaatgtgaacactgacattttaacatttaataggccgttttaaactgggtagttggcacatattgttgatcgctctgcttttaatatgaaaagtgtatacattcagttagaacacgctcaaccaactttgtgctcagaatgatatacgtatcaatgaaatatttgcctgtgaaataagttcccttaattccatcggattgtaggctttttaggacaaaaattcagataaaaaaagagtaaggtttctcttggctgtataattctctaacaactgcatttgttttccgaatttacaatg

SEQ ID NO: 3152 - DNA, 2706 bp, Macaca Fascicularis
agtgcaaagtgcatctcgaaagccccctgtccggagaccccacgactggcacttcgggccccgtatgacctgggacctcgccgtcccgagacctcctgggtccttccgtagctggaagcctccggcccggagcgcggcagccccctgctccgagccctggaccgggactgcccccccacccgagccgggacttcctccctgcctccctgcacccctgccccaaggctgcccggcggccgggatcgccacctcctgcctgctcgtctgttcggatgctcgccgggctggggccgtgaggcaccgaggaggttcaggaacgccagggtccggccctgcctggggtatttcttctatggagaagttggtgagtgtagaggaggctgaaaggaggaagagaagcagcagctgaggagacaggtttgagctggctgaagaggacgcgaaagcaggaacgggtctgcccacctatcagagaagcagaaggcacagtgcctctgaccagcatcgtctataaaggtgaagaaggcttttttgctctgcaagctggacatattttgaagcccctccccacgatgctgtatgtgcacaatggttattaggcaatccatacatcaggagaaggggcactcttccataaggctgttccccgtgacctaatgaatcctttgtaaaaagtggactcagctaggatgttacaccatcattgtcgaaggaaccctgaactccaggaagagttgcagattcaggctgcggtggctgctggagatgtccacacagtgcgaaagatgttagaacaaggctattctccaaatggccgagatgctaatggctggactctgcttcatttctctgcagcaagaggaaaggaaagatgtgttcgggtttttctagaacacggagctgatcccacagttaaagacttaatcggaggcttcacggctcttcattatgcagccatgcatggccgggcccgtattgcacgcttgatgttagaatctgaatacaggagcgacatcattaatgcaaaaagcaatgacggctggactcccctccatgtggctgcccactacggcagggactcatttgtccggcttctcctggagttcaaggctgaggttgacccactcagtgataaaggtaccacaccgcttcagctcgccattatccgagagaggtcaagctgtgtgaaaatcctcctggaccacaatgccaacatcgacattcagaatggtttcctgttgcgatacgccgtgatcaaaagcaatcactcttattgccgaatgttccttcagagaggggcagacacagacttgggtcgcttagaagacggacagactcctttacacttatctgcccttagggatgatgtgctctgtgcacggatgttatataattatggagcagacacgaacacacggaactatgaaggacagaccccattggctgtttcaataagtatttctggaagtagtcgaccatgtttggatttcttacaagaagtcacaagacagcccagaaacttgcaggacctgtgccgaattaaaattcgacaatgtataggccttcaaaacctaaagctacttgatgaactaccaattgccaaggtcatgaaagactacttaaaacacaaatttgatgatatctgatataccagaactgtgagcaggattaggagttatattccagatacttaaaaggctttttgccttgcacaaagtatatcctatgcaatttctgatttgctgtgaaatcagaaagcaggtatacacttttgggttttctgtttgtttggttggttttcattgtagggaagggatttttttatatatatataaaaacacacaccacatgcttgaaggtcttaatttggtttcttggtccaagtttaagaggtccaagctttgtatacaatactgcatttagaaaaattgtcttttcttaaatgacacaagcaggtttggagtggagaatttaccctttccaaatttatggtttccttggtaagcacgatattctaaaccagcagagcacttgttaatgtttggaggcacagtttcacccaggggggccctgggttcttctggaaaatgccctaagaaatgtttaaagtaatgctgtcacctcattcatttttaatgagtataaattggccgtttcaaactgttctttttcctaattgatgtagctttcggatgacataaattcagtatctctgcttttcttttggtgtgctcttgtttttaacttttttttttttttaacaactgtagtacactaccctgagacattgtgtctcgatttctatctctagttagagttgtgcttttaaaaaaattaacgggaaagaaactaactttaattgaagccagtgtattctgtttttaaaactgtgcctgcagtgcaatactctttctggtgtattttatccattatttcacttgctggtcatcatttcacagccagctttgacatgcccgtgagaacaggagccgccactttaattttcatggcagaaccatagtatgtcagttgcaatttcccattttaagctatgtcttttacttcactttaagcagaaaattttgtatcctggtggtagagtcttccccttaaaaattgttaaatcatttggctttaatggttcaataatttggaatggcttcatggtgtttctttttctcccagtttaaaaaaaaaaaaaaaaaa

SEQ ID NO: 3153 - DNA, 752 bp, Macaca Fascicularis
  misc_feature (1)...(752): n = A,T,C or G
gatatgctgatgaccagcgaggagcgncggaagcagctgagggaccagtactgctttgaatgtgactgtttccgttgccaaannnaggacaaggatgctgatatgctaactggtgatgagcaagtatggaaggaagttcaagaatccctgaaaaaaattgaagannnnnnnnnnnnnnnnnnnnnnnnnnnnnnnnnnnncatgtgccaggcnnnnnnnnnnnnnnnttctgagcggcttcccgatatcaacatctaccagctgaaggtgctcgactnnnnnnnnnnnnnnnnnnnnnncctcggcctgttggaggaagccttgttctannnnnnnnnnnnnnnggagccgtacaggatttttttcccagnnnnnnnnnnnnnnnnnngggttcaannnnnnnnnnnnnnnnnnnnnnnnnnnnnnnnnnnnnnnnntccccaagcaatgaagaatctcagactggctttnnnnnnnnnnnnnnnnnnnnnnnnnnnnnnnnnnnnnnnnnnnnnnnatttgattctacttttagaagaatgcgacgccnnnnnnnnnnnnnnnnnnnggaacccagtcagagggaaggatggcgtgtgtcttcgttgaatgccntattgaggtcacacactctatactttgtttgctgtgtaaacctctcctattggaaattctcttctgtgtttgtgtaggtaaataaaggcagacattgtttgcaaaccacaagaatcattagttgtagtgaagcacga

SEQ ID NO: 3154 - DNA, 150 bp, Macaca Fascicularis
  misc_feature (1)...(150): n = A,T,C or G
ccactcccccgatcctctctgtccatcttcaacaggcctttgcttcacagggtcagtggaagccccagggggacaggaaacgccctnnnnnnnnnnnnnnnnnnnnnnnnnnnnnnnnnnnnnnnnnnnnnnnnnnnnccacaaggcagg

SEQ ID NO: 3155 - DNA, 689 bp, Macaca Fascicularis
  misc_feature (1)...(689): n = A,T,C or G
gagcacagggtgctttactcnntctgtgctgggaggcttacccaactgaaaggagatgcagggtaggggaggccaatgcctagtgtgcctgctgcttacaggggtggagtcacaggtcaccattatccattaaaattttacttttttgagcccctaccatatgctcaacatggtattaagtcctcaagaatataaaaagaaaatacaacaggaactagtagacattaactgtttgttctggactttaacaaaaatccagagggtcttggagtacaaggggaaagacatttaggtgtgtatagactgggtggggcgatatgttccatggtttgacattcagttcagcaacgttgatgagagaaatcaactagcccccttatagagaagaggaaactgaggttttaaaagtggtcctggccaggcacggtggctcacgtctgtaatcccagcactttgggaggccgaggtgggtgaatcatggggtcaagagttcaagnnnnnnnnnnnnnnnntggtgaaaccccatctctactaaaaatacaaaaattagccaagcatgaaggtgcgtgcccgtaatcccagctacttaggaggctgaggcaagagaatcacttgaacctggaaggaagaggttgcagtgagacgagatgatgccactgcactccatcctgggtgacagagcaagactc

SEQ ID NO: 3156 - DNA, 743 bp, Macaca Fascicularis
tacacatgcacacacacgcacacacacacatgcatacacacagaatcttagcatattttgctgtagtggcatgttaccatgtctacagtcccaaccagaatatcagtcagctttcagagggtaagacttctgtcttcaccattatactcacagggcttagcacttaataggtgctgagtatttgtggaatgtatgaataatgactttatagaaagaaaactcactattaaaggttagttttactcagaattaatcattaatcttggagatgatctcttgtgaaatatgagtgtgtttctaaggccatacatttaaaaatgtttgcattttaacccgtcttgagaatgatgtattgaatttgaaaatcaaaactaccagtggatgtgtggaactttacagaaatcacctatttgtgtttttctccttacatttaaggaaacataagccattttgtttgcaatatgtatgaatcatctcaaaaccattatggtatgagcctctttgctgcgtatttttctataagaacttttttttttcactttttattatggatgctttcaggaatatataaaagtagagaatatagtgcaataatccccccatgtatctatcactcacctacaacaaaattatagctatgctcatttttaccaattattgtgaaacaaatatcaaaatgtcatttgatcatatttcagtatgtatctctaaaaggtaaaaattatttctaaaaatcataaata

SEQ ID NO: 3157 - DNA, 2292 bp, Macaca Fascicularis
gtgcacctcaggagcccaggcatggtgtgtagggggagcgtagcctacattggatccagaccaaggccctgctcctgtgccgggctcctctgcacgtggactgaatctagatttaggtgttggttaaagtaggtagacaagtgggggagagagagttaaacagatattaactattacgtggattaagtgatcacagttgtatttgcaaaaagctgttgaagcgtaagttcatagaatgccaaacaagtgtgaattgtacttgccgagcctgtgttctgggtcgggtactgggctgggtgtccctggaaagaactgaagaattttgaaacgtgttttgaaatgcagaagtttcgtcatgcttgtccatacttacagtttcttttctgattccgagatgcttgtgagagcttcagccatctagggacgtgtatgctgctgcttgaccacggagtagcagtatggtttgaagtggtgaacatggatttttctcggcttcacatgtacagtcctccccagtgtgtgccggagaacacgggctacacgtatgcgctcagttccagttattcttcagatgccctggattttgagaccgagcacaaattggaccccgtatttgattctccacggatgtcccgccgtagtttgcgcctggccacgacagcatgtaccctgggggatggtgaggctgtgggtgccgacggcggtgccagcagtgctgtctccctcaagaaccgagcggccagaacagcgaaacagcgcagaagcacaaacaaatcagcttttagtatcaaccacgtgtcaaggcaggtcacgtcctttggcgtcagccacagcggcactgacagcctgcaggatgctgtgactcgacagcctcctgtactggatgagtcttggattcgtgaacagaccacagtggaccacttctggggtcttgacgatgatggtgatcttaaaggtggaaataaagctgccattcagggaaacggggacttgggagccgccgctgccaccgcgcacaacggcttctcctgcagcaactgcagcatgctctccgagcgcaaggacgtgctcacggcgcaccccgcggcccccgggcccgtgtcgagagtttattctagggacaggaatcaaaaacggaaggcagcctccggagtgttctggtggctagggattggatggtaccagtttgttactttgatttcttggctgaatgtgtttcttcttaccaggtgccttcgaaacatctgcaagcttttagtcttgctcgtcccactcctccttttacttgcaggtctctccttacggggccagggcgatttcttttcgttcctgcctgtgttgaactgggcaagcacgcatagaacacagcgggtggatgacccccaggatgtatttaaacccgcgacttctcgcctgaaccagcctctgcagggtgacaacgaggcttttccatggcattggatgagtggcatggagcagcaggtgacctccctgtctggacagtgccaccaccatggcgagaatctccgagagctgaccactttgcttcagaagctgcaggctcgggtggaccagatggacaatggcgctgccgggccatcaacatcggtcagagatgctgtgggacagcccctgaaggagactgactttatggcttttcaccaagaacatgaagtgcgcatctcacacttggaagatattctgggaaaactgagagaaaaatctgaggccatccagaaggaactagaacagaccaagcaaaaaacagtcagtgcggttggtgagcagctcctgcccacggttgagcacctccagctggagctggatcagctaaagtcagagctgtccagctggcgacacatgaagactggctgtgagacagtggatgctctacaagaaagagtggatgtgcaaggacttcgccgtctatggattagaaaatgagtatcaggaagaagggcagcttctgggacagttcacgtatgatcaggacggggagtcgctccagatgttccaggccctggtaagaaccgggacttgcactgccctggggtctcttgagtcccacagcctctcgtgacagcagggcccagccggcatcaacagactggaaagcagcgtgaggaccagcctttgaaaaacattaacctgcgtttcctggctctgcattaatgagcctttccgtggctaatagagttctcagttttacccgtgcttcatgccccgtgatacattacttacaaggatcatattaaagagttaacttccgaaaaaaaaaaaaaaaaaaaaaaa

SEQ ID NO: 3158 - DNA, 116 bp, Macaca Fascicularis
cactaacgccaacatgaatgcttttcctgtcagtgcttgtctgttcttgagaagccagactgatcttgagctccctagcactgtcctcaaagaccatctgcatgccctgctccctt

SEQ ID NO: 3159 - DNA, 799 bp, Macaca Fascicularis
  misc_feature (1)...(799): n = A,T,C or G
cccccaccagagtnnngatggggaaagcaagaaggacaaataagatcctcactttggcagtgcttcctctcctgtcaattccaggctccttccataaccacaagcnngaggctacagccttttatttatgttttccgtttggctgtgactgggtggggcggcagggtgctgcttctgattttacagaggcatctnnnnnnnnnnnnnnnnnnnnncaagaaggcctgccatgcggtggccagctgttcattggagcaagaaagaaagagatctcctatgatggaggggaaatggttttcctccaagcttgggtcagtgtattatcaactattcagacatctccatggtttctctatgaaactatggtttcattattccttcttactcgacctgcagagcctggttagacctagatttaaccctaagctaggatgctggggtatagaaagctaagaattttccctcaaggactcttgcttccttaagcccttctggcttggtttatggtctttactaaaagcataagcctaactttgtcactagtcctaaggagaaacctttaaccacaaagttttttttatcattgaagacgatattgaacaaccccctgttttgtggggattgagaaggggtgaatagaggcttgagacttccctttgtgtgataggacttggaggagaaatcccttnnnnnnnnnnnnaccctctgacctactccccacacccagttgatgtnnnnnnnnnataaaaagattgggatttcaaaaaaaaaaaaaaaaaaaaaaaaaaaaaaaaaaagg

SEQ ID NO: 3160 - DNA, 739 bp, Macaca Fascicularis
  misc_feature (1)...(739): n = A,T,C or G
gctgaacnnnnnnnnnnnnnnnnnnnnnnttcattgaaactgnnntggaggaaataggcttgcttccagagttgnnnnnnnnnnnnnnnnnnnnnnnnnnnnnnnnnnnnnnnnnnnnnnnntgcctccgcccgttgacnnnnnnnnnnnnnnnnnnnnnnnnnnnnncccattttacagatgggtaaactgaggcaccaaggtagtagttgcactaatggttacacagtgcagtggctcttaggagttgctcttctctgcctggccctggtgggaaggtggtggggaaaggggctcagggcaggaccatggcataagtgggaaacatctcaccaggagatgggaaagtctagaagggaagacactnnnnnnnnnnnnnnnnnnngtctttgggtnnnnnnnnnnnnnnnnnnnnnnnnnnnnnnnnntgtagaagaaaggccagtgctggcaaggaagcnnnnnnnnnnnnnnnnnnnnnnnnnnnnnnnnnnnntaatacttgtgagcagctggcgtcgtcttccagcnnnnnnnnnnnnnnnnnnnnnnnnnnnnnnnnnnnnnnnnnnncagggagctgaggccagttgggagcaggannnnnnnnnnnnncagcacaannnnnnnnnnnnngcgctgcccattcattttctccagctgctccccgacccggtgcagctgtagcaccaaacaatccacctcctcctccttgctcaaactgtctggctgggccagc

SEQ ID NO: 3161 - DNA, 616 bp, Macaca Fascicularis
  misc_feature (1)...(616): n = A,T,C or G
catgaattgattattgagaaaatgtagcagtttgcatattttaaaattaatcattttgcattttacatttaaatatgctaatatcactgtcatataattcccaaatttcatttgtagatattgagttaaggggtaatgtcaggacctgatttnnnnnnnnnnnnnnnnnnnnnggctaaataaaaaccaaattagtcctacaatcaggtattatgtttttcaaccaagttgagtgaattgatagtggacttgggaaatattccccattagaatctggatgagtggcacagaattgaaatctctttgtttcccaccatttccccttaagtgctctgctcctttgtaaacagttaaagatttgaaagagaatctgttattcgcgagggattaggaagaaaggatttaatcccttcaatttggggcttaatcctgttaaagaaaatgtaagtgaaaatggaaaactggagagaatgattgctttttgtacagttaaataaggtcacaatattcttacgtactttgttttacaactgtgttttcattttttcaaatgtctggtcatttaccaaagtatttactatttactgtgtacatagaaagttttattatgtgtagt

SEQ ID NO: 3162 - DNA, 709 bp, Macaca Fascicularis
  misc_feature (1)...(709): n = A,T,C or G
gcatcacagtgggcatnnnnnnnnnnnnnnnnnnnnaagnnntagaaaacagtgggctgtcttcaattnnnnnnnnnnnncatnnnaatgactcnnnnnnnnnnnnnnnnnnnnnnnnnnnnnnnnnnnnnnnnnnnnnttccagcgtttcaaatgagcagacggaccatacagacgcagagcaagaaaaagaacaggaaagcccggagaaactggataaaaaagaaaaaaaaatgataaagaagaaatcaccatttctacctggctccatccgcgaggagaacggcgtgcgctggcacgtgtgtccctactgcgccaaggagttccgcaagcccagcgacctggtgcgccacatccgcatccacacccaagagaagccnnnnnnnnnnnnnnnnnnnnnnnnnnnnnnnnnnnnnnnnnnnnnnnnnnnnnnnnnnnnnnnnnnnnnnnnnnnnnnnnnnnnnnnnaagtgnnnnnnnnnnnnnnnnnnnnnnnnnncctcgggcagcctcaaggagttagaccttttgcttgtcctcactgtgacaaaaaatttcgaacctcgggccatnnnnnnnnnnnnnnnnnnnnnnnctttaaacatacggaattaaggaaaatgaggcannnnnnnnnnnnnnnaaaggttcgtgttggcaagacgaacgttccagtccctgacattcctttgcaggaaccaattctcata

SEQ ID NO: 3163 - DNA, 209 bp, Macaca Fascicularis
  misc_feature (1)...(209): n = A,T,C or G
ttttaaatatttttcannnaactgtagaggaaccccttaatggtatgtggttatttcactcttaatcccttaccggatcataatttgaactggcccgcgaaactgtataatgccccgtctatgccttaggaacaatatacagtttttttcctcttttcctcttgccttggcatctctactcttgattattcgtcaagaattattggctg

SEQ ID NO: 3164 - DNA, 698 bp, Macaca Fascicularis
  misc_feature (1)...(698): n = A,T,C or G
cttcagagatnnnnnataggngnaaaagaacaaaaccccnttnntgaaaaaagaaagcagagagaaatgcagcaatgctgttgatattagtgaggatctgaaggagaaaannnnnnnnnnnnnnnnnnngtcagggtggacgcctgcacacatnnnnnnnnnnnnnnnnnnnnnnnnnnnnnnngttaccagagccctggaaaggnnnnnnnnnnnnnnnnnnnnngtgtgtaaatcagtcaagcctgccattatcacctcacacctgattcagttaagcctcagcannnnnnnccctgcctgtcaggtcccccagctcagtgagagaatcgcccccgtcattggcttaaaatgtgttctagccttgggcttcaaaaagaacaccactgactttgtggacgaggtaagnnnnnnnnnnnnnnnnnnnnnnnnnnnnnnnnnnnnnnnnnnnnnnnnnnnnnnnnnngattctggggaaagtttagagactgaacctctggaaagccaagacaaagagcttctggacacttcatttgaagatctgtcaaaacctaannnnnnnnnnnnnnnnnnnnnnnnnnnnnnnnnnnnnnnnnnnnnnnttaaaatcaagaaactgattccaaaccctaataagaaaaggaaaccacccaaaagtaaaaaagctactccaaagtaatcttgcataaacttgccat

SEQ ID NO: 3165 - DNA, 695 bp, Macaca Fascicularis
  misc_feature (1)...(695): n = A,T,C or G
caagnnnaaggctccccatccagtctagacagaggggcgctcagagcagactttgccgtagcccacatccagtgagcacaataggaattaattgggcactccactcccctctctctctggcccagtcctgaactagatgagcnnnnnnnnnnnnnnnccattttgaaacctctttccttatgactttgttactcaagtccagagttctctgtgcactcctgctagataaggagtgcgggctcccccagcactggcagcacgctgggcgcctccctacgcaggacaccatgcagttccgggggaagctgactcaaatcaaccttgaaatctcatgaaaacaaaatgacttgcctttttatttgatagtgtaatatcattcattttataaattttttagggtttttcttgtaatattgtacagttttgcatggcctggtgtgatcattttttggttagaatataatgctgacaaatgtgtatggagggggaaagatactgctttagcctatccttattttattttgtttggttttatgccctcaatgttttagggaactttctaagagatcctctgctaccaaacaatgatgtggattcttttgcacagaaatatttaaggtgggatagtaaaaaatgtcacaaaagactcctcaccaatattttatgttgatatcacttaatattaaccagacttg

SEQ ID NO: 3166 - DNA, 684 bp, Macaca Fascicularis
  misc_feature (1)...(684): n = A,T,C or G
gctctattgannnagtacactgctccgggannnnncccccgccaccctccacgcatagggtccttggtctggaccctgccccccaaacgtagggccttgctcccctaccttgctctgagcacggagagtcctgaccccaccagcaggctcgcccccagagaggcccaagtggtctcacagagccttgtcgtctaccgtcaccttccagactcccgcccctaacacccagtggccnnnnnnnnnnnnnnnnnnnnnnnnnnnnnnnnnnnnnnnnnnnnnnnnngtcccagaaggccctgctggcgtgaagccggccccttacattttgcgaagtnnnnnnnnnnnnttgtttttctctccctcgtgggggcaacgaccccacccctggcggtaggggtggggtgggtgactctcgctagatccctccaaagnnnnnnnnnnnnnnnnnnnnnnnnnnnnncgagctcgttagctgcgttcggggaagcttggggcgtcggggagcgctcgaatcacggcagcccccgccctctcctaggcctggcccggcagagcaccccagagtagaccccgcagcgactggggtcttctccccactcctccctccttnnnnnnnnnnnnnnnnnnnnnnnnnnnncggggcctgtttgagacgaacagagctctcccttggtaagacttatt

SEQ ID NO: 3167 - DNA, 731 bp, Macaca Fascicularis
  misc_feature (1)...(731): n = A,T,C or G
ggaannnnnngactgnatcagnnnaagcgnnntgggagggagaaaccaagnnnnnnnntttggatgtgtcaagatagagatgnnnnnnnnnnnnnnnnnnnnnnnnnnnnnnnnnnnnnnnnnnnnnnnnnnnnnnnnnnntgggggaaagagaggctcaaannnnnnnnnnnnnnnnnnnnnnnnnnnnnnnnnacatttaaagccacaggactgggtgatgtggcctagcaggtgggtggggacagagaaatgaccctggccagagccttggggacatctacatcttgaggagaaggggatgtagcaaagcaagcttaggagtgatctcgaggtgnnnnnnnnccaggagggtcacagagggcnnnnnnnnnnnnnnntttcaagaagggaagaagacagccggctgtgccaagggctgctgagaatcggagaaggatctagaaagcggggtgaccatgaggtttgatgacatggatggggttggtgatcttgacaagatgtcagttcagtgcagtggtggggtnnnnnnnnnnnnnnnagtggaggggagagagaatttggggggaagacagaaggaacgggaannnnnnnnnnnnnnnnnttgtgtgtgtnnnnnnnnnnnnnaaaggccaggtgcgatggctcannnnnnnnnnnnnnnnnctttgggaggccgaggtgggtggatcacttgaggtcaggagttcgaggtcaatatggtgaaaccc

SEQ ID NO: 3168 - DNA, 674 bp, Macaca Fascicularis
  misc_feature (1)...(674): n = A,T,C or G
gccccaaggctgnncagaggggccccattcctggccccagccccgacctctgccccagacacaccccccagtcgagccctgcagccaaacaagagccttcacaaccagccacacacagcctgcctcagctgctcgcacagatgacttcagggctggaaaagtcacatagacacacaaaatgtcacaatcctgtccctcactcaacataaaccccaaaacacagagagcctgcctcagtacactcaaacaacctcaaagctgcatcgtcacacaatcacacacaagcacagccctgacaacccacatcccccaaggcgcacacccacagccagcctcaggacccataggggcactgtcacacgggtgtgcccagaggcctacacagaagcagcgtcggtaccctcaggatctgaggtcccaacacatgctcactcacacacacggcctgttagaattcacctgcgttacctcacgcatgtgcacacgcacagccccacaatgggtctcttgagtcccatgcagacacacacagccacacacactgacttgccaaaaatatcccgttgtctcccctgccactcacctcactcccattctctgagccctgatccatgcctcagcttagactgcagaggaactactcatttatttgggattcaaggcccccaacccac

SEQ ID NO: 3169 - DNA, 715 bp, Macaca Fascicularis
  misc_feature (1)...(715): n = A,T,C or G
atatcagattcaatgtaaaataaccaagannnnnncaaaccaacatgctactagtgccttatccttcaatgcttcttaaacacagagaagtatgaggaaaaaggaacatggcacttcttaaaaaannnnnnnnnnnnnnnnnnnnnnnnnnnnnnnnnnnnnnnnnnnnnnnntgtggattccctacaggaatgtggagtgcgggtggatccctacgttgacccagcctcccctccaggtcagtcacccccccaccacggggttcacacctctccaggccctgtcacttcatcaaagaaaggtgacgtctctgagctctcttcgcagggagcacccaaacgggagctagagagacacagacacacccacaactacttgaaaatcctgaaatgcgatacatatttaaggacttcattattagttttttaaaactgtaagaacaaagtgnnnnnnnnnnnnnnntctatgccacaacaacaccgtgtacatctgtcttttgctgtttgttcctnnnnnnnnnnnnnnnnnnnngctggcggacggcagaactagagcctctggtactcctgggagacccttggtaaaagcgtgagcaccacgatcacgtctcaggacgctgcacacgttagggtcgcccacagaccgccattcccnnnnnnnnnnnnnnnnnnnnnnnnnnnnnnnnnnnnnnnnnnnnnnaaccttctaagctatg

SEQ ID NO: 3170 - DNA, 1985 bp, Macaca Fascicularis
tccaaaagctcactggctctctattgtccactgactttaaacctaaaccttggatttggcattcaaggcctttcatgatccagcaccaacccacccaatgccaccacttaccagctgcagcatcttagcctgtcccttaaattatctctccacctgcatttcctcacctgtaacatggggataattacagtacctactatcatgggatgcattttccaaatacgtcagctacaatatgtatcccatcccacaaggtcttcttacaagagcattgacactcttcccaggggatagtggggacagtggtcccttgccctgaacttgggaggacttttgtcactgcctggttagatgtagcaccagtgacgctgcaagactcccaaggttcggtcataagaatgccacgtacttcatcgggttctcttgggatgcccactgtgggaatccggtgaccatgctgtgaggaggccaagcagccatgtggagaggccacactaggcgtctggctcacagcaccagcttgtcatgtgagtcacacgcatgagccatcctgaatgtcgtctgcccagcaatgccttgcagagcgtagttaagctgaccttgccaagctccagagcaaagcaaattgttattgatatcttgagccactaagtgttggggcggctcgttacgcagcaagagataacagaaacacccacccccacggggttgtggtggggtaaagaagtatattagtttgctaggactgtcataacaaagagcaacagactgtgtgtctgaacagaaatttattttctcgctattctgaaggctggagggctgaggtcaaggtgccagcaggggttggttccttctgaggtctctcctcctggcttgtggacggccgtcttctccttgtgcttttgcatgttcttctctctgttgatgtgtgtgtcctaatctcttcttataaagactccagttatactggattagggtccacgctagtgacttcatgtcaacgttatcacctctttaaagaccctatctccagatgcgatcacactctaaggtactgggggttaggacatcaacgtatgcatcttgcggggacacaaggcagtctgttacaataaggacatgcatatgaaatgcttagagcggtacccagcacggagtaagcactcaataaacgtcagctaggattattattctaatgaccaccactgccatctgcctggcctgagttacaccatttcgctccagacctgaggggaatactccggatccccaggcctccttttagactgtctcctcggcttgcagtgtctaaacctgttccccatctacccaaatctctcctgcattgggaagcccagctcctttacaaccaggctgccaagtccccttggttcccatcccttgcttctggggctccgtttagtgagtattctggcctgctgtatacgagaagctttgactttttttgacccaagactttgttttgtttttcaatatggaaataggagattttttctcattataaaaacaattcatgttcagtttataaaacctagacagtacaggaggtttgtaaagaaagtggaaatcacctagatttaatgacttttaccattttggttgctatctttctggaatgtttcctatgtgtgcatgtagatatatgtttttcttgattctaggacaacactgattgtgagatgcatcattgatttaattacacggctcttttggagaaaagaactactgcattaaacatatctattaattgaaatgcacatcctgattttagaaatgttcaaatgttaaaaaatgtgcatcttagaatcaggaaaatgtatgcacgtattatctatgtttttcaaaatggatatctctacgaatactgttatatgccctatttttaaaaaatctgaaccacaaagtgtagccatctttccacatcaataaaggaatgctcttgccaccaaaaaaaaaaaaaaaaa

SEQ ID NO: 3171 - DNA, 623 bp, Macaca Fascicularis
  misc_feature (1)...(623): n = A,T,C or G
caccccagcattccggcnnnncccgcgcgnnttngagacgcccctcccgagcgtnnctggcctnctaaactccatacagcctttacagccgtcccgcgttcaagacttgagcggagcccgatattctccccgaccttagcattctggaatctgccccaatcgggtccagagacaccaccacaccactaaccatccccaactccatggggttcgagactccatcttggtagttctatgcctccccccagaccccgcccctggggaaatagcctcacggggttggctgttccagactcaggttccagaacaaccctcagcctccgaggcccgccccccaccgcctccactccagttctagatgagtgggaggcatgcccccctcctccagtacgtcccgctgctgtgctctggggatttctgggatatatggaggattcttcccccagcggctcccaatcagcttttgttctagacttccccatcccgaagccatcactgctccccgcagcctgcctgccgtgcatggctcctgtctggctcggacccaccccaaccctccccagtgcctgccactctctgggactctcctcctcccctcctcttcccttagcctctcccacccc

SEQ ID NO: 3172 - DNA, 1060 bp, Macaca Fascicularis
  misc_feature (1)...(1060): n = A,T,C or G
agctatcagggtatggccctgccgtccccctcagggcagcctcggccggaccggccctctctgcccagcacgttgcaagcacttggccaggccggccctccaggctgctgctgcgtgggagcccgggggcccccaggcccatgcagactggggattctggtggggaggggggcttctaaggaaccnnnnnnnnnnnnnnnctgggcttctcgggcacccttagcatggagcccaccccaaggcctcccactgtgcatgggacggggtggcccgatgccagccggcctccttgaccgtgccaggggccctgcccccaccctctcaggatggcctggacttggggaacagagccgggtggggttgcagcccggagcatcaaaggcaccaggtggattgggcccagcaaaggccaaccctggtccaaaccctcacactacagaaaaccnnnnnnnnnnnnnnnnnnnnnnccggccacgcccggcccctccccacccaggagggaggtggcacttcttnnnnnnnnnnnnnnnnnnnnnnnnnnnnnnnnnnnnnnnnnnnnnnnnnnnnnnnnnnaaatggagtcaactttttaattatatatataaagataaatatatataaatatatatataaactttttaaaactgtgaaaaatagctatgaaattataaaaaaaaaaaaaaaaccaacacattctgacgtgcagaatattattttttatttcctgttagattgtagtgtctagcaccggcttcaccggcctcccagtccccagcacacccccacccaccccgccaagtgtactgtactcaccccccaggatagagaaaagagggagagaagagggagagaggcaggagccggcccgagcccagggtccctgcttgggccgcagaaagcacttaaccaggccccaagccttccagggaaaccaaggcctcgaccagacaatcttgagggaaggaaaagccagactttgggtttgttttttgggggaattgtttttttttttttttaagtttcttttggaattttgtttgttgcgcaaattctgtgtgct

SEQ ID NO: 3173 - DNA, 727 bp, Macaca Fascicularis
  misc_feature (1)...(727): n = A,T,C or G
cgcatggggaatgcctagaatggagcaggaatggaggcccctttgtgtgactaaatttggcaagaatatggatccgagccagtctttccacgtgtgctcccagctcccagctgagaaggccaagggttctcttccggatgcagcctttttgaaatttattcttggccaaaagaggaacatagatcaaggattctatcttgcttttgcggggcaatggagagaccctgaaaacaaggaaaacctggggccttctataagaaaataaactccctgaaaggggaggcatggccaaggaatttacttatttttataaatctctttcctggatggatatggtaatggatgtgtttcttgaattgtggtaaatgcacctcatnnnnnnnnnnnnnnnnngctgtattctcaggcttcctgggctccgttgacattgggcaagcatataatcccnnnnnnnnnnnnnnnnnnnnnnnnnnnaaccttcttgcagnnnnnnnnnnnnnnntgggagattaatgcagaacaaggtcattagtctcattgtttatccggttactagccgcacagatttgtgtaaatttcagctacagtggttgcagcctgcctttgatgtgtgtaatctgtacattttagtgctnnnnnnnnnnnnnnnnnnnnnnnnnnntacatccaatgcccagaaaacacannnnnnnnnnnnnnnntgaagcgtagagttgaaccattttcc

SEQ ID NO: 3174 - DNA, 696 bp, Macaca Fascicularis
aagctcacagtacaactgagagatgggcctgtttgggggagggtaccactgccaagcctaggacagagtgccaggctcatcctgggcccagcagcccctgtgcccagcaactgccagtcagcagcctcctccgaggccctgaaaacttgccgcccccaccccctgagaagactcccaaccccatggaatgcaccaagccaggggcagccctgagccaggactcagagccagcggtgagcctggagcagtgtgagcaactggtggcagagctccgcggtagcgtgcgccaggccgtgcggctctaccactcggtggctggctgcaagatgccctcagcagagcacagtcggatcgcccagctcctcagagacaccttctcttcagtgcgacaggagctggaagccctggctggggcagtgccgtccagcccaggcggcagccctggggctgtgggagccgagcagacacaggccctgctggagcaatactcggaactgttgcttcgagccgtggaacggcgcatggaacgcaaactctgagttccggaagcctgtcccaagtgaatgaatgcctcagcgattccaaactgcagcccctctgccactcaccaaaacccacggggctgtttggattggaaagccagggagccagtgttcagaggcaaagcagccttcccagccgctcctcatagggcgc

SEQ ID NO: 3175 - DNA, 726 bp, Macaca Fascicularis
  misc_feature (1)...(726): n = A,T,C or G
aacagtcacatgtcaccacaaaccaatcaatctttatgagatactcctgtatccataccccagcttgtttgcaatttataatcttccccttcaaagctaagaagttacagaaaaaaannnnnnnnnnnnnnnnnnntcgtgtccctaaagttctatcccagtcagcagtctttatagtcaaaacagattttaaaaaatgttttccatttgagctttacagttagcaaaagtgcttttatacatgttctgatttcagaaacaggataatataatttgttaagtaggtttcagtttgctaatagggattttttgtgttttttaattttcagcatctcttgaagaatcttgctacagccaagtggcatctcactttttagagacgtttgcaattattagttgattcacagtacagaacaaggtgtaaaggaaaaaaccctgctaggtagtgttatagttgctggattaaaaatagacattagaaataacaggttcattataagatttacatggaagagcaaagaaggaaaaattatatttttaaagnnnnnnnnnnnnnnnnnnnnnnnnnnnntatgaagtttatatttttaaaaaatatcctatattatcacaccagagattttagattcttttctggttagaaacattgctggtagttggattatatttttattgtattcatttatcttagggggaaaattgtaaagaaaaaaaagggtccagatg

SEQ ID NO: 3176 - DNA, 729 bp, Macaca Fascicularis
gcagtaggcattggctgtgtggcctatgaaaaagtgaagtcacttttggattaacctagaagtgatatatcaaattgttgtcattgccgtaatcacttaattgtaagataatacctggattataaagagatgttatcttgtcctaagaggaaagaaatgtcagataattgttaaaatattttttcattattacaaaatatataaattaaataataatttttataaagttctctaataatttaaaatctttaatagccaaaaaatactatttacattttctactactctcccttgaatcctaacttaaaatttgttcttgatttgatttgaatacaccatagagtaacataaaacatttggtcagcaataggactttatctttgaaaacgtttttatatttgaaaacttattttaaaaaagctgagcttgaaaaagctttatacactaaaagaaaaatcagtgcatttaaaattgatgttatagcaaataattcggagtctgtttcttttacttaagcaaaatggaaaattagtttctaattccttctgtcacattttagatggaataatgataacatctttcttacatctctgggcgtttttatttgtacatgtgaatactgttggttcattttgattcttgatattgtcagcttatataaggaagttggcattgataacaaatctaacactggacaaattttatttatcttctggtgaaaacattcga

SEQ ID NO: 3177 - DNA, 671 bp, Macaca Fascicularis
agtaaagaagcccattgaactcacttcatttgttgatttccttcgaaagccacagaagagagaaaaacagagaaggtgtgtggtgcggtggaaaaagcacagcatagagttttacagacttgggtctgcagctgactagttgggtggcctggggatagtggcttcatcttttggggcttcaagattctctgtctttaaaatcaggggttatatcagatcatgaaagttcccattccattaaagaaagccctgcatgtctcataatgatgctctcctgttaaatttacaatgaaggacgcacatcacttaaccgtaagaattttccaaactgaaccggtgaccaatgatctctctatcagagaaatgtcagatttctagcctccagaactttgatttttctggacattcaatagtttctctttctcagatatttttcagctgatgccagaaacacttggtatttgtttttaatcccacccttatgttttgaggcattggagggtaacacattgtagttccctgtgagtcccgaggatcgcacagctatgctgcggtctcagaagccattgaaacattggtgaatgtgaagtcactttgggtgtgcctgcccgtcatccggtcagtgctgatctgattggtgtgtaaataatagtactgtttcaattgtgtcc

SEQ ID NO: 3178 - DNA, 642 bp, Macaca Fascicularis
  misc_feature (1)...(642): n = A,T,C or G
cttgggagcttgncagttgcttgtagaaagatatgtgtgcaaaactgaatttaaaacgaacaccacggttgcaggtacctttagttctagggagccagctcgcccaggcttccctggtgctgtgaagttgtttgagtttatttatggaaattaggtttgctttgagctgtgttgccttactcttggcccagagtttctctgcatgttgggactctgatatttgatattgggtactctttcaacacttgaggctaaatcaagcactgtgtactgatgtgtaatttcgtgtatcagaatctcagggtaacagatagccaagcatggcagtacctgttttatctctttacacgaattggacctcattgtttctgccaccatgtactgctccataaattccaccttatttccatggtctggttgttgtctgtaagttttgaaacctaactggtcatgaaaagccatttttcgggcggtatttaaaagctttttcccacaaatagaactggtatctaaaacattttttcattcaggtttggtaaggtgggagatttgaaataaggtacaacagtggttttggaaatcagctatcaagtcttagttttagggaccaccacgtgacagaaatgatttatagagagagta

SEQ ID NO: 3179 - DNA, 747 bp, Macaca Fascicularis
  misc_feature (1)...(747): n = A,T,C or G
tacgttttnctcnnnnnnaacattttcctatattatatctcaaaaaaacaaaaacaaacaaaatcttgtaattaactagtagataaaataggggtagaaattgtgatgagaacatgtcacttcctatttccagtaagaccgaagtaaaatagtaaaaagaaagcagagctgaggagcttagtctgttttgggtgaaggcagctggttgtcggtatgcagagcaggaatgcatgtaagtgtagatcatctgatcttacccgtcggatctcttgtgacttgatgatactgtttttttgttgtaagtctgagaaaaccctgtgtttcagtgtcttaagagacaatgatattctgactgtttcctacctgaggtgtatttggatgctccttagatcttcaagctaattgctaggaccaagaccaaaatttttttttcatacttatgtttgccttttgatttgattcatttaaatattttcagcattattctcactctcagtacatttcccccagcttgagctagtcagtgtcttcagtcatttgatttttcatttttttaaaaaacatattttccattttcttgatgtgatagtttcttacactttgtgatattcaagttgatgacnnnnnnnnnnnnnnnnnnnnnnnnnnnnnnnnnnnnnnnnnnnnnnntcctnnnnnnnnnnnnnnnnnngtatgcagcagaaatgatacctaaactaaaaacaaggacacaaaaagcaggaggtg

SEQ ID NO: 3180 - DNA, 745 bp, Macaca Fascicularis
  misc_feature (1)...(745): n = A,T,C or G
gcggcagcctcgtggctnnnnngagcgcgaccgggccgcgcttcctggcgtactttggctnnnnnnnnnnnnnnnnnnnnnnnnnnnnnnnnnnnnnctccctcttcctgcacgtgcgcaaggccacacgggccatggggnnnnnnnnnnnnnnnnnnnnnnnnnnnnnnnnnnnnctcnnnnnnnnnnnnnnnnnnacctcggccttcgcccggcagcccnnnnnnnnnnnnnnnnnnnnnnnnnnnnnnnnnnnnnnnnnnnnnnnnnnnnnnnnnnnnnnnnnnnnnnnnnnnnnnnnnnnnnnnctgcnnnnnnnnnnnnnnnnnnnnnnnnnnnnnnnnnnnnnnnnnnnnnnnnnnnnnnnnnnnnnnnnnnnnnnnnnnnnnnnnnnnnnnnnnnnnnnnnnnnnnnnnnnnnnnnnnnnnnnnnnnnnnnnnnnnnnnnnnnnnnnnnnnnnncnnnnnnnnnnnnnnnnnncctgcgccttcctgttgctgcgcctgctcgtgggcctggccctggccagcctgcgggtcctgcacggcatcgcccggcctcaacacccaccaccggcccctacgtgccaggaggacccacagtcccagctcctccctgccccctgctagcagccacagagcgcgctccctgccgtccccaccagagatggaccagggaggacaggacgccgggcaggggaagccgagtcgcgggcaagccacagtggttcttgcgtggccgggtt

SEQ ID NO: 3181 - DNA, 718 bp, Macaca Fascicularis
  misc_feature (1)...(718): n = A,T,C or G
agaaactgcttccatttaaccctcagctgtttcagaacaactgtggtgagacnnnnnnnnnnnnnnnnnnnnnnnnnnnnnnnnnnnnnnnnnnnnnnnnnnnnnnnnnnnnnnnncgaatnnnnnnnnnnnnnnnnacttctagtcccccctcnnnnnnnnnnnnnnnnaggtctgctccgttgcctccagaggcatctgagggaagtagtagctttttgggaaaactcatgggcttcattgctaccccattcatcaagctttttcaattaatttattaccttgtggtagcaatcctgaagaacattgtctatctcctgtggtgtgttaccaagcaggtgattaatggcatagaaagttgtctttaccgcctggggtcagccaccatctcatacttcgtggnnnnnnnnnnnnnnnnnnnnnnnnnnnnnnnnnnnnnnnnnnnnnnnnnnnnnnnnnnnnnnnnnnnnnnnnnnnnnnnnnnnnnnnnnnnnnnnnnnnnnnnnnnccgagttctgagcatccctatccgtgtccttgtggatgtggccactttccctgtgtataccatgggcgctattccaattgtatgcaaggacattgcactgggccttggtggcactgtctcactgctctttgacactgcatttgtggtaccctgggtggcatatttcaggttgtttttagtnnngcaagcggattggctactaaggttact

SEQ ID NO: 3182 - DNA, 722 bp, Macaca Fascicularis
aagcagttcaaggaccaggaccaggaccagtctcacctgttttgtttacgtggaccactacagaaattagtctgaaaacctagacttctaagtcaacatgatagtggtcatataagaatgatgtgtgttatagcaaagatcacaattacttttgcatcacctggtactctacaaaccatatatattttgtatatatataaataatgtatattatatatgtatatatagctttatataaaactatatatagagagttatatagagttttatatagagagttatatatatttgtacacacacacacacacatacatatatggtttgtagagttctggagtctggagacaagacttcctaagagaaacccaagaatatagagcaccttgcaggagttaaggatggcctttggaaccaattatgtattcctatagtggagcaactgtcaaatattccacattgtttcatttttctccattttaataatgtaatgaactaaggtaaagaaaaaagatagtataactgcatcagtgacaagaagactcaaaaaacaaacagaagtgcagtccatgtctgaattttcaagttccgtattggatgaccagactggcagtcatttcaaatcctatttaataggtttaaataaaatctcttgtatttaaatttcatggctaaatttagtttcctccaggggcatgatctcacaaaaaatactcttccagtct

SEQ ID NO: 3183 - DNA, 740 bp, Macaca Fascicularis
  misc_feature (1)...(740): n = A,T,C or G
annnnnnnnnnnnnnagnncagccgagtaggagaggctaggccttcactcttgggaagcggtgtagtgacgatgtacaggaatcctcctcactgccatgggatgttttatccagcccctccttgttccggctggtggtgtgacttcgttggttgaggtgtgtctcccnnnnnnnnnnnnnnnnnnnnnnnnnnnnnnccagggannnnnnnnnnnncccctggcataatttaaaataggatatttctcagctactgaacagttactaatttatgggatggaaacagcattaaaaatactgaatcaaatggaaaaannnnnnnnnnnnnnnnnnnnnnnnnnnnnnnnnnnntgaaaaagaatgtgtgtaccacaagagctggttttaattgggggaatggtttttgtcctcattctgtacagaaatttgtatatatgacggttcttagaacttgttttaatttttgtggtccttctgtttattataataggtgtccacaaatgattctccatatgtgttcttaatttttaactgccgcaagtgttaaacaaacacacacacacacacacacacacacacacattaaatttttttttcagaactccaaagtcctgaaaattttggtnnnnnnnnatttttaaaaaactaactttgtataacctaatatttgtattctctcatctatatttttttattcactataatcannnnnnnnnnctaatagactcaaaagttaatca

SEQ ID NO: 3184 - DNA, 439 bp, Macaca Fascicularis
aagacctctgggagaagacaggtggggaggtcccccccaccccccgactctgcaaatatgcgctctcccctcccagtcttactctgtatagcaagatattcgcgcccttcccactagtggtcggtagaggctcccgccccaccaaaggacctccattaggagatcctggagaggctaagggcagacagggaaagaagggtgtgctacagatgaatctccaaatcctggaaagggtggctttgcgactaatcgccccctaatcgccccctcacccagtgagagtctcagtcactggcctctacccacaggccaggggtcctacccctattccttctcaatactcttcatggttgaacccagatagttcccccttccaaatgcacacccccaaccatcaccggaaaatggaagaagggaaacaggtgttgctttaggacga

SEQ ID NO: 3185 - DNA, 720 bp, Macaca Fascicularis
  misc_feature (1)...(720): n = A,T,C or G
agnnnnnnnnnnnnnnnnnnnnnnnnntagccatcctcatcaatccgcagagggggatacttctattattggaatcaatcatggcaaggagaattccaaaaagtattatgcataagataatggaagctggtcatcagcacagaggaanngggttnnnnngaaaacacacacacacacacacacacacacacacacacacacacatgcaaggagaactcctgatactacagaagtagatgaggagaaaccgtcttggtttggcatgacagggctcagggaggataacttctggattgtctaggcccctgaaaagccacctggaatctcactgaaatagctgaagtttannnnnnnnnnnnnnnnnnnnnnnnnnnnnnnnnnnnnnnnnnnnnnnnnnnnnnnnnnnnnnnnnntttaaattgtgtcctgccagactttttcttccttgtacaattcaaacagtaagaaaaaaaaatttccttttccatctttacagtttttagattgtttttatctttaaccagtaaaaattccatgcagtgttaaagatccgtaggcaacagtattttcagttaactgaataataaaagatgcagtcaggatcagagaaccttnnnnnnnnnnnnacagatcaactagcagggttagtggagcccagattcctttcgggtattctaaacctactgcgtgtctctcaaatcttcattcactttgtgtccc

SEQ ID NO: 3186 - DNA, 608 bp, Macaca Fascicularis
  misc_feature (1)...(608): n = A,T,C or G
aatacagcatnaggggcagaagaattaagatnnnnctttattccattgtacagtgtaaacaactaagttgttaactgtcaagtccaatgatctattccataagttgtgttctagtctttgactaaaatttatcatttcttatagtgggatttaatctttctctaaaaacatataagatcctctcaatagagtaatcaatcaaaattagattttgcaattcataacattgaagttagtctggttaagtgttttggtttagacttcatttatattttacttacagattctaatttttaacgaataatcaagttttcataaagttattaatatgatcagggaaacctttgggacgtctgacaattaggcattggtgaagagacaattcaagccttagtgactattcagaatagccagtgattactagctgattctcatatccatgcctttttgtcctgtttacagtcttaaaagaggtaaaacatagcaaatatttttttaagggaactataaccttaggagtcctgaaaataatttcaaaaaaaactaaagacactgttgccaatgtgacccaaaaacttaagaacatactaatggcatatatttgtaca

SEQ ID NO: 3187 - DNA, 233 bp, Macaca Fascicularis
gagacccaagcaggacaacagacagcaagagattgcaaacagcagatctcagattttgtgggtagtggagaccaaggactccatgggagatgaggacccattcacagataagatgagatttgagcaaggtgggtctgaattcgtgccagtagtggtaagcggggtagtgttgcgctccatgagcggccgggatgtcttcttcaagagctggcccccgcccccgagatggcaat

SEQ ID NO: 3188 - DNA, 742 bp, Macaca Fascicularis
  misc_feature (1)...(742): n = A,T,C or G
gaactagagctgatcgtcaccacaaagttatatgacaactccgttctaagacttatacctattatatagggttacannntttttcttatgcctcagctctgtacctgacaatttatgattcagtggagccaagctagaaaggaacaaaggtcatctaacactgtgatggggatgaattcctgggtgttacctgcacaatgaggtggtgccccggaattcagagcagagtagtaatagagcataagatggctgctccagatgactcttgggtttagtgtacttgtgattgaacaagactttttatatatgaagcttgattctacaaccaaaataatagaaatgggtggggggatcatnnnnnnnnnnncttttcaaaagcttgtggtttaagtaaaagtaaaatgtaaaaactnnnnnnnnnnnnnnnnnnnnnnnnnnnnnnncagcatgaggaaatggaaggaggaatattgaaaatgattctaggaaagtgaacgtaagaaaggaaaatgggttttccttttctgatcatgggctctggaaagttcnnnnnnnnnnnnnnnnnnnagcataaaccagagataaggacatatgtacttacgtgtgtctgtgactgtgtgtgtgtctgagtgttattctgaacagcttgtaaatattgtagttgtttataatggaaaataaaggctgagtttttttggcaaatatattgcatcaaaaatacagtatgacagtggataaaaca

SEQ ID NO: 3189 - DNA, 2559 bp, Macaca Fascicularis
atctatacaaaggagactttttttgagataacactcaaatactattctctcttcttttgaaaattttattttatctgaaaataaaaggtgatctgaaataaaaaggggaggcctattagaatgagagtagccaaggaaagaattactaggtaataagcttcactttctgtgttctaattgcttttgagatataaagaccctgaaaaagcctgtttggaacctgtttaataagagcaaatataggggaaaatccttgaaatgaaagttacaaatatatgtgagaagaaaaaaatgggttttttaagcaaataattaactaagcttctaaattcctagctcactccccaaaaggcatttttccccgatggaggcacaggcttctgtctcagatgtgtggcacgcatgagtttgtaccggagtgaccccagcagccactgttcaactcctctctcccagaggcctgaaaagagaggctgccctcctgcgccaaggcaggcgtaagctgcgggctgtacgctcctagtagggtgacttttcacttaatggtggtggtcttattttcaactacggtttcattcagtcaggctctgttgactaaatacgacgaaaatttatactttatgcaggagatttctaaaaattttatgtttattaatagtttatgaatatcaagatacctcattgaatccctgaatttaaaagcagtccagtaaaaggttaactgtataaagaatctatgacttcttgagggaagtatgatatattaacaaatacaattctaaatttgttttagctctaacctcatcaaaccaaaggcacagatttgtgtacaatatacccattgaatgtatatcccgagaaaaactagggccaaagaagccggaaaatctcaaagctctaatggcagcataaatcaaagaattttgcaggctaatattttttatccatagtcattgctcccttgtcaagtgtcccacaaggacatggaagaatgtgttatgttcatcctgtactcgtagcaaaaagtcaggaaaccccagggtcaagcctgctctgccacaaggttggagggtgatcttgggcaagtccctggggctggctaggcctccatttgtccatctgtgaaatgaaagggtcagcttggacaaccctctaaactcccttacagctctcacagcctaagagcgcaacactaaacagcctcatcattccacttttcatgggaagtgtatttcacaacattgcctttgtggagagaaatatttcttttcctgtgttaatgagctatgtactgaatataaaccagtgcatttaaagtaatatctttagaaaatacacctctaaatgcatttggaattgtgttctcataggatacacaaaagtactgattctaggtaagaggagtctccacgtgtgtgccctgctcagctgggtgtccatgagaacagccctgaaataagtcactactcatccccaaaaccacaggaatatatacctaggtcacctcaaattcctgagtgtgctctgccatgttacacagtcttcaaattcaacagacttcttgaaaaggaaagtttggcccagtaactgtggagaaggagtccatggtgtcgctgtgggcctgtatcatttggccaagtcaatggttgtaagcaaagttagtggagacaaaaatgtgtccaaaatgtcgtttgagttcctgggatttctgtaacagcacacaactcagaactcttcagcatttgtgtgattccttacctctggctgataaaactctgatgggttgtggcttactttgtttccattttctttggctttgtgcaatttttgtgtaacttgtacctatattttctgtttacagttctttttaaggggaggggtagggttctaagatcttgttgtttattgtagataaacattttttcgtgttgtagaaaagcatgggttatgcatttgactgaaaaaggcactgtattatttaccaaaggggtattgtttttgcatttgtttataaatgcattattttggtactgtaaatttggacataatttctgagtttattactactggcattttcttgtttccctttttttttttttttttttaaccataagtgcgcgatgcaggtgcataggtcccagaccaaactagaccaccagcatgttcatgtccagacctcggcagtggcgtgcactgcttgtgcacctcagttcctccagtgttggtttgtttgtttttaaattcagcatcctgctttgttttactttacaagcaagatctgttgtgattcccaaatgcgttttaatgagctcatccttatttgcctctcttcttatgtattttgtgtattagattgtgcaggagatattctagaaggcattaatggtttgcattcaaaacgatgtggtttgtccaagttattttctgtctttattattgagatggattaatctccttatttttttcttgatgatttgaagttgtaagagttgtccagctattgcttaataaaattttgcagatcaaaaaaaaaaaaaaaaaaaaaaaaaaaaaaaaaaa

SEQ ID NO: 3190 - DNA, 693 bp, Macaca Fascicularis
  misc_feature (1)...(693): n = A,T,C or G
aacttaatannnaatgnnnnnnnnntgaaaggtgtgccntgctagaggtgattgggtcatgagggctctccctttcatgaatggattaattcattcatagattagtgtattaatgagtcaatggattaatgggttatcatgggagtgggaccagcagctttgtaagaagacgaagcgagacttgaaccaatacactcagccccctcaccatatgatgccctgcactgccttaggactctgcagagtccccactagcaagaaggctctcaccaaatgcaccaccaccaccccaaccttgaacttctcagtctcaaagtctgtaagaaacaaattccttttctttataaactaccccatctcaggtattcagnnnnnnnnnnnnnnnnnnnnnnnnnnnnnnaaannnnnnnnnnnnnnnnnnnnnnnnnnnnnnaactaacactacagacaagggctttctaccccacccaccttcacccattgttcaacnnnnnnnnnnnnnnncacttctggaccactgaatcagaaggatccacacagatataatcacctgacttacaacaaaggccccactgcatcttaatgggggaaagaatagtcttcgcaataaatggtgttgggtcaatgggagatgatatgggagatggagaaccttcagtcctaccttatattgtacataaagattattgagag

SEQ ID NO: 3191 - DNA, 991 bp, Macaca Fascicularis
  misc_feature (1)...(991): n = A,T,C or G
agagtgtgagtgttcgacgcggtcgagcnnngcagattccagaagatgtacgagtanttcagtgattctcagtgcaggggaacggnnnctgaattccagggatgcagcaagacacacagcgggagcgaaacgctacaaatatctgagaaggcttttccgctttcggcagatggactttgaatttgctgcctggcagatgctctacctgttcacatccccacagagagtttacagaaattttcattatcgaaaacagacgaaggaccagtgggccagagatgaccctgctttcttgttcctgttaagtatctggctctgtgtgtccactataggatttggctttgtgctggacatgggattctttgagacaataaagcttctcctttgggttgtattcatagattgtgtaggcgttggtcttctgatagcaactttaatgtggttcatctctaacaagtatttagtgaaacgacagagcagagactatgatgtggaatggggctatgcttttgatgtgcatctcaatgctttttatccactcctggtcattttgcattttatccagctttttttcatcaaccatgttatcctgacagacacatttattggatatttagttggaaacaccttatggttggttgcagttggctattatatctatgtcactttcctgggatacagtgcattgccatttttgaaaaatacagtaattcttctgtatccatttgcacctctgattctgctctacgggctgtccctggcactgggatggaacttcacccatactctgtgttctttctataagtacagagtgaaataaaaaaaagtgagaatattcaatcataactgtgtcaacagtattgtgaagtgatcatttcttgtaaaacttgtaaataaactatctttgtagataccttaaaggtgtaaagtttgcaaatttgaagaaatatcaacactgtggtcaggtacattccttaaaactaattaaatg

SEQ ID NO: 3192 - DNA, 617 bp, Macaca Fascicularis
  misc_feature (1)...(617): n = A,T,C or G
gnnnnnnnnnnnnnngtctctcgatctcctgacctcgtgatccgccngnnncggcctcccaaagtgctgggattacaggcttgagnnnnnnnnnnnnnnnnnnnnnnnnnnnnnnnnnnnnctctgaccaactctgatagggctggaaacgtgtatggagttccagacccaatatggggccccagtgccaacttcttagccctcctttgtaaggtttgcattagtctgatgggagaggaatttttttgtcttgattctgaagctattaaagaaatgttcctttttctccataacttgaggatttcacagttgtattggaattattggtgttaagcagttagatccatcccttggcagcttgttgaagggtgggcgggcacctnnnnnnnnnnnnnnnnnnnnnnnnnnnnntgactctttactggagggtgctgagttcgtgattatctcctctgctgttagaaaactctgtgannnnnnnnnnnnnnnnnnnnnnnnntcaagtcacgtttttcctcctagnnnnnnnnnnnnnnnnnnatattatatcttcattnnnnnnnnnnnnnnnnnnnnnnnnnnnnnngannnnannnnnnnnnnnnnnnnnnnnnaag

SEQ ID NO: 3193 - DNA, 659 bp, Macaca Fascicularis
  misc_feature (1)...(659): n = A,T,C or G
tactacgatcaggtgaggcccagggcannccagaggggaggcgcagcggagcgggaggcccgtggaccctcccggcggagcaacggtgccagcccatgctggcggggcccaggctggggaagggactcggctttcattcagatttcccaggaagaccccaggcagcccccactggatccccaggctcctgcagagatggaagcagggtgggtggccctgggccagcaggcagaggggcaggctcagacaggcaccttcctctgcctgggcannnnnnnnnnnnnnnnnnnnaggaccctgtgggccnnnnnnnnnnnnnnnnnnnnnnnnnnnnnnnnnnnnnnnnnnnnnnnnnnnnnnnnnnnnnnnnnnnnnnnnnnnnnnctcagacagcagcaagccggatccaccaccaccgcagtgccttatgaccccggannnnnnnnnnnnnnnnnggggagctggcagagcctggggnnnnnnnnnnnnnnnnnnnnnnnnnnnnnnnncagtgggctccctgcctgccacctcccctgccagcccacccactttccccccacctgggattatttctaatttataaggacccccccttcttccccnnnnnnnnnnnnnnnnnnnnnnnnnnnnnnnnnnnnnnnnnnnnaaaaacagaa

SEQ ID NO: 3194 - DNA, 717 bp, Macaca Fascicularis
  misc_feature (1)...(717): n = A,T,C or G
agcccattcaactcacagatccaggaaaaatcaaannnnnnnnnnnnnnnnnnnnnnnnnnacgtgtgnnnnnnnnnnnnnnnnnnnnnnnnnnnnnttctgcaaggagcatcctcaacaaattcatacctgatatctatatttacacagatcacatgaaaggnnnnnnnnnnnnnnnnnnnnnnggctttgggttgtcactggttgctgagaccaccagtggcaccttcnnnnnnnnnnnnnnnnnctccaacccccagggccagggagcagcagtacttccagaggaccttggcaggaactgtgcctggcnnnnnnnnnnnnnnntctataggggtggatgtgtagattcaannnnnnnnnnnnnnnnnnnactactcatgacccttggacagcagnnnnnnnnnnnnnnnnnnntaggccctctgtctccctacacgatagaatttttgcggcatttgaagagnnnnnnnnnnnnnnnntttaaaattgaaaccaagccatgtggtgaagaactcaagggcggggataaagtgnnnnnnnnnnnnnnnggcattggtttctccaaccttagcaagaccctcaagtgataaccatcacaagataaggccccagtgcctccagacaaagcagacactgccatggacaccgatgggaccaagtccannnnnnnnnnnnnnnnnnnnnnnnnnnncgtnnnnnnnnnnnnnnnnngaa

SEQ ID NO: 3195 - DNA, 718 bp, Macaca Fascicularis
agcacatgcctagccaacttttgcaagctcaaaaaatgaaaataatatctgcttaatcaaaacaatcagaggaagaagaaaagagattttaaaataattgactgatttttgactctacattctttatctaccatactgctcttttcctttttaaaaatattattaagcactttcaatatagataaatgaaatacaggctaatctttaggtgtcttaagaatttttgctttttgaaaaagaaaagctaatagcctaactgcagaggaactgagtggatggggcggctgctgtatagatttttagatgagatgatacagtgtggattacaatgcaccttgggcaggacagtttgttcttgatatggaattcatatgcttttgaatcgtactaataactcagcattaacaagtgtattactccttaaattctacaggcattttcaatattcctaaccaaagagtttatagcttacttgagaagaagtctgttcttggagagatgttgaaattagatgtttattaaactttaaaatataatgccttaagctatagcactttaaaaaatctttacatataaattgctaaaaggactgttaatgcttttctcagacatgttgacagtttacaattttgcacatcatggtttatttgaaatgaaaaactactttgttttataagtctacctaatatctcatttttggttctcatctttagcacag

SEQ ID NO: 3196 - DNA, 509 bp, Macaca Fascicularis
ccactgccctctgggtgctcgttgcgtacatcttctatagaaagaagattttttggaaaatatgatggttgccactgagatgtgctgctggaagactctagcaggcccgcagggtggactgaagcggccctcgttaaagggaagcattcattaggaaattgactagctgtgtgtttacagactctgggggaagacgctgatgtcctcaaactggttaactgtgacacggctcgcccgaactctgcccgtctatttgtgacttacagatttgaaaagtaattgtcttttttcctccatcttttgtggaaaaggatgtatttggaacttcattccaaggagatcagctttaactttccaaaagggaattgccacgggtgttttttttctgtgttgggtgaaacaatatgaggtctggttcttgctgaccctatttccccgcaaacttcctttccacgcttatgcggacaccaacacgaaatgccgtcactcttactgcggcggctatgaag

SEQ ID NO: 3197 - DNA, 1709 bp, Macaca Fascicularis
aatacctgcttttccaaagagcaagcaagtccagtgtcaacataagctcctttctggcaatctctcccagctgggaaaccaggggactcggtcacatgtggtgaaggtaggagcaaagggttcatagagaagactggggaaggtcctgggacactagactctgacagccccagccgctggtacagagtggagtggtcagtgacaacagtccacaagctcaagtatgtcaccacgtgttatacttaaaagtgctttcttacacattatcccgtgtgatctacatacctgtgctgtaggggatacaggccaagtgtatctcaaggaggaatctgagcctcagggaagttaaatgatttgtccaaaatcagaacctcaaaggttcacctctagctactcttcccactgcatcgcacagcgccatctagtgggtgaggcccatgggccatctctatcattctttcatttcagggaatggacagagcaggcaatcagctaagtattccagattcagattcctttttttgagtgtccctgctgggggctttgtcttctgagagtaatgagctctagcagctgacacagccttagaggctgtagaccggggtcctcatgcgaaaggagagattaaggttagaccttgagagttctaggctgaacaggcagaaccttctactattgactgaatgtttgtatccccccagttcatgagttgaaatcctaatccctggtccaacagtattaggaagtggggcctttgggaggtgagtagattgtgggggaggagccttcatgaatgggattagtggcctaataaaagagacccttgagaaccccgttgtctgttttaccatgggaggacatagtgggcctcaccagatactgaatctgccagtgccctgattttgaccttcccacccttcagaactgcgagagatcaatttcagccacttagtctatgggcctatggtattctgttattgcagcccaaacggactaagacgctttcctggaaatgcaccctctttgctgctcctcttctctctgcattgatgctgaaagacaagaaaggaaggagggctgaggtccagtgctgtctctcctctctaggtagtccgtgctcatggatagtgtttctccactgcaggagcggagctttatgttacttcctttttattcatttgtaacgtgggtaaaagcgtttttctattttcttcttttgaaaaccgtagaggagggttatctgtgtattcctctcttgaggaaggggacaaaatctctaatagggtttgctccatgagatgggattcagctccacaaggacagcactagggctccagcctccgactggaagctttcagaggctcagtgttgctattcagatcagccgtaaaacaaaagaaaggcttggccagcacaactaaatggaaaggactgatgaacagggtgaagactctgcttcccctcggttattctgagctcttaataattcaatccctggctgggaattttccctgaacccctctaccacatccagatagatggtctgtgagtgttgagtagaagccctagtctcaaccctaacctctccctgtccataaagatgatgctgtcttctttcctgagagttcccatctcagttgtctctctggactaacgtaataattcatttagaaaagcaggaagagagacgaaaaaaaaaaaaaaaaaaa

SEQ ID NO: 3198 - DNA, 1734 bp, Macaca Fascicularis
aggcgggtaagaatagcccacaataagagatgactgctgcttgctctgctggtcactgcagttgtcaggaatgttttgcctcagaggcttagggccgtctcaacttggagacagaaaaacccatctcctactcctggctcaaagctttgctttcttatctccagctcacacctttaagtcttttgtaattaaaggacatttatccaggcaaggatttttccacctccttggagaacacgccctgcagtgtctcctgcagcctggagcctgtgacattctggaagcatggaaggcgtggacttgctagggtttctcatcatcacactaaattgcaacgtgaccatggaaagctctggttcgtcctcacgatgctgctacggatgctggtgatcgtcttggcggggcgccccgtctaccaggacgagcaggagagatttgtctgcaacacgctgcagccgggatgcgccaacgtttgctatgacgtcttctcccccgtgtctcacctgcggttctggctgatccagggcgtgtgcgtcctcctcccctccgctgtcttcagcgtctatgtcctgcaccgaggagccacgctagccgcgctaggcccccgccgctgccccgaaccccgggacacggcctccgggcagagacgctgcccggggtcctgcagggagcgcggcggcctcgaggtgcccgacttctcggccggctacatcatccacctccttctccggaccctgctggaggcagccttcggggccttgaactaccttctctttgggttcctggccccaaataagttcccttgcacgcgtcctccgtgcacgggcgtggtggactgctacgtgtcgcggcccacggagaagtccctgctgatgctgttcctctgggcggtcagcgcactgtctttcctgctgggcctcgcggacctggtctgcagcctgcggcggctgatgcgcaggaggcccggacccccgacaagcccctccatccggaagcagagcggagcccctggccaccccgagggacgcccgacggacaaggagggtgggcgggagcaagagggggcacctgcgcccccggttgcacgcgccggaggggagggggccggcagccccagggttacatccagggtgtcagggcacacgaagattccggatgaggatgcgagtgaggtgacatcctccgccagcgaaaagttgggcaggcagccccggggcaggccctaccgagaggccgcccaggacccgaggggctcaggatccgaggagcagccctcagcagcccccagccacctagcggcgcacccttcctgcagccgcctgcagccccctgacccgcctgccagctccgtcggtgctccccacctgagagccaggaagtctgagtgggtgtgaaaaaaacagcacctggccatgccccggggctcacgcctgtaatcccgacactttgggaggcccaagcaggaggatcgcttgagaatgtatctccttgcccaggagtttgagaccagcctgggcaacatagtgagaccctcgtctctacaaaatatctaaaaattagctgggcacagtggctgccgcctgtagtcccagctacttggagggctgaggtgggaggaccatttgagcctgggagattgagactgcagtgagccaagatcatggcatggcactgcactgcagcctggggaacagagtgataccctgtcaaaaaaaaaaaaaaaaaaaaaaaaaa

SEQ ID NO: 3199 - DNA, 717 bp, Macaca Fascicularis
  misc_feature (1)...(717): n = A,T,C or G
tgagccctgtgaggggctcccacggggnnnagtacagatgctccggtgcacannnnnnnnnnnnnnnnnnnncggcccccagtgaccccctggacatcctgatcacaggacagaaccaggccagaccctccctcgcagtgcatccgggccccacggtggnnnnnnnnnnnnnnnnnnnnnnnnnnnnnnnntcacagggatggatgcacactttccttctgaccaaggagggagcagctgatgcccccctgagtctgaaatccaagtnnnnnnnnnnnnnnnnnnnnnnnnnnnnnnnnnnnnnnnnnnnnnnnnnnngcccacgcggggacctacaggagcagtctgagaccctcagcccgtcacaaaaccagacagactccaagactggccaacacccacaggattacacagtggagaatancatcagcatgggagtggatggattggtcaaggtggtacacatcgggaatatnnnatataagaggatcagcacagccagagaagcccccaagaagcaagnnnngccnnnnaacagcagagaagacaatgctcccttcagagtggtggagcctcagggacagatctgatgatcccaggaagttatggaggacaatataggacctacattttatgaactgtatgctggtcacttctagagacaaggaatccacatttgagtgcagggaaactgtctggggtgattcctagaagatc

SEQ ID NO: 3200 - DNA, 699 bp, Macaca Fascicularis
  misc_feature (1)...(699): n = A,T,C or G
gatagaaagatgcnnnntgacatggaattgttaagccacnnctgagcagtgtatgtcaggactgacttgttcattaggttggcatcagagaggcagaaggaagtatacaggaagaggtgtatgcagatgtgtccatgtatgtccttatttacattttgatagccattgatgtatgcatctcttttagctgtactatagaaatacattaagtaattcaatggaaatatactttgctaatattttaatggnnnnnnnnnnnnnnnnnnnnntcttaaaaagttatacttagtatattctgttgctgtgtgtttcattttaaattgagcattaagggactgcagcatttaaatcggaactctgccaatgcttttatctagaggcgtgttgccatttttgtcttctatgaaatttttgtcccaagaaaggcaggattacattttttttttttttttagcagtttgagttggtgtagtgtattcttggttatcaaaatactcatatagctttgggattttgaattggtaaatattcatgatgtgtgaaaaatcatgatacatactgtacaatctcagtcccataaaattggatgttgtgcctacacacacacgatctagaagaacatgtcaaactataaactgcttgtgatttttaatgactttgttctttgcttcttgtgtttttcagtttcctgtaatgcac

SEQ ID NO: 3201 - DNA, 717 bp, Macaca Fascicularis
  misc_feature (1)...(717): n = A,T,C or G
ctggcggtgnnnnnnnnnnnnnnnnngttgtcctccatccggcacttcctggagaagcgggatgagatccgagaggtggcccgagannnnnnnnnnnnnnnnnnnnnnnnnnnnnnnnnnnnnnnnnnnnnnnnnnnnnnnnnnnnnnnnnnnnnnnnnnnnnnnnnnnnnnnnnnnnnnnnnnnnnnnnnnnnnnnnnnnnnnnnnnnnnnnnnnnnnnnnnnnnnnnnnnnnnnnnnnnnnnnnnnnnnnnnnnnnnnnnntttaggcccctcaggacccagggaatgtcagggacatattcaagacacaaagtcccatgccctgtttccaatgccaattcatctcagcaatcccaagccaaggtctgaacccttccaccaaaaactgggtgttcaaggtccttacacccttgccccacccccagcannnnnnnnnnnnnnnnnnnnnnnntctcttagatcaggagaaactcgggcactccctaagtccactctatttgtgtatgtatcaagccttttccccactgaccctcccctgaataagggactttggaattctgctcctctctcacaactttgcttttaggttgaaggcaaaaccaacgctctactacacaggcctgataactctgtactaggcttctctaacccctagtgtctctttcttcacctcacttgtggctgcttccctgaacatccatcccctatcagatga

SEQ ID NO: 3202 - DNA, 738 bp, Macaca Fascicularis
  misc_feature (1)...(738): n = A,T,C or G
atgtagacaggnntgtgtcatgttcccttacagtcgtttttttacagagaaaaggggcattgttttttcacttctttctcaacagttcctgtgaataaacgaaacatttcggtgctccctaagagcaagagccctcacttcttcttgcagtgccggcaccatgtgttggtgaagctggtgctctgggggccgctcactcaaatgacacctggaggccgtttcctccctgatcatccccttccccagcctgactttttggcctcctgcccaaccagacacctcaaactcttgtcannnnnnnnnnnnnnnnnnagagaatcctcaccagttctcaccaaccttctccccaggcaagagaagctgccagcttggcactctgccaggatgggtttccctggaggaagctgctcacactgagatgagcctctcagggcaggaccttttcccaagccccgcacacccagcccttttggctcccctttttccccgtgcctcagcactccttgcctggctgcagataacgaactggggttgcctaaagggcagatctgccctctccgtgtcttnnnnnnnnnnnnaagagtcctcttaaaattatgcgctaattctgtacgggagcatgcaaaagacattacttagagattgaaatttcaaactatctgtagtttttcaatggaaatgtatcagctagggaaaaaccatcaagctcattattatttttgattttcagttgtattt

SEQ ID NO: 3203 - DNA, 738 bp, Macaca Fascicularis
  misc_feature (1)...(738): n = A,T,C or G
tacaggccttggagccatnnnnaaaacnnnnnncnagggatttagtgccctatctccctgtctctgtagaagctttagcctgggcacctggctccatcttgtaactgcctgctagccataggttcctctctgccttgctggcttctccctataaaagtaaagcccttttctgccccagctctgagacacttgcagatcttaaggtctgagacttgctgattttctggttggagagttttttgtactgccatagacccttccccatgaagcaatagcccctcactacctcctgcaataggcctttccaataaagtcgctccctgcctacttcctaatttattcctatttgacagaaggtatggaagacttgcaatttgaaaactggggaccagttccaaagtcagtcatcgtgttaaccacgtgtataacagctctgctggacacccaagaaagccatgggaacaccaactggaaaggtccccttcccgagggaagcctgcgaaggagaggttctgtagaatccaagcccacacttccaaagtcaccccccacacgtcctctcacaacgtccactgtgcgtccgtatgtgtctgggatccagggcaatgtgaattttctttttatttgggagattgttcacggaaaacagatcttcttctctcttgtccacctattaattgtttacaatatttgtacatctatgcaaaatacttgaatgggccatggtgccttttttcc

SEQ ID NO: 3204 - DNA, 223 bp, Macaca Fascicularis
caggagcaggaccttatgcctctgtgatcttgccccctttgcaggcagtaggtggccctgcagtcacacagcttggagacaccatgagtcctggcggcctgtgtgcagaaaggcaccaagggccctggaagcccagtgtgggagggggcggggtccagggacgccgggaggggaggtcactcggcctctggggtcagcagagccccgaggcctcccacaatgg

SEQ ID NO: 3205 - DNA, 729 bp, Macaca Fascicularis
  misc_feature (1)...(729): n = A,T,C or G
gaaggacacacatccacctggccccaggacttcctggagaccccagtgtcatcagtggtcagtgcccttccctctcacctagctactcccacccactctgtcctcccaggtcccctccaaaggttgcaacacttgtctgaggccaccccatgcctggcatggagcagcaaccctgcaatcccagcccaggaccccagtctacccaggttgctgactgccctctaggtgcccagtccccatcttcagctgtctctgcaggcatgcggccccattgtgaaatagctgtgttcattgatggacccctggctctggcaggtgagtctggacnnnnnnnnnnnnnnnnnnnnnnnnagggagggcacgagtcacatctctggctctgtcagcagatggaatatccttcttccgctcnnnnnnnnnnnnnnnnnnnnnnnnnnnnnnnnnnnatggcttcctgcttcccaagtacttcaaggaggccctgcagctacgccctacccgtgagagccaccaccccagcccctatgccttgtgcctgaagcctgtgtccttctgccctcacctctctcctagcttccaaccccagactgacttagatctccctttaacgaactcttgtctctatcaggaaagcccctttcctnnnnnnnnnnnnnnnngacagagtgtcggagtggccccaagcactgctccagagaaaggagaaggatccaacaataaaatattaat

SEQ ID NO: 3206 - DNA, 827 bp, Macaca Fascicularis
  misc_feature (1)...(827): n = A,T,C or G
cagctgtaacnnncacccacagnnnntgccaggcccactgcctgtccgtccctgtcccctttcctgctggcaggagcccgctgcctaccgggggccttactgtgtggcctgccttcaccccactcagctcacctcctcctccgcctcctctccacctgttggtgagaggtgcaaagaggcagatctttgctgccggccacttcatcccctcccagatgttggaccaagacccctccctgccaccaggcactgcctggagggcgaggagtgggagccgatgaacaggcatgcaagtgagagcttcctgagctttctcctgtcagtttggtctgtttcgccttcacccgtaagccccttgcactctggtggcaggtgccttgtcctcagggctacagcagtagggaggtcagtgcttcgagcctcgatcgaaggtgacctctgctccagatgggtggtgccagtggcttactaattccgatactagtttgctttgctcaccaaatgcatggtaccagaggatggtgaggtgaaggccaggttgggggcagtgttgtggccctggggcccagccccgaactgggggctctgtacatagctatgaagaaaacacaaagtgtataaatctgagtatatatttacatgtctttttaaaagggtcgttaccagagatttacccatcgggtaagatgctcctggtggctgggaggcatcagttgctatatattaaaaacaaagaaaaaagaaaaaaaagaaaaatgtttttaaaaagggtcatatattttttgctacttttgctgttttagttttttaaattatgttctaaacct

SEQ ID NO: 3207 - DNA, 289 bp, Macaca Fascicularis
gaggcgggcagtgtggctggggcgtggggtgtggggcgtgggtggccgccccagggcctcgcgttctcgggctccttgcgttcctccttggctgtccccggggaaggctcttgctccgggtgcctgtcgcctgtgcccggggcctggggctgcccatcgagggcgctatctgggtcaggactggggccgggcaactggggacgctgcggtgccaagggaggtggcacaggcctgcgggtgcccggatggtctggggcacgcggcgtgggtggcccggatgacttggcct

SEQ ID NO: 3208 - DNA, 731 bp, Macaca Fascicularis
  misc_feature (1)...(731): n = A,T,C or G
aggctnnnnnacttcnnnncnnnnnntctacagcaagataatgtgctagtcatgttgatgtgaggactcttgccgatttaacagttttatgtgccatgaaactatacaaacaaactggcaatttgattttactgatcagtctccagtaagccagccttcaagagatggattcattcttggtgtgtgcacaaaaccaagcactggtcttcaaggctgagagtcaaaacagcaatgtagttgctactaaattcacagtgattgtgctctctggtaaaatgacttggcactgacctgccaaatgtcaccatatgaaatcctnnnnnnnnnnaacttttctaaactgtatttctgtattcagaannnnnnnnnnnnnnnnnnnnnnnnnnnnnnnnnnnnnnnnnnccaggtagatctatacttatgatttgtgtttttcttctataaagaagtatctttggatgtcaaattaaagattgctacagaatgcaggctgaaagctgacagctaattagagaatatttctgaatactgcttccaattaattttaaaaacacatcagaatgtcagaaatttattttctatccctgtctcccttatatcattcctatgtcagcatcacttatggttaaaacatcttaaaatgagaagtaaatatgaagtatattgataaataacaaattaatagatctcaaaagtatgtcttttaaatcacatttgtaattgatcaaaaa

SEQ ID NO: 3209 - DNA, 672 bp, Macaca Fascicularis
gctgtccttttgcattagagtcagactgggagagaaccgtgccggcagagaggcgtgaggcagggggcacgtgctgggtgttggcccacatggctgtggtggctgtggagggtgagacggtcctgctaagtcagggcctgccagggcctcgaacgcattgccaagttggtggatgcaggtttggccaaaaccttcctgggaatggggaggggggtgtctaggtgcctggcacctgaccctgactacaaacagctgaaaacagttttataaaatagtataaaattgcttacccacgaatacctatcaaggtcttaaggaattaacagttcaaaatttttattcattcatttattcctttgttttgcttgttcattcagaggcaaggtcagcatttgagaggctggaggcaggagagaagcagcccttccacctggccctggagctggttttgcctctcactgcttgagccaactggaacatggcatggtggcctcagggctgggcatggaaggccgactccaaggctgactccgagccgtctgtcagtgacgtgcaagtctttaacctgctgtgaggggcaggaggtcaactgagtcaaggagcaaagccaagaaccagatctgtacaaaaaagaaaaaagtcctgctgacagcctgggagtgaggctgcctg

SEQ ID NO: 3210 - DNA, 650 bp, Macaca Fascicularis
  misc_feature (1)...(650): n = A,T,C or G
aggctggcaggacccaannnnnnnnnnnnnnnnnnnnnnnnnnnnnnnnnnnnnnnnnnnnnnnttgaaactcaccagggaggagtgagtgggtggcaaggaggaggccaggagagnnnnnnnnnnnnnnnnnnnnnnnnnnnnnnnnnnnnnnnnnnnnnnnagggttcttcccacgatcgattgcaaaggagttttataccaggctcagctgatttctagatgtcacctggtttctcaggcaagtgtgtcttacttaaaggaggcaggccacatcctgaccttcagagtcctgaggtagagaattgtggagagcggnnnnnnnnnnnnnnnagctgtatctcnnnnnnnnnnnnnnnnngaccttcataccactcttaatnnnnnnnnnnnnnnnnnnnnacaaatggccaccgttnnnnnnnnnnnnnnnnnnnnnnnnnnnnnnnnnnnnnnnnnctaaggagtggtttgtgcagctctnnnnnnnnnnnnnnnnnnnnnnnnnnnnnnnnnnnnnnnnnnggctctgcccactggacgtgttcttgaacgccatgtcagtttataccttaagcccaggagaatnnnnnnnnnnnnnnnnnnnnnnnnnnnnnnnnnnnnnnngaaatggagagtaactgatttat

SEQ ID NO: 3211 - DNA, 716 bp, Macaca Fascicularis
  misc_feature (1)...(716): n = A,T,C or G
ctgtccattttgtaatcaagatttaggaaaaacagaaatacatctatctttatgaaattttgggcaggtttttgtgtatcaatattttgtactttttagggaatattttattttttagttatttgtgtcaaattataattataaaaggtacagcagaaaatataccatgtttttatataggttcacacctgtacttaggagggaccctgtccatctatatactttttgtataaaattttaaaatgttaaagatccacaagatcttaataaaatgattctatagctagaaaaacatttaccttcccagtgctttgcactaaaatatactgtgaaaggaaactagaaagactgtaactattgctggaaatgttctatattgaatgtacatgctcttgttggaaaaatgtactatatgtgatggaaataaaccagactcgaagttatttcagctaaatgtgcttcagcaaaggtgcattggttgaaacttaaatgttttattatcaaatttaaacttattcagtgacnnnnnnnnnnnnnnnttgaattatattctgatagttttatttctaagaaatagagtaataatttctctttaatttaaaaacggatttactttccaacatattgaaaatttgtacttatagatctaactttaataactaatagtataatatatttagggaactaaatgtgtagctgggtatttctatttataa

SEQ ID NO: 3212 - DNA, 210 bp, Macaca Fascicularis
cctccacccccacacccatccgcaagcagtccaagcggcgctccaacatcttcacgatatgtgccactgtttccaacttttcatcaacaaaaaggcctttccaactccttccaaattagaagaccagttggtgacacacagcacctctggacatgccccctgtgcggggccggaggcgggccgggccctgggactgctctcagatgagaa

SEQ ID NO: 3213 - DNA, 2887 bp, Macaca Fascicularis
ttgtcttgtcttgtgttgtcttgtgtgttcattcctttgtttaggaaacatgcggaccccaacatctggcacagcgagcagggtccgtggctccacgagagcaaggaaccggagggggaacaccccgggcaggtaaataaagaaagggggacccatgggaaaattatggggaattccacctctctggcccctgaatatttgtggttactgcagggactgttgatgtctataggagtaaaagttagttaaggagcataagactttgaagtgattgtttgcccatgttgaacaacattgttattggtttcaatatcaaaccaaagtgcagttaaatcgaaaggaatggttacaagtggttaaagtactgcgtcgagctcatcagcgaaggcaaatgatgcctctgactttgtggactttgtgtgtagttccattactcaggcattagagttacttgaaactgactcagagcatggcgatactgccacaggaggtgaggcatctgaagctttagagaaaagtaatcttagagaggaacatgtttatgccccggttgttgaggacaaggaattggaaaaagagctaatgcctccttcatctgaaggaaattctgatttgcagcacattttagagatgttacaacagttgttaaaattgcaagataccactgctcctgtttctcctatctctccgccatgagccttccctgttaccttcccttctgctaaaaggatttccctttgcctccacctccaacctctttgcctatgtcaggtcaggttttgtctgtgcctcttcctcctgtaggagaaaagaaggaatcgaaggaaaaggatgatttcgaggaattagatttattcccaataacacgggctgcttttggccccaatgctcagttcccaaacggtggccagaatgtgacttttacagccctacaatttaaatttttgaaagaaatgaaagctacaatttctaattatggacctcaatcaccgtttgtccttggccttctcgattccttctcttcagaacatatgatgatccctattgactgagaaacgttgggacaggctgtccttgatcgttcgcaatggcttcaattaaaaagttggtggtgggaggaagcaaaagtacaaactaaaaaaaatgctacgcgaaatcccccagggctactgaagagcagcttacgggttcaggacaatacgccactcttaatgctcaggcaggcctagatgatattgctctcactcagattaaagccttgtttataaaagcgtggactaaagttggaatagtgggtaaaacttctttatcttttgtaaagatcctacaaggagccactgagccatatccaaattttgtagcccgtcttcatgatgctgtattaaagactgtaggttcaggccttgctgctaaaattcttttggatactctggcttttgagagtgctaatcctgagtgccaaaaattgctgcattctctaaaagctagtggagctgatttagctgaatacattcgggcttgtgcaggtgttggaggagctatttacaatgctcaattgtttgctggggcaccttctaaggctttaaaaggcaattctaaacaaggtatatgctatcaatgtgggaaacccggtcgttttaaaaaggaatgccggaaaaaattaggctcttctgctctaaaagaaaaaaggttaccatctgatatgtgtaaacgatgtggcaagggtcgacattggaccaatgaatgccgttcaaaaactgataaaagtgggaatgtactgtcacccctctcgggaaacgggagccagggcccgcaggcttggggccccaacaactacaatgcaggcctaccccagtacccagtaagcagtggcttacaacatcaaggaatgacctcgagtcctccttaaagacatcttaccctaccctagtttctcagctttatgctgccactaagcagagcgccgctgctgacctagctattgtccaaccttatactttatctcctaatagaggaatatataagctggctaccggagtgtgtggtcctttgccaaagggacacgtaggacttttactaggttaaggcagcaacgctatgcgggggttaatggtggtcccaggaattattgatcctgattttactgataaaatccttattatggtacaagtctcacaacttatgcacctagaggcagggaaatgtattgcataattgcttttattgcctttttttcctttcttatctagagatgtgtctcgtcaaggaggtttcggtagtactgggaaaactgttttctgagaaactttagtttctgatcaaaaatctttatgttcattgcaaattaatggaatactttttgaggggttagtcaacacaggagcggatgtatataataatgtttggctcaatggcctgatcattggaaaaagaaacaagtatcggttactctatccggcctaggtactgcttctatagtctaccaaaatgtcgagcccctgagctgtgtaggacctgaaggacaacaaggaaaagtgttcttttatattgttcccattaatattaacctttagggccgtgatcttttacaacaatttggtgcctttttaagcattcctcatatttcttcagctgccaaaaatatgatgttcaaaatgggctacaatcctttaaactcttagccactgtccacaagcctcaaactttacaattgaagtggaaaactacaactcctgttcaggtggaacagtggccattatctaaagaaagacttaaggctttaaagaatttagttaaggaacaattggccgaggggcatattgaaccaagtacttctgcacgaaattcccctgtgtttgtcttgtcaaaaaaaaaaaaaaaaaaaaaa

SEQ ID NO: 3214 - DNA, 369 bp, Macaca Fascicularis
  misc_feature (1)...(369): n = A,T,C or G
ctctccagcctctgcnntgcagcacacccttgggtgacccctcaccccagaagcagcagtggcagcttgggaaatgtgaggaagggaaggagggagagatgggaggggggagagagaggagaagggaggcaagggaggggcagcagaaccaaggcaaatatttcagctgggctacacccctctccccatccctgttatagaagcttagagagccagccagcaatggaaccttttggttcnnnnnnnnnnnnnnnccaatatcaattgtgtgagcttgggtgcgagtgcacgcgtgnnngnntacgtagagtatatatagatctctatctcttagcaannngnnnaccagatgtaaatggtgcctctggg

SEQ ID NO: 3215 - DNA, 702 bp, Macaca Fascicularis
  misc_feature (1)...(702): n = A,T,C or G
cagccagcatnnnnnntgatggaggtgagggccttggcttgactgcccagtgtnnnnnnnnnnnnnnnnnnnnnnnnnnnnnnnnnnnnnnnnnntctctagggtggaggcaagtgggctttttgctgggtagttggatgtagtattgtgaaggtgcatgacaggagattgaggagaggaggtgggggtgctctgaccgactagaggttccctgagnnnnnnnnnnnnnnnnnnnnnnnnnntggctggaggtggccgaattgacaaacccatcttgaaggctggccgggcctaccacaaatataagnnnnnnnnnnnnnnnnnnncacgagtacggggtgtggccatgaatgtaagtaacgcagaaatgcaggattgggtattcaaggtaccatggccacacgagtaggcaagtcccatccacaggtggccctgcaggagggacatctgcagtgggaggagcagtgggtggtggtttgtagtcacannnnnnnnnnnnnnnctccaaccctcctgaaggaggtgggctcacccgcattctaaagccatcttccnnnnnnnnnnnnnnnnnnnnnnnnnnnnnnnnnnnnnnnnnnnnnnnnnnatcggcaagccctctaccatccgcagagatgcccctgctggccgcannnnnnnnnnnnnnnnnnnnnnnnnnnntggacgtctccggggaaccaagac

SEQ ID NO: 3216 - DNA, 371 bp, Macaca Fascicularis
  misc_feature (1)...(371): n = A,T,C or G
acacggtgggctcgatcacgtggtcaggagatccgcctgcctcagcctcccaaagtattgggattacaggcgtgagccactgtgcccggccaagaagcttgttttcagtaattgatcgcattcagttctttcaagtcaagaacctgattgattctgtacacttctctttatacctaatgaacttctgttctgttgatttctaccatttaagtattttcccccttagtccttaacaactgcgtttcctgcctccagaataagctgaagtcctccaagatgtactgtgggtttctctaagaaacttaacactctatttttctttccccangatatcccagaagaaactgaagaaacaaaaacttaggcacggg

SEQ ID NO: 3217 - DNA, 2962 bp, Macaca Fascicularis
cttgttttggcattgtcgtaatgtccaaatcggccaaaggagtgggataaggggaaaggatcaggtcagaaactttagaaggactaggtaaattaatttatttggaagccagtgaggtggactatgttgaggtagtagttccacaccacgactttggagccaaagaaaagcccaggccgaaaaagcaagccttgatgtctttgttctgccttggcctgcaggggctgggaacaaaggacaggggctaagaggatgcaccaaagtagccgcgccctccttgcctggcgctgtccgcggtgctgaccgtgacccttttctctctctgtaatcaaactggaaaagcaataggaccgtccggtccctactcaaaagaagagtaagatattaggtaatttgaaaaatgacatttaaaaagagagaaaggccacatacagcaaaacaatattttactgaaatcgttcgctcaagctgttgctacccttgcctgatactttttggtcttcacgtaggattgcacacatacattcagtatacgtatatggggaaacaatttccactttaggctgaaacgtaaatccttcagtgagcaggattgcaagaaggaaattgaggagaatgaaggctttattattatccttttctttcttaagtcatcttccttaaaacagaaacataaggttgtcagccgcggattttagtgctgacttggtcaccaaagggacatgcaatggactcaaatgtgggcctcgaggcttaactagaaaggggtgggtcggggacccaccaggtgaaacagggcaggaacccacgcaggctgccactttcgttcaggtttggtaactgggcagccttagtagacgggtacagatggctgagctctgcagaccgctccggtgcgcaggagcctgctcggctcatccttgccggcgggaggcactggagggccaggaggcctgaaacccgcactgcggaaaaaccgaccacagccgcatcctcatagctcccgcgacagaaagaggcagggcagtttactaaatcctatgcaatgaaaattcgccttaggactcgaaggttggatgggtcagtattgatatattttttaaaaatctaaatttcttagcatatttcatcgttcttagatattgaaaatattaataccaacaatacaaatttaaattccctaagtaatgaatcaaaatggcaagggagagagagagacggaaaatctactaattcgtagccagcctggctggctatttcttaaaagaaatttctatacgtttgcttaagtttgtctataaattcacaaatataaaagctgttaaaattagtaacagacaaaataattcaggttggacaatagcggcagcaacaccgattttgatccaggtataacaatgggccatgcattgacaatgatctaaaagatatgtgttcattcagttttttttttttttttttacacgggacataaatatatcttaaaattcatgaaataaagtggccaggtgcagtatcctcagagagctgccttctcaccccgtgcctcaggacggattttatttgtcctcaaattttagaactctgcaagtcaggtctttcacattcatctattactttggtttatatttaattttatccaatttgggagtgggtaggtaaagcacactggaaaataggggctgctcgaattacaaaattaaagggttgggaatattcctcttgtgccaattaaaagcagtcgttggaagcggaaatgaatttaaagcattacacgttatcatggcggccttgctttccttccagtattcatccaattgcgctgatctcctgcatccacatcttgcgtaatccgcaaagctggtccagggctgcaaaatcgtcctgcctgattccgttagagttcatactacctcacaggagcaaacctaatcccctcagcctaattctacctgtttaggaaaatctaaactcgtccttcagaaggcttgatcagtttaaaattactttctaaatagaaatgaaatacgtgatatgagagaggttaaaatactgcttaaaaagggaaacaatgtagtaattcggttgcctagatgaaaccgaatggctattgatctgtgatgtttctagatttttaaaactatgtactttctatttctttggaaaataatcatccagtttgatgcccattacaaattttcctgctatgaaagaaattctatgtgcggcagttttgcaataaaacaacccaggcttcgcaattggagaacttcggtgcggcgtgccgtgggagtcctttgacaatctcaactttcatctaggtctgaaattaaagcttctcggaataatttaggaacagcttgacccgttgagacactcaaggacaaccctccagggaaatagtatatttccttcctgggaacaagatgctagcgcggtgcaccgggaggtatccggtgtcaacaatgccagaacgccctctgctgcctcaaagaggtaggacatcagttacaaaagccagatggcacagtggcaataagcggaggaaacattaagctcttagaaacgtttatctgtgaaatgtaaaagcgctcatcacattctacttttgaaagggccacctgattttgattttgagcactccttggatgctatcttctattctggaggataatgaaaaatccgtgttttgaaattttcagattatttctgtagttatatttctccaccctttctcgaattttatatggaaatacgaagttgcaagtcgaagtgaaaaacctttgtgtaaacaggtgagtggagaagacgacctgacttctctagataactaagatctaataaagagagaaatcttaattaaaataaagataccgagcacatgttgttgcattagtttaaaaagataataataaaaagaaattaagtctcgatgtaaaaaaaaaaaaaaaaaaaaaaaaaa

SEQ ID NO: 3218 - DNA, 98 bp, Macaca Fascicularis
accgaagtatgggcaccaaaagtgataaggagcatgtgttccttaatatctgtcacatcagaaaatgactgttccaggacagtaaccacctaccgatg

SEQ ID NO: 3219 - DNA, 152 bp, Macaca Fascicularis
  misc_feature (1)...(152): n = A,T,C or G
gaattcaaggccgagcgcagtgaggggannnnnnnnnnnnnnnnnnnnngacagaggtggggcccttggaaggccagcacaggcgtgcccggctctgttttccgtttttctcatatcagggtcttgtctatgtaaacactaagctgtgctcc

SEQ ID NO: 3220 - DNA, 632 bp, Macaca Fascicularis
ccaggctgggactacaggcacatgagttcctttgtggaaggtagggaagaggaaaccatgttggtcaggctggtctcgggtgccagcagcaggcatggaaattggcaatgattgctctgcctcccagattcatgccactgcactccagcctctcttattcaccaggcatgagctatcgcacccaaccctgctctttttttgaacatgtattacagagcagtgtacgcaaagatcaccagccatgaaaagacacaagcatcttccaaagaatgcagctccatgtctaatcgcctcctcactgatgcgctgctgtggacatgttaagcaattgccctgggcttgggaatgcgaagccatgagccaccgctcccagcaagaccagtctggccaacatgggtccacccatcccaccagtcctggtctcaggccatgttgctcactttatttgttaaagtgctggtgaccccatgcctttgcacacaccggctgaagcttgccagtatcatgcctggctaattgggtttagtagcagtagcacagccatgaacccgggaggcggagctggaggtgggcctccacatggctaaaaatgtattagccgtctcgggtccccttccatggaatccagattt

SEQ ID NO: 3221 - DNA, 3502 bp, Macaca Fascicularis
actatctctactgctgctgctgctgctcctgctgttgctgccgctgcctctgctgccaccaccactactgctgccagcggagctgctgggagtgagcatcccctctccgggatacccagctccgcggcatctcccgcgcgccctggccccacacggacctgccagccccagggaacaaaagcggagcccgctcgtcctctactgcagccggaggatgagtcgagagggctgagcggagagtgtggtcctcggcggctggagctatttccttggcttctctcatgacgattcctgacttctggccctggcagtcttgggaagacatcatccagcttcttcaatccagaccctgggcccctcctttccccaggatcgcccccacccagcccggacacattgactgaactgttttctaggacactgcactcaggaagacatggtggtgagccctgactctcagtcttcatgattgaagaactcttttgcacaacacaaggcactcaagaagagtgaatgaaatgtgcagctcagagtgtcatttctgaagggaggagtctttctcttggagaagagtcctcaatgagcctggccaaggcccgggatctgtgtgaagtggactaaggattaagtaggatgtcaactgagacagaacttcaagtagctgtgaaaaccagcgccaagaaagactccagaaagaaaggtcaggatcgcagtgaagccactttgataaagaggtttaaaggtgaaggggtccggtacaaagccaaattgatcgggattgatgaagtttccgcagctcggggagacaagttatgtcaggattccatgatgaaactgaagggcgttgttgctggcgctcgttccaaaggagaacacaaacagaaaatctttttaaccatctcctttggaggaatcaaaatctttgatgagaagacaggggcccttcagcatcatcatgctgttcatgaaatatcctacattgcaaaggacactacagatcaccgggcctttggatatgcttgtgggaaggaagggaatcacagatttgtggccataaaaacagcccaggcggctgaacctgttattctggacttgagagatctctttcaactcatttatgaattgaagcaaagagaagaattagaaaaaaaggcacaaaaggataagcagtgtgaacaagctgtgtaccagacaatattggaagaggatgttgaagatcctgtgtaccagtacattgtgtttgaggctggacacgagccaatccgtgatcccgaaacggaagaaaacatttatcaggttcccaccagccaaaagaaggaaggtgtttatgatgtgccaaaaagtcaacctgtaagtgctgtgacccaattagaactttttggggacatgtccacaccccctgatataacctctccccccactcctgcaactccaggtgatgcctttatcccatcttcatctcagacccttccagcgagtgcagatgtgtttggttctgtacctttcagcactgctgctgtaccctcaggttacgttgcaatgggcgctgtcctcccgtccttctggggccagcagcccctcgtccaacagcagatggtcatgggtgcccagccaccagtcgctcaggtgatgccgggggctcagcccatcgcatggggccagccgggtctcttccctgccactcagcagccctggccaactgtggccgggcagtttccgccagccgccttcatgcccacacaaactgttatgcctttgccagctgccatgttccaaggtcccctcaccccccttgccaccgtcccaggcacgagtgactccaccaggccaagtccacagaccgacaagcccaggcagaaaatggggaaagaaacatttaaggatttccagatggcccagcctccacccgtgccctcccgcaaacccgaccagccctccctcacctgtacctcagaggccttctccagttacttcaacaaagtcggggtggcacaggatacagacgactgtgatgactttgacatctcccagttgaatttgacccctgtgacttctaccacaccatcgaccaactcacctccaaccccagctcctagacagagctctccatccaaatcatctgcatcccatgccagtgatcctaccacagatgacatctttgaagagggctttgaaagtcccagcaaaagcgaagagcaagaagctcctgatggatcacaggcctcatccaacagtgatccatttggtgagcccagtggggagcccagtggtgataatataagtccacaggccggtagctagatagcgcaggtctgggagccggagcctctctacgcgcagatcaatagacctaagaaatagcatcgatgcgagctcgtggtgggtgctcaagactggcatggacatcagcatcacgacaggctctcttgtattctttcacctcatcccacaagaaattcatgattgcccaatggaactcgctcagaagagggaactaagcgtttttggcaaccaatggcagatatctatggcagcacacacagaaaagtatagaaagatccacccaacattaaatcacaaatcaagcaaatgcttacccaacaaatatttgagccctcatagctgggtttaagttgacccagtgtgcaaaattattaattccctttttatttctctacctgttgaccactgttgagacaccaaatttggagtgacaggcatcagaggattacaacagggttggaactgacttctttaagcaaaagcaaagggtcttctgtgaccacaatatcatcattcatatgccttttcacataggatgatgtgttttttgtcactccatggggcctggtctgccattttcccccctttcctttctttgtcatgtttgaaaattagtaggtgtacaaatttttgtattgcttttgactttttttagatatgggtgaagaaatctaactggggagaaaaaaagcctcagtgaaatgaattaacttgaaattacaagacaaataagtggttgattatttgttatgatcaagaatgttgccaaaacaatcctttagctattctgcatcctggtgaagaaagacagctttcagtttgaaccttcattctgtgagtaggaaaagacatcagatcccattgatgagaaagatgaaaaaatgcatctgatttcttaagaagctctaaactcttaagtacaataaaatgatattttttatttttccgatatcttgctgctgtgatgctatgcagacaagtgtcttctccacgtgccattttcaaagaaaagtcatctgccaaataattctggtacaattctggtaatgtggttttggatcttaaaaaccaactttctaaaggaacaatggtggcatacatattcagaataacaaactgattccgtggtccaaatggttcatctctatctctttttgtacatcagaaaattcaaatgggatttttattttataacttgaaaaaaaaaaaaaaaaaaaaa

SEQ ID NO: 3222 - DNA, 701 bp, Macaca Fascicularis
  misc_feature (1)...(701): n = A,T,C or G
attaaccaaaannnntgacatattaatgtggtattaaatttgagtgcttatagtccatgtacatcaatggtccatnnnnnnnnnnnnnnnnnnnnnnnnnnnnnnnnnnnnnnnnnnnnnnnnnnnnnnnnnnnnnnnnnnnnnnnnnnnnnnnnnnnnnntatagaaagatgaactggatggtgtttctgaaggagagagttcttgtatcagtttgttaacaaagataagatactacactggttgaattactttcaaaagcttttgaaagtaaaagagaagcaacttctgttggtctaggtttaacagttatgttcttccccctcttaagttttaatnnnnnnnnnnnnnnnccaactgacaaaaagaaaggnnnnnnnnnnnnnnnnnnnnnnnnnnnnnnnaagaatgctatagcaaatgcttcaactctggctgaagtggagaggctgaaggggttgctgcagtctgnnnnnnnnnnnnnnagagaacgcagatcggggcccactgatgatggtgaagaagagatggaagaagacacagtcacaaacgggtcctgagcagtgacgcagatgtataataatagacccttttggaacaagtctcttgcttttcgaacatggtataatagccttgtttgnnnnnnnnnnnnnnnnnnnnnnnnnnnnnnnnnnnnnnnnnnnnnnnnnnnnnnnnnnnnt

SEQ ID NO: 3223 - DNA, 1286 bp, Macaca Fascicularis
gcgcgctggcggacgcggcggcattaaacggttgcaggcgtagcagactggtagttctgtttctaggtctcagcttctcgtcacgacgttcgcccgctcgctctgaggctcctgaagcggaaaccggctagactttcctccttcccgcctgcctgtagccgcgttgctgccactccgccaccatgttcgaggcgcgcctggtccagggctccatcctgaagaaggtgttggaggccctcaaggacctcatcaacgaggcctgctgggatattagctccagcggcgtaaatctgcagagcatggactcgtcccacgtctccttggtgcagctcaccctgcggtctgagggcttcgacacctaccgctgcgaccgcaacctggctatgggcgtgaacctcaccagtatgtccaaaatactaaaatgcgccggcaatgaagatatcattacactaagggctgaagataatgcggataccttggcgctagtgtttgaagcacccaaccaggagaaagtttcagactatgaaatgaagttgatggatttggatgttgaacaacttggaattccagaacaagagtacagctgtgtagtaaagatgccttctggtgaatttgcacgtatatgccgagatctcagccatattggagatgctgttgtaatttcctgtgcaaaagacggcgtgaaattttctgcaagtggagaacttggaaatggaaacattaaattgtcacagacaagtaatgtcgataaagaggaggaagctgttaccatagagatgaatgaaccagttcaactaacttttgcactgaggtacctgaacttctttacaaaagccactccactctcttcaacggtgacactcagtatgtctgcagatgtaccccttgttgtagagtataaaattgctgatatgggacacttgaagtactacttggctcccaagatcgaggatgaagaaggatcttaggcattcttaaaattcaagaaaataaaactaagctctttgagaactgcttctgagatgccagcatatactgaagtcttttctgtcaccaaatttgtacttttaagtacatatgtagatattgttttctgtaaataacctatttttttctctattctctgcaatttgtttaaagaataaagtccaaagtctgatctggtctagttaacctagaagtatttttgtctcttagaaatacatgtgatttttataatacaagagggtcttgactctaaatgcagttttagaattgtttttgaatttaaataaagttacttgaat

SEQ ID NO: 3224 - DNA, 729 bp, Macaca Fascicularis
  misc_feature (1)...(729): n = A,T,C or G
atcgnnccnntgccaccaatctctannncatgggagccagaccaagccttcctgtgtgtagcacacatctctcctgcttagagctcacttactggcttccgtggcattttgtttcttttttagagatggggtcttgccctgtcacccaggctggggtacggtggcatgatcatggctcactgcagctcactcctgggctcaagtgatcctcctgcctcagcctctcannnnnnnnnnnnnnnagtctggcaccaccccacccagctcattattttttgtagacatgggatctcgctatgttgcccaagctggtctcgaattcctggcctcaagcaatcttcttaccccagcctccctaagtgctggaattataggtatgagccattccgccagtcttccgtggcatttctaacaacatccttgaaggacgtgtgtgaatccctnnnnnnnnnngtatctgcactgtccctgtcccgtgctgattctgctcagacacactggctttctttctggtcctctcacaggccaacaccggccccaccccagggcctttgcacttacggttttccctcaacctaaatacccnnnnnnnnnnnnnnnnnncagaaatatgtaataacaggagcctcatatgtacttgtaaattttctagcagtaacagaggaaattaaatttaataatatattttatttcacccanatagatccaaaatagtatcacttcaatgtg

SEQ ID NO: 3225 - DNA, 755 bp, Macaca Fascicularis
  misc_feature (1)...(755): n = A,T,C or G
aagttcatacaaatgcttcttactaatttattttggccacattcactattnnnnnntggtactcattagtgagtttttactcttttaaagaaaagaaacctccagattaactaaaacatttaaatatgaattgtatgtaggctttattcatttataaaatgcaaagaaattaagattaaaaggaaaatcacatcaaaannnnnnnnnnnnnnnnnnnnnnnnnnnaatgattcttcagtagtttattgatgctgagatagttttttttcccttgaaaatatataaaattttcttttcatctttcctgaagcatatccaaataatttagtgactacataattnnnnnnnnnnnnnnntgtgatatttggatataggcttcaacttcttctaaacttattttatacttcagaccacacattnnnnnnnnnnnnnnnnnnnnnnnnnnnnnnnnnnnnnnnnnnnnnnnnnnnnnnnnnnnnnnnnnnnnnngctttgaagggacagaaattctaaacaaatgcagatggtcaggccataaacttaattaaaatttctgctttactggatgttacattaaatatggccataatgccaagagaaatacatgaaaaatccatttgcacccacatcctgctgcttccacatagaatgaaataacagaatgctaagaagtatgtgtttgtgtgtatgtgtgtgagaacacnnngtgtattaagcgagttnnnntcttttggctgggtggccatactagtctc

SEQ ID NO: 3226 - DNA, 734 bp, Macaca Fascicularis
  misc_feature (1)...(734): n = A,T,C or G
aaaatgtgtatatagaattannntgnnnnnnnnnnnnnnnttcctgcacgagatggagcgagtcagaaccagcatggagtgnnnntgctgatttctgtccctgcatctcccctggccccgttccctgccctcctcccttccctgggtgactgnntgagaggcacttcactcacaggcctgtgggatgctccatggggccctgctggcttcttaggagcccaggtgcaaagggtttctgaaaaacaacaggattaagtacttaaagagcccaacacaattaccccgtaaactctgtgttagggcaacctccaccacctatctgtcttccaggacacattttnnnnnnnnnnnnnngccactgcatctcagattcaggggagaaagtaaattgtcacctccccttcaaagttccagagtaaacaaatggtgccatcattcaagataacatgctaatcaccctcctcccaaaaagcaagagcttgtttatggctgaggaattggtggattgtctgaatgacnnnnnnnnnnnnnnnnnnnnnnnnnnnnnnnnnnnnnnnnnnnnnnnnnnnnnnnnnnnnnnnnnnnnnnnnnnnnnnnnnnnnnnnnnnnnnnnnnnnnnnttttctctgcagagaactgaggctaaactctgtccccacttctggttttgccctgtcatgttgtaacgaggcaggcctttgagnnnnnnnnnntttgagctcaagccaaccacc

SEQ ID NO: 3227 - DNA, 742 bp, Macaca Fascicularis
  misc_feature (1)...(742): n = A,T,C or G
gcgagctaggcgcctcacggcgcagatttnnnnnnnnnnnnnnnnnnnnnnnnnnnnnnnnnnnnnnnnnnnnnnnnnnnnnngcttatacagacactggggccagcaagccggtggaacaatgggannnnnnnnnnnnnnnnnnnnnnnnnnnnnnnnnnnnnnaaacttcgggtggtgggcaggctcggtaggtgggaaagtcccgtgtccagatgaatgcagtccatgtttatattgatgaaaggcannnnnnnnnnnnnnnnnnnnnnagccactcttacaggtnnnnnnnnnnnnnnnnnntgtgtgtgtgcctgcgtgcaaccagcaannnnnnnnnnnnnnnactgcatgataccttaatttgagtggacaaagtctgtcannnnnnnnnnnnnnnnnnnnnnnnnnnnnnnnnnnnntctccctgtatccaaacgaggcattcagaggttgacagcatggatcattgcatgtcagaaatacccnnnnnnnnnnnnnnnnngaaacttaaggaggtgacattgatgtgtacagtttaggaaataaaacccaacatttacttcaaagaatgtaatttgtggctttttagagataaggatactttgacagaagttttcatttgtcgtttacgtgtatatggtacgtttcattctgacttaattaatttgttattttactatggaaacaactttatattaataatgtatttccaatgttataaattgtgttataacag

SEQ ID NO: 3228 - DNA, 1870 bp, Macaca Fascicularis
  misc_feature (1)...(1870): n = A,T,C or G
acaccagcccagaaatgtcaccggtaagtgcaacagcagacactagaagatatgtcatccctatgcattatccagagaaaatactggaaggaagccagccactgcccatgagtcggagcagaggacacccccctgacatcaaggtctagtggcgacagaaaaatgcagacagatcaatatggatggtcatgctcacgttcctcacaggaaacggtgcttctgaacgttcctcacaggaaacagagcttctaaacattccagcttccgataagtccatgtctgttgtgtattggctgcaaagaaaacctcaaggaactaaaaagtagaataatttaaatgatcctattatccaaatattgtaaaataaataacggaaagtgccacctcttccccctaaaacttagaaaccaacacactcccaggtagcccttgggtaaaacaggatattaaatctgaatgtgcgctctctgaaaagccaagaaaccataaatattgatccagcgctgaggactcagctaatgcagcgtccagagcccccagcacagctcttgttttttagaggaaaaaataaacgggagggactttgtgccatcctaagaaactaaaatgagaacaagaaagtgtattttaaaaagtagggagaattatgaagataaagccagaaattaatgaagtagaaaacaaataagtaaagaagagaaatgattgtttttctgaaataaataaaatccccttgcccagcccaaaagctgcatcaagaaatgactgcctaggctgggcacgnnnnnnnnnnnnnnnnnnnnnnnnnnnnnnnnnnnnnnnnnnnnnnnnnnnnnnnnnnnnnnnnnnnntgnnnnnnnnnnnnnnnnnnnnnnnnnnnnnnnnnnnnnnnnnnnnnnnnnnnnnnnnnnnnnnnnnnnnnnnnnnnnnnnnnnnnnnnnnnnnnnnnnnnnnnnnnnnnnnnnnnnnnnnnnnnnnnnnnnnnnnnnnnnnnnnnnnnnnnnnnnnnnnnnnnnnnnnnnnnnnnnnnntgataaaatgagactctgtttccaaaagaaaaaaaaaaaccacaaaaatgaaaactaaataaataagtgactatatttagaatttatgtacattgaaatagaaaaacccacacacgattaggaagaaggagaccccagtatggaagaggctggagaaatgagacagcccactcggccggggcagctgcttggaaacctgcagcagcagaccatgttgtcctgggtgtaaagtctataatgactctggacaagcggcaccacgcggagatgagcacaaggagctggagagggcaacagctgagccaggaaaggaggctccaggagcagatgtccgcagctgacgatgacctcaccttccatggaaagaaagtcatcccagggttactttaaccttcccaagacatgaaaggatggaaaactctgtaattcatctcatgaaaccaggatactttaattcaaaaacctgatgtggaacaaaaagagaaaaccatagacaaatatcactttcagaagatgcaaaaaaatctaacagaatagcaaataggactcaacgccgcgtcagtggattctacacaggagaacagcaaataggacccaacgcagcttccatggcatcatgtatggccaagcagatgaaggccaggcttacgagggcagcccagcaatcagagacatcatttcattagccaattagcaattcagagaaccccatcgacaggtactgaaaagaaaattgaccaaattcagcaatcgttatgaataaaagctctatttctagtaaaaaaaaaaaaaaaaaaaaaaaaaaaaaaaaaaaaaaaaaaaaaaaaaaaaaggccaca

SEQ ID NO: 3229 - DNA, 739 bp, Macaca Fascicularis
tccaagaagatttcctggctctggcttttagtaatttggggccacaactgccactgtactggactgtaatttataaatccagtagctgcgcagggtggaggctgagctgaggattaccataatgaaatgtacgaaatcttcatttaggtatgcaatcgtgaagtgaagccatctgctttctttacagtatcaagagtccaagaacaggatgtcatcatagataaaagcctcacacaaaggcagaactacactccaaatgtaatgtgtttaaattggtggggcactagcagaagacacttctagctcagctttactcttcttccacactaggctgggcccagcagtacaggagagaatgaagggaggagctccaggaggagagggaagagccctagcagggtgatcatcacaaccactcactgagagttgcccttcttagaaatgtattttattttagccagtgggtcccttcctttctccattcctctccactgctcaagaacagatttgaggccaggtgcggtgcctcacatctgtaatcccaacactctgggagtctgagatgggtggattgcttgagcccaggagttcaagaccagcctgggcaacacagcgagaccccatctctttaaaaataacagacttgaggaacccctctcccttccataattcccgtcatccaccgcccactctaggcactcactcaaacttgctcttcaactctgatacaagcagaagc

SEQ ID NO: 3230 - DNA, 5688 bp, Macaca Fascicularis
ggagctccaacctccgcttagagctcgctgcggccgtcctgccccgtgccctcggagacctggaccgtaccacgatgtggaaacgctggctcgcgctcgcgctagcgctggtggcggtcgcctgggtccgcgccgaggaagagctaaggagcaaatccaagatctgtgccaatgtgttttgtggagctggccgggaatgtgcagtcacagagaaaggggaacccacctgtctctgcattgagcaatgcaaacctcacaagaggcctgtatgtggcagtaacggcaagacctacctcaaccactgtgaactgcatcgagatgcctgcctcactggatccaaaatccaggttgattacgatggacactgcaaagagaagaaatccataagtccatctgccagcccagttgtttgctatcagtccaaccgtgatgagctccgacgtcgcatcatccagtggctggaagctgagatcattccagatggctggttctctaaaggcagcaactacagtgaaatcctagacaagtattttaagaactttgataatggtgactctcgcctggactccagcgaattcctgaagtttgtggaacagaatgaaactgccatcaatattaccacgtatccagaccaggagaacaacaagttgcttaggggactctgtgttgatgctctcattgaactgtctgatgaaaatgctgattggaaactcagcttccaagagtttctcaagtgcctcaacccatctttcaaccctcctgagaagaagtgtgccctggaggatgaaacgtatgcagatggagctgagactgaggtggactgtaaccgctgtgtctgtgcctgtggaaactgggtctgtacagccatgacctgtgacggaaagaatcagaagggggcccagactcagacagaggaggagatgaccagatacgtccaggagctccagaagcatcaggaaacagctgaaaagaccaagagagtgagcaccaaagagatctaatgaggcggcacaggatagtgtctggagcccagcatcttctcttccacttcagcgctgagtccagtatacacgagtgtctgctacagtcgccaaatcaccagtatttgcttatatagcaatgaatttcattttgtttatttgttttgcaataaaggagatgaaggtggctggctaggaggggaagggccacagccttcatttctaggagtgctttaagagacactgcaaacggtgctctggggccgtttagtaaggaaactgcatcacgattgaaagaggaacaaacccaaatctgaacctcttttgagtttactgcatctgtcagcaggttacagggagtgcacacaatgccagagagaacttagcagggtgtccctggaggagaggtttgggaagttccacagagaggaacgctctctgcttccagcctctttccattgccgtcagcatgacagacctccagcatccacgcatctcttggtcccaattactgcctctagatacatagccatcctgctagttaacccagtgtccctcagacttagatggagtttctgggagagtacacccaaatgatgcagatacttgtatactttgaggcccttggcaacctaaccaaattttaaaaatacttttgaccaaaggtgctatttctctgtaaaacacttttttttttttggcaagttgactttattcttcaattattatcattatattattgttttttaatattttattttcttgactaggtattaagctttttttattatttttcaatagtcccaccacttcataggtggaaggagtctggggttcttcctggtgcaggggctcaaataacccagatgcccccaccctgccacatactagatgcagcccatagttggccccccagcttccagcagtccactatctgccagaggagcaaggggtgccttagaccgaagccaggggaggaagcatcttcataaaaaactttcgagatccaaacattaatttgtttttatttattctgagaagttcaggcaaatcagtattcccaaggatggagataagtacagccaagcgggcttaggatatcccagcctaccaatatgctcattggcctacaactaactaggagagtgagttggccctgtctctcttcctttttctggacctcagtttcctcagtagctggtaagaatgcactagccttttgatttgataagttataaattctgtggttctgatcattggtccagaggggaaataggttcctgtgatttttccttcttctctgtagaataaatgaaatctcgttgttagaacaagaaatgtcagatggccaaaaacaagatgaccaaatttgatctcagcctgatgacgctacaggttgtgctgtgatacagagtcctcatgggtaaagcagaaagagagtgggaaagagaaccaccccactctgtcttcatatttgcatttcatgtttaacctccggctggaaatagaaagcattcccttagcgatgaggataaaagaaagtttgtaattcaacagggggaagaaaatggagatttaatcctaaaactatgacttggggaggtcagtcatttacagttagtcttgtgtcttttgacttctgtgatagttaaccccactcactaccctgtttaagatgcatttggaataccaaagattaaagccttgacataagatctcatttgtagaaagtagattaaagaccatcagaaggaaattatttaggttgtaatgcacaagcaactgtgagaaactgttgtgccaaaaatataattccttctagttttccttgttcttatttgaaaggagaaaatcccactttgttcagcattttaagcttttgtgtatcaatcccatctaaaaactctcttcaaactccacttgttcagtctgaaatgcagctccctgtccaagtgccttggagaactcacagcagcatgccttaatcaaaagttttgccagcccttggacactatgggaggagggcaagagtatcagtttgttaaaagcaaaaaaaccacagtgtctcttcactagccatatttagaacagtggttaccatccaagactactctatcctgcaacactgaactctcaagagcaaatccacattcctctgcttctgtgtaaatagggcagctgttgtctatgccatagaatcacatgatctgaggaccattcatggaaagctgctaaatagcctagtctgggaagtcttgcataaagttttgcatgaagcaaacaggattaaatcaggtttggttccttcagccctctaaaggcatagggcttagcctgcaggcttccttgggcattctctgtgtgtgtagttttgtaaacactatagcatctgttaagatccagtgtccatggaaaccttcccacatgccgtgactctggactctcagtttttgaaagcagggttcctctgcctgctaacaagcccacgaggaccagtctgaatgtctttcctttacacctatgtttttaaatagtcaaacttcaagaaacaatctaaacaagtttctgttgcatatgtgtttgtgaacttgtatttgtatttagtaggcttccatattgcatttaacttgtttttgtaactcctgattctttcttttcggatactattgatgaataaagaaattaaagtgatagttttattggtttcctttcccccaattaaggccaaataaagttgtgagaacattacccatttacttcctaagagtggattggagtttcaggagccttacaaaggactgaagagtttctcctgggactgcagcttggatgggaagtttactcggggactggcagaacaagtttctttgaaaggatcatggatgatgggtctggagtagaaggtgatgacaagtcagagagtgtcttagtcccttcaggttgctataacaaaatgcctcagactgggtaattatagacaacagaaatgtattgctcacagttctgaaggctgggaagcctaagattaaggtaccaacagatttaatgtctgataagggcttgttgaagcttgtctgcttcaaagaatgcaccttcttgatgcatccccacatggtggaaagggtgaacaaactcccttaggcctcttttataagggcacgagggttaaacttttgatgacctaatcatctcccaagagcctcacctctcaataccattgctttgggggattcaattttatcatgaattttggggggacataaacattcaaaccatagcagggtgcattcctgtattgggaagatgttaaattaaatgacttctaaatcccccatacgatttaggagactaaatggcatcctgtgaggctgactgcagtggcctgtgagaaggcaaataaacatgggaaggtagtacagggaacatggaatcgttgccagggacaggctaaataaccttaatggcacttccttgatacacacattccatggggataaacatttccaagtgggctgaatgttggctggttaaaacctcttctgctccatcttggggacacatgactaatgttttccaacctgccattttcatatgtatcgtgcactctccacccccaataattctgcctcccaaaagagcatatagtcgatgaggtttaaggtttcttcagttcagtcatgtggaagtgttgctatcctaaaattatagctggatcactttgattggatttgggatataacccaaatactaatcaaatattaaaaggcaatcttttttgttacgtgattgctacagattactgatctcatttgtcacagtttgattcttcaaattttcattctcagaagggaatcttaaacccagtttgaagggtaccttgtccacaaccacttttaaattttggctaactactcccaaccttctactgtgttctgggaaaactttttctgctgttatgtatgtattcaggaagtgcaacattattaaaataacctaaactaagcataattcagaagttaagtttcctttcatcaaaatttaatattatgaattgtgcagagaagtatgttactttgatccactttattttagaacttctttatcaagttatcagtcctcttgaactatttctgaaataaggggaaggaaggaagggaaaaaatatgaatgtgtagatagatctaagcagatgccctcagagccctggaataatcctagccgggatgtgggacatgaaaacaactctggcctactgctgctgggggctgcttcatggtgtgacataggaagtaaaatgttgctgtatgaataggaaggagggtcttcctgtcaatgagaattaatgtttttctaatgatttaacttttttactgaagaaataatatgtatacgtggtaaaaatccaaattgtatcaaggaaaatacagtgaataaaaccatcctcttagagggtatgtccatttataaatttgcctatgattgcctatacagtcaaagaggttgcaccagtatgcatgcctgccgaaagtacataaactgagcatatctatttccctacatttttgcaaacattacaccttcaagttttttggcctctgatagaggaaaaatggtaactccttgttttattttttatattcattattccttttgtaagattaaatctcttcccatgaaaaattaaaaaaaaaaaaaaaaaaaaaaaaaa

SEQ ID NO: 3231 - DNA, 738 bp, Macaca Fascicularis
  misc_feature (1)...(738): n = A,T,C or G
cagaagtcacatgacatcaatttgtcccattattgctgatggtattttaatcactttttgaggtggtgcctgtcaggtttttataaagttactatttttaccttataattaacaagtatatttggaagagataatttaagatgatgtaaaaatcctgtttctcatcaaactttctactagttttagcatctattgatgattcatgactgaatcagttattacagtgatggttgtcaaatggtgattttctaattccatcatccattctatatttattagttggcattctattataagaaggtgcgggcnnnnnnnnnnnnnnnnnnnnnnnnnnnnnnnnnnnnnnnnnnnnnnnnnnnnnnnnnnnnnnnnnnnnnnnnnnnnnnnnnnnnnnnnnnnnnnnnnnnnnnnnnnnnnnnnnnnnnnnnnnnnnnnnnnnnnnnnnnnnnnnnnnnnnnnnnnnnnnnnnnnnnnnnnnnnnnnnnnnnnnnnnnnnnnnnnnnnnnnnnnnnnnnnnnnnnnnnnnnnnnnnnnnnnnnnnnnnnnnnnnnnnnnnnnnnnnnnnnnnnntagactctatctcagaaaaaaaaaagtgctttcccttctctcttatttatttattcataccagtgtgcattcatggattcttagtttagtcagtgagttataatctgtcactgtcattatttaatatattgcttttaaaatagtatatgaaatataaaactgtaacag

SEQ ID NO: 3232 - DNA, 743 bp, Macaca Fascicularis
  misc_feature (1)...(743): n = A,T,C or G
tagccaactgnnnnnnngctgaatgcctcgctccctccaagacgaggggcagggagggacaggaccgtcaggaattcagtgccttcaacaannnnnnnnnnnnnnnnnnnnnnnnnacagnnnnnnnnnnnnnnnnnnnnnnnnnnnnnnnagacgcgtggcctcgcgaggggcaagctaggccccagaggccctggaggtctccaggggcctggagaaggaaagaaggaggccctgctgcctgttcttgggcctcaggnnnnnnnnnnnnnnncagcccttgctttcggagctcctgtccaaagtagggatgaggagcctgctgggggtgccacggcctggctggtgggaaggccagcagtgggcggaggggatgcagccacttnnnnnnnnnnnnnnnnnnnnnnnnnngtccagctctggagaacagtggttgtctggggacttttgccactccttgtgccccgtgatctcccctcacactttgccatctgcttgtgctgggacattgttctttccggccaagnnnnnnnnnnnctgtcccctctaagagacacatgcagagtgggccccgggctggacgaagagctgcctggatgagaaacagctcagtcagtggggatgaagtcaccaggggaggagcctgtgtgtcccagctgaaggcagtggcaggggagcaggttctccgagggccctggcacccccacaagctgtccctgcagggccatctgactgccaagcca

SEQ ID NO: 3233 - DNA, 309 bp, Macaca Fascicularis
  misc_feature (1)...(309): n = A,T,C or G
cgttcacacattatcatctgagttttgcatagtgaacctgttacgagatgtctcttgacgtcgatgctaaaagtgttagaatctttacaatcaccagagtcattgaatatgctgtagtattgaatagtgccctgactagggggaggatttagatgtgctgcatttcaagccgtgtataatcatcaaaatggggggcttgagttctttagctacttgaatccaatttacttctgttaagtgatgcttttctaaccattatctggatggattttgtattcactatattgtannnntgtaatttgtacaaat

SEQ ID NO: 3234 - DNA, 2180 bp, Macaca Fascicularis
tagttccttggaaaaatgctcagaacttaattactactcacaaccaagttaatctatgaatccacattacttcattgagccactgtttccttgttttaaacattgtagggggaggtaattagactagaaaatgcccaaaaatattttcatcactgatatcctatgagtctgagtaagagttatgataaatttttatcccttcaataaataatagcacaaactaaaaaatcatttatgtgtaatctatgtgaatttttggagccctctaaaataatgattgaagagaaaggtgacagaaacttataactccattttttcccccatttgtggtcttcagttgtggaccaactgtgcttgatctctttcaaaagtgagatgtcattgcaaactcaggtataagaattttttttttttttagctagagcatgatgaatgttattctagcatgtgaccctttttgttgatcataaaatgaaaataacggcattggtttttgttttatttctaaaaaattgttaaaaatcaaattatctgccataattctgtattatttgaactgaaataatttcaccttagggattctgcaacagttactaaccattataatggcagctatatgaccgttctctcttcatctaaccctaatggatagagtcaggttctctaggaagtccattcagttactctgattctatgagattagaaggcagcatgatttaggactaacgtaaacaaagataaagaatagtgttaagattagaaataacattagaggagaatgaatataaattttaaaaggagacagatgatgcttcaaatcttggctctgtggctactgactttgtcacattagactaagtcactgatactcttttagcctatgttccttcatctgtaaaatggactgctgacatctaataactcacagagtagttgaaaaatttcaacgagataaatatgtagagctgtcaccattgctgtaatgtcatagactgcacaacaattacttttctttgcctgagaatcattaactaatataatcaggaattactacttgcctttggaacctgatgtttttgtaacttttgtccatattagactctcagaaactatcctcttgctctcctctccacatccctgcaaatataaacaatgacattgattcgcagactgtgctaagtcagaccagctggtgcctcagctgtagggaaatgagcccgatctttcaggacatcaattctcaatatttgttactcattagagcaattgtttgcatctttaagaatctaacgtttctttttattttcattttttagttatttccagtcaagaaaaaatagtatgtgcccaacctaagttatgaggactttgtttgatacaaaatgtgttactatttttaatggagtaaatacaaattgaagataccctgtatggccaggaaacaccatttcggaaagcccccaagtaaatgctagtgagagatgaatggtggggagagagcactgagactgggaaaatgctgcttgcatagcactttaggctcctagtgaggcagatcaagaattgtcttattatctcgatattgtgtaatatgtttcaaaaagcccatccggaacattattttgatttgtattcctttagaatcagcttcaatttcagtactatcttctatcattttatgttgttataaaagtgaatcaaatatttgtggcagactgtagatttttcttcatataagaaaaaaaaagactatgacgataaacaagaaagacaggcaagaatgagtttatgcccaagtgtttagggttatattgtatcttcaatactctctagttgtttctacactagaaacaactagagatcgtggagtttaaaaaaaaaaattaggttgaagtaaacgggaagtgatacaacgggttctagacatttttagtctgtttgtatgacgaagctgagttcttgctcacttaccttttcttcacctcacactcctccacccctcccccgcccccccccacacacacacaccacatacttgccctccagactgggagaaattcattactgtggtatactatctatcgtaccacttcttcccaaataccggcatagtagaggaattaattcccagagggaggagtaaaatttcctgttaaaaaaaaaaaaaaaaaaaggccaca

SEQ ID NO: 3235 - DNA, 450 bp, Macaca Fascicularis
ctcccctgttcattctgcattctgtagtcagttggctaagaagtgactcttgcaactaaaaaaattaagaaattcacttcctctctaggaggtgatagggttcctaatggttatcatatatgtatatcacaattcccatttgcttagaaagtctgattgcagccatgattttccataaggcccatgaagagttcaaggaatatgttataatgaaccaggccagagcaaacagaaaaacaagggtgaagggcaatggataaagaagtgaagaagcgggggggggacagaatagaatgatgatggggacacagagtcagctcaagacatcaccatccaatatgcattcaagaaaatggcacattgggggaacaagggtgcagttggtctttaaccacttttcaatgtctaaaaacatttgtttgtggtccataagatgaaacatcatttcaa

SEQ ID NO: 3236 - DNA, 735 bp, Macaca Fascicularis
  misc_feature (1)...(735): n = A,T,C or G
tcagcatccggtatgccttgtgtatacctgtatacaagttttaaagttgttggtttcatctcattaaataatagttaagnnnnnnnnnnngcagcaggaggatgtggagagtagcacaggtcagggtcaggtgacctgagttctatgaagggtagcagcaatagcaactattattgggtgcttacnnnnnnnnngcgctatgctaagtgctttannnnnnnnnnnnnnnnnnnnnnnnnnnnnnnnnnnnnnnnnnnnctcattttacaaatgaggaaaccgaggctcaaagaggataagtcacttagccaaaatgnnnnnnnnnnnnnnnttttgggtgagctccccaaaatctgtcttctaactcctaccctatactccctccactgggannnnnnnnnnnnnnnnnnnnnnnnntcatcccattgggcctcggtttaccattggaaaggacttgtgggcgaggttgaatgagcgcagcagatggcctgtggttatttagagcagtgcttccctggtggtttnnnnnnnnnnnnnnnnnnnnnnnnnntgtgtggcccggtgaaatggaggcggaaacagtttctaccttcacagggcctgactggagggggctgnnnacgatgcggaggtttcctgtattcaaacagactacccccccttcccaacgcacaaccccgagcacgtggccgtgggttcccagcgcctctcctccnnngcatggnctgacactga

SEQ ID NO: 3237 - DNA, 1513 bp, Macaca Fascicularis
  misc_feature (1)...(1513): n = A,T,C or G
cttagaaaaaaatagcagttctcttgaatttatcttctaataaccctctactcagcactgaccctgacataatatgagaggttagccacaggcccattggaaaatattttccaagtatagtatagaactataaaatgctttgaaattgagacatatatgttagccagcaatgttttcaattaatagagggatgtgtataccctgtgagaaggcctaaagcctaaaattaaagcagggcaggagacttcatctttcttagaaagcaaatttactgttctctcactagtttccatctgaatgtaccagctccatgtgagtttgtatgttaattgacattgtaaccatcctttattataagtgcattttcaaggtttatactatcctcatcagtagaacattgttgtcaagtttttaatttcagattgtcagacatccaaaccagaattgttccattgcctgtagcagataataaataattagatgctcttaaattagtggaccacagaaaatgaaggtgaattttttaaattcagtttatttataaactgaaccaaccccatgccagttcaatctggttctgtgcattttgctgagtgtcttccagatgccaggcaccacaccaatataggctatgtaataagcaaatgctgggcccagctctctaagaactcgcagttcagcaggaagacctatatgcaaaaataccatgtcagaaacttggcgaggtaatagaagaaggcgctgtgtgctttggggtaacaaagcacttctgtcaccatggagggatcagacaaagtgtcatgagtaaacactatttacctgtcaaaaaagaaaacagtgtcctaggaaggggattcaggtatgcagagaaaccggaagtgcaacagcagtgtcctttggggaaacaggtgaaatactaaggtatctgtggccagagacaaagctggaaggagacgcaggcaccatgtcatgaaggactttgtatgtctcgtattctctccaaaaaagttgagctgtgtcctgaaatactaataataacaacatgagctaacttgggggcctcactaaacccactttacatgatctaactcatataatgttcaacagctgatgaggtttcagcccaggtaagccactgtttgagtcatgctctgaaccacggttattccacccccaagtgaaaaggagccatagaaattgtatgaccggccnnnnnnnnnnnnnnnnnnnnnnnnnnnnnnnnnnnnnnnnnnnnnnnnnnnnnnnnnnnnnnnnnnnnnnnnnnnnnnnnnnnnnnnnnnnnnnnnnnnnnnnnnnnnnnnnnnnnnnnnnnnnnnnnnnnnnnnnnnnnnnnnnnnnnnnnnnnnnnnnnnnnnnnnnnnnnnnnnnnnnnnnnnnnnnnnnnnnnnnnnnnnnnnnnnnnnnnnnnnnnnnnnnnnnnnnnnnnnnnnnnnnnnnnnnnnnnnnnnnnnnnnnnnnnnnnnnnncaaaaaaaaaaaaaaaaaaaaaaaaa

SEQ ID NO: 3238 - DNA, 661 bp, Macaca Fascicularis
  misc_feature (1)...(661): n = A,T,C or G
ctcattttgctnntcccagtcattaaaatgttatgatctgtttctaacatatttagcatttcatttttaaaatgaaatgtaccattatcataacaaaggtaactattaatgttcccagaaacagtgatgtaaaggacttattcccagtcaatattaacacttaatcccactttcttttttccaccaaatggcctcagtactttgccaagagagtgaaatttggattcctcacagtactctcagaacacaatatggtatttgtcagctaactttccatcatgtcctggtaaaattgctcagttaaatgtaattggccatctacttattaaaaaagaacaattcaaataatctgtacagttaccataatttgacaacaaattactttaaatttagcaccaccttagaaattttcgtaatataaactactgattgaaatgtgtttatactttctatcatatttcaaaatgttttactttccttgcattaaggcaattaacacaaactacatgttaggatgaataatttaaaggatatcctgttgtttcaacataaaaaatggaaaagtctttataaatagaatacttatgatagccatctacgtattgaattgtttaatttacctaattgtgattttctgaatttaagatgttttcttactaca

SEQ ID NO: 3239 - DNA, 706 bp, Macaca Fascicularis
  misc_feature (1)...(706): n = A,T,C or G
agtgtgagtgnnnagctcaagnnncagatnnnnnnnnnnnnnnnngagacctgtttacttgtcttccaagttgagtnnngaggtggaataacttcctcctcnnnnnnnnnnnnnnnngctccctaggcaatggccccgacattgctttctagcccctcannnnnnnnnnnnnnnnnnacccgtgtgcctcaccctctatctgccactcactaaactcaggatcctaaaatctgccctcttacccattttnnnnnnnnnnnnttaaacgccaactacaatgaatttgaannnnnnnnnnnnnnnnnctaaactcaccttcctccacattttagccaatccaaccaactcagcagccaccttatcctcaaggatcttggatgtgcagtaattcccatctcccacccagccctcctgacactcgccacaggggaactttcacccggcacaacacggacagcgtcgcctagtgaacacacccccaccccacgccccaaagttcgaagttgagaataagccatttgctggtggactcggttcccacaggagggacgannnnnnnnnnnnnnnnnnnnnnnnnnnnnnnggacttaacatttcgcacgtcacgtttcnnnnnnnnnnnnnnnnnnnnnnnnnnnnnnnnnnnnnncaagtatacttagcccttactatatggaagaaaacatatttcccagttccgatgacc

SEQ ID NO: 3240 - DNA, 736 bp, Macaca Fascicularis
  misc_feature (1)...(736): n = A,T,C or G
gatcactgtnnnnnnnnnnnnnnnnnnnnnnagcagaccgaagcagcatgtccaagactgagctcctactattgccaccctccaaacccacccnnnntcagtttgaccnnnnnnnnnnnnnnntacatactgagaatcagctgtgaccctggatgcttccctttcccttacatcccgtaaccaatccatcatcaactcccagttatttcatttcctaaatttccccagaatctgtccctgtttctgcatccccatgtgggtcnnnnnnncggcctnnnnnnnnnnnnnnnagggtccactaatctgttccccgccctgcaccgatgccatcttccaagatagaagcttccaaacaagaccgctccatgcnnnnnnnnnnnnnnnagctaccatggctctgagaaagaagatgaaactccataggctggccgttgctccagcctcttctcctgccaccctctctgcccttggtcagcgtgctcctgccacccaggcctccttgctcttcctgggacagatgtgccctgctcctcccctcatccagtcccacttcttttccctgttaacttctaggcaacctccagatctcagctccagcatgccctccttggggactccccatttggaactatattttgtatgtgattctttgactaacatctgtttcttgactcaactgggagctctgtgaggctctcatcatcatatccccaggacccagcacacagaacctgat

SEQ ID NO: 3241 - DNA, 1976 bp, Macaca Fascicularis
agatctttgttggcgaccatggcttcggcttctcaaggcgctgacgacggcagccgcaggaaaccccgcctggctgcctcgttgcagatcagccccgagccccgcccctggcgaccgctaccccctcaggcccaaggtgcctgggagcccgcgcccgcgatggaccacgcagagggcgggcagccccaggtctcggtgttgagggacagtgggcctggggcaggggccggagtcggggaactgggggcagcccaggcgtgggaaaacttgggggaacagatggggaggaccccgagggtccctgtgccccccgcagggctgagcctgccgctcaaagacccacctgccagccaggccgtgtccttgctcacggagtacgcggccagcctgggcatcatcctgctcttccgggaggaccagcaaccaggtccctgcttccccttctctgtgagcgcggaactggatggggtggtctgccctgcgggcactgcaaacagcaagacagaggctaaacagcaggcagcgctctctgccctctgctacatccggagtcagctggagagcccagagtccccccagacctccagccggcctccaccgccccccctgagcgtagacagcatcctgacccatgggcagcgctgcgcagccttggtgagcgccggctttgacctcctgttggacgagcgctcgccatactgggcctgtaaggggactgtggctggagtcatcctggagagggagatcccgggtgccaggggccatgtgaaggagatctacaagctggtggccctgggcaccggcagcagctgctgtgccggctggctggagttctcgggccagcagctccatgactgccatggtctggtcatcgcccgcagggctctgctgaggttcttgttccggcagctcctgctggccacacaggggggcgccaagggcaaggagcagtccgtgctggccccccagccggggcccggacccccattcaccctcaagccccgcgtcttcctgcacctctacatcagcaacacccccaagggcgcggcccgtgacatctacctgccccccacctcagaaggcggcctcccgcacagcccgcccatgcgcctgcaggcccacgtgctcgggcagctgaagcctgtgtgctacgtggcgccctcactgtgtgacacccacgtgggctgcctctcagccagtgacaagctggcacgctgggccgtgctggggctgggtggtgccctgctggcccacctggtgtctccactctacagcaccagcctcatcctggctgactcatgccacgaccctccgactctgagcagggccatccacacccggccctgcctggacagtgtcctggggccatgcctgccacctccctacgtccggaccgccctgcacctgttttcagggcccccagtggccccctctgaacctacccctgacacctgtcatggcctgagcctcaactggagcctgggggactctggcatcgaggttgtggatgtggccactgggcgcgtgaaggccaatgctgccctggggcctccctcccgtctctgcaaggcatcctttctccgggcgtttcaccaggtggccagggctgtggggaagccctacctcctggccttgaagacctacgaggctgccaaggctgggccctaccaggaggctcgccggcagctctctctcctcctggaccagcagggcctgggggcttggccctcgaagccactggtgggcaaattcagaaactgaagccagcctcggcgggcccaaggtcccggagccaagccgtacccctgctgggggagtgccctgtctgaggagggttgtgggggagaacgtgggttgtgcagggtgaaactggggctggagggaaggaggagcctgctgtggttgggacgctgctgctgcacatttgggcttgaataaagaagtatttctggtgaaaaaaaaaaaaaaaaaaaaaa

SEQ ID NO: 3242 - DNA, 750 bp, Macaca Fascicularis
  misc_feature (1)...(750): n = A,T,C or G
taggatgggagagcannnnngcacgtccgtgtgagtcagnnnnnagcacaggnnnnnnnnnnnnnnnnngacagatagactaagctgtgtggcgctcttgccgccccttnnnnnnnnnnnnnnntgagaaaaatgcagccgaccactgcctgtgtttgtatagagcaaagcccagaannnnnnnnnnnnnnnnnnnnnnnnnnnnnnnnnnnnnnnagcagagtcctgattgcctgattcannnnnnnnnnnnnnnnnnnnncccctcccttcccccaacattgcctctcctacattctccttctaccctcaaatcagacaggcggccagagaggagtattgctcaatgcgtgctacgtgcaactcctcaggccttgcgccacctccatgctgagccctgaagcagggtgtcctgggtgcctgtgtgtcagctccctcctctctacctacctctgaccttgttgtgggtgagggtagccatgctnnnnnnnnnnnnnnnnnnnnnnnggcggagaactacttaggagtctgtagaccacgtgttgtcttccatggcctcttttctcctgctgtctgggtgagtgagcctgcaacgcaatgcccacgagagtaaatgcctcctgacctaccctgctcagcactgttctagtgtcttggccttgaaagaaaagcctaacttccnnnnnnnnnnnnnnntagtggcatggcagctatgaggcacctcctacatctgttttctggctgtggtga

SEQ ID NO: 3243 - DNA, 765 bp, Macaca Fascicularis
  misc_feature (1)...(765): n = A,T,C or G
cgcccgnnnngnnnccaagggannnnnnncnntcagacaggccaaaaaccagtagggaggtggtggtgatgctctttttaactcctttgcccaataagagggggtggctgcctggagccccatagccagtgtttcccacggtttctgttgctaaatggttgtagggtgagaagtgcaagaatgaagatgaagaccactgctcggtcagtctgcctctgagtgtcctctcaaataagtagatgaagatgaaagggcaactttgttttcttttnnnnnnnnnnnnnnnnnnnnnnnngggagagtccttactcccttccaacctctgttccagtgcaaaacccagaaacatgaacacggatacaattgtgggatttcattatctgtgtagtaggggtgtgtgtatgtgtttctagagtgagatttgtgttttctgcccttttcctctccagccgatgggctnnnnnnnnnnnnnnnnnnnnnnnnnnnnnnnnnnnnnnnnnnnnnnnagcctgtgaggcccagnnnnnnnnnnnnnnnnnnnnnnnttgacagctgaatgtttctgaagaactgctgccccatggtgagggtgggagcagcagaacagggaatgccagacacaggctggctgctgctggaaagtggggtgggacttccttcctcggtctggagaggcacaggtgtcaccagttccagccaaaggctcctcacaggttctgtgaatttttgtacaagtcttgtaatgatcgaatcaacttgtgcaat

SEQ ID NO: 3244 - DNA, 129 bp, Macaca Fascicularis
caaaaggttatgttcagttgatcttgggcaaaataccagcagcattagatgccttcgtctgttccgtcttttccaaaaacagtaaaaataaccactgtttgttgggtgatatgaaatttttaaagcgga

SEQ ID NO: 3245 - DNA, 746 bp, Macaca Fascicularis
  misc_feature (1)...(746): n = A,T,C or G
gtcaggaggcagctgtctggtcagaaggattccctttgtggcatctgacttnntcctcagcaggtcccaccaccctctcggcagcacttcgccatggccannnnnnnnnnnnnnntccctgcctccttccttgtccgaggtggctgctggcccagagagggtgtataaatcttcaggccagtggaggtagattggccttttatccacaggatacggaaactgaaatctggggaatccccaaacagcagccatagactcactggccttcattaaacgggagaggaatcacagaaactggggaagnnnnnnnnnnnnnnnnnatgagnnnnnnnnnnnnnnnnncaccattcatcattcattttttaattaggaaaagctccctaatgagnnnnnnnnnnnnnnnnatagnnnnnnnnnnnnnnnnnnnnnnnnnnnnnnnnnnnnnnnnnngaagannnnnnnnnnnnnnngccgggatcttcccccagcgtccaatttaatttgcaaatacgtaatgcagattccctgggtgccgtgaaagcccttcctggcatcattcatattgcttcccgtnnnnnnnnnnnnnnnnnnttctcctctgccnnnnnnnnnnnnnnncaacagtgaactgcccctccgaggacttgagtaagtggaaaaaacaaaacacaaactgcaatgtttgtttctaagtatttttgtattgtgtacattctgtatatttttgttgtaacatattattggag

SEQ ID NO: 3246 - DNA, 727 bp, Macaca Fascicularis
  misc_feature (1)...(727): n = A,T,C or G
tcatttcagtactgtgtacctccctggccaccatgctgcacgtggagctgccccacatcaacctcctttccaagnnnnnnnnnnnnnnnnnntnnnnnnnnnnnnnnnnnnnnctggactactacacagaggttctggacctctcctacctgcttgaccacctggcttctgaccctttcttccnnnnnnnnnnnnnnnnnnnnnnnnnnnnnnnnnnnnnnnnnnnnnnnnnnnnnnnnnnnnnctttatccctctgaacatccaggacaaggagagcatccagcgagtcctgnnnnnnnnnnnnnnnnnnnnnnnnnnnnntttcggagcccaagagcagcgaagcctagaggccatgatgtnnnnnnnnatgggnnnnnnnnnnnnnnnnnnnnnnnnnnnnnnnnnnnnnnnnnnnnnnnnnngcaccctcgaaccagtcagtggagcaggaagccatgcagctatagcaacaaggtnnnnnnnnnnnnnnnnnnnnnnnnncccagcactggggaaagtggaggctcctgaagcaggctgcagacccaagagcaagtcctcccagcgagagctggtgggctggcaaggggatattgagctctgcaaaggagtnctggccnnaaagccagacatggcgccaagcagaacacctacnnnnnnnnnnnnnnnnnnnnnnnnnnnnnnnnnnnnnnnnnnnnnnnnnnnnnnnnnntcctactcagg

SEQ ID NO: 3247 - DNA, 686 bp, Macaca Fascicularis
  misc_feature (1)...(686): n = A,T,C or G
actgcgggggctaggggaaagcgggggagtattgatcaaagagtaagccacacacggataatcagttgctagggatggaggtttgagggttcattatattattcattttactgttgtatatgtttgaaaatgtctataataaaaagctttaaaaaaaaaaaaagaaacannnnnnnnnnnnnnnnnnnnnnngtcctccctgttcagtggattttatccttgtttcagttggggtaggagttccaggaggtgcggattggaggttgtctaaagaattggactggcctttgtccctgcttcctgggagggagactttcagtccttgacatttccagggtaataggagtgtctttgttatttgtnnnnnnnnnnnnnnnnnnnnnnnnnnnnnnnnnnnnnnnnnnnnnnnnnnnnnnnnnnnnnnnnnnnnnnnnnnnnnnnnatgtgattagagggttgaaactttgagtcagcctgccctatgcggtgggggacnnnnnnnnnnnnnnnnnnnnnnnnnnnnnnnnnnnntcgatacatcatgaaaccccaataaaaacnnnnnnnactaaagcnnnnnnnnnnnnnnnnnnnnnnnnnnnnnnnnnnnnnnnnnnnnnnnnnnnnnnnnnnnnnnnnnnnnnnnggggnnnnnnnnnnnnntgctcgagacccttccagacctt

SEQ ID NO: 3248 - DNA, 340 bp, Macaca Fascicularis
  misc_feature (1)...(340): n = A,T,C or G
aaaaaaaaaaaagaaaaacacctgttgacatgagagaagtaaattccagaagggaaccaagaactcttcccttcnntggtgagtatttccattattccgttaagcgtttaatatgcattcagattacttttactaaatagtacaccataaagcttttgttatatattaaatgtaaagtgaaaggaatgtaaacatatgtattgttaattagtaaatatagataagtaatgacataatagatgaaaaagtcttattcagatgtatcacattcattttacattacccacctattgtcgcatggtagaatagttttttgtctctgaatatgtgaataacttga

SEQ ID NO: 3249 - DNA, 280 bp, Macaca Fascicularis
ccaccccacccgctagtgctgggtattcattactggtgggaagggacagcaggttacaatcaggaagtgtttctctctaagcatttctggtaaagtacttaatctcagaagaaaaggacgtagatctctgtggctccagtcatttgttgtgatttatttcctttttccatatatttattttcataccatcttttatgttcataactgtatattcttttccttaaagagagtgcctaaaattgtataagcttcaggcctcacataaaatctggctccacca

SEQ ID NO: 3250 - DNA, 735 bp, Macaca Fascicularis
  misc_feature (1)...(735): n = A,T,C or G
acagaaagttgaacagaaattgcaaactcatctcacttggatttgattgagtcaccttgaatgacataacaaattatagctttgttttcgtgcgtcatgcaatcttccacaccacgggaagttctgcaagcgttctttctccaggggcatttcattaatagcatgtcagaattatttttaatgaacatttgaggtacaattctataaatcaacatccttaaaatgtcatctgctaaacattcactgtgacagaaagtaggtattttagcaagatctatgttaatgctacttaattttagacatgcatttaaagcatacacggccaatagcccaagtatctttgaactgtgaaatcaacctcatatctcgtctgctgtagccccgcaagccagagtctgtgctctccatggccccttcttatcccttggtggccctgcatagataggggagttggcccctgcccaccccatgttgtattgccttatctccagcagctttgtaccgtcacacgtataagtggtgaacttacgtgtaaatacatgtgtacagatgnnaaactgcaacaaaaatgttccgtggnnnnnaccagttttctacattctgtgctgtttccagctannnaaaatgcgaactcacactacataaagggaaaannnngtattcatttcgtgttcatcaagnaatctctgctgtgtgttnnnnnnnnnnnnntgacnnnnngtatatatggtatgt

SEQ ID NO: 3251 - DNA, 863 bp, Macaca Fascicularis
  misc_feature (1)...(863): n = A,T,C or G
atggtggtgtatcaggntnnncatgggcaccgtcaccnnnngaaggcctgggcacccatgagaacctgtggccagcccttttcatcggctaagttccctgctgttgtgtgtggtgtcgtttttttaaaaacaacatataaaaaaacaaaataactggttctgtgtgtatcaacttaatttacatacaaatgagtgttgtgttgtgatttgcagtgttttgacaccgtgattggctttgtttgggtctctcttctttctgtgaaattaattgctgtgcgttttcactgttcttagagaagactctgagctcctggagttttcttgtctcacttctaccctgacccgctgggagcctaccccaccccagtccagccatgagggtatttccagcctattccaatgactggaacccttcttggaagaaaacgtctaatgtcggggacctagggacgcttccagacttgccctgtctggaaccctgcagcctggggcccaagcccgcctgcagctcaactttcccctgcaccctcaggacctagccccacagaccttccctgggagctgctcaggggtctccactgcgccctctaggggccaagcagggtnnnnnnnnnnnnnnnnttctgccagctttaaaacccttcannnnnnnnnnnnnnnnnnacatgcaatgaaaaacaccatatatgatagtcaaaacctgtgtacatatctccatgtacatatttatacatacacacaccttcctattataaatatatnnnnnnnnnnnnnnnnnnnnnnttccaagtttgtgtttttttaaatccttggaaatacgactttggaaacctttttcttcctttccctcttttctatgtgta

SEQ ID NO: 3252 - DNA, 361 bp, Macaca Fascicularis
gaggatcctccgtgagccaggcacaggggaccccagggctgctgtgagcacccaccttggctttccaggcccctctgtccagaggcagggcctggacctcaggctcctgcctggaccagggacgggagaaaagcactgggtgtcttctgagcagccagcaggaggtcgtgccggttccccgagagcaggtcagcccacaggcaaccttgaggcagctggcacctcctctcttcccaagcagggcttgccccagggcacaaggctccccagccacagccccctcttacttgccttaaaactggagagaggaatctagtatttgcccttagcaaaatatttaaaaaccgtacaaaaaggcatg

SEQ ID NO: 3253 - DNA, 719 bp, Macaca Fascicularis
  misc_feature (1)...(719): n = A,T,C or G
ttgcaccatgaagaatataaagaatttattcaagcacaaaacataaggatggaccacctggaaacaccaaatccaaagtaatagagatataattctgaaatagggaagttcagatttcatttatataggcagagttaaaggagcttatagcaatgctctgcacaacttcaggagaatagctgaaggcagctgttaaccttgaggcagagagtgaggagtatgtgcaagggagcaaggggaaattatcttgatcaggcttgtttgtttgaagttatcctgaaattcacctttgaacatccatgtgtgtgacattccctgaaaggggaacaataaatgttaattacccacagactgtgtttgccccaggctttcagcattctgcctgcattgaataaaagcaagcagctccagcttctcggggctgcactttggccacttgagccaggtgactcctagctgctcttacacactgcatacctgtgtgtgagtactctttccatccgtcagtcagtcagtcagtcagggtctgcgggacagatctggcaggtggtgcccagtgtgaggaacactgcaacggatctggaccaaaccctcgaaaattaatgtgaagtgactgctcagtaagtaattggtccccgctggggatttccaagttcaaggggattctcaagctagggtttcatcatgggacaacagttatcagctnncacagcacagta

SEQ ID NO: 3254 - DNA, 177 bp, Macaca Fascicularis
aatttgtgctttgtggggacacatttatagagcgtgtgagagctcctttttatataaaaagatcaaaacgcagtatttgcgcacaggtgagaccgtgtgggggggtgtcactgtacccaaagtatacgccccaccccgtgcgcatatagtgtttctcgagattgtgcgcataaaaat

SEQ ID NO: 3255 - DNA, 2018 bp, Macaca Fascicularis
aagccggctgtcggtgtccgtgtcgccgccgccgcccggcatcgtggagctggggccccctttcgcctgggagttttgtagtcgcctagggtcagcggtgacatcccaaagggcaggcccggcagccgccatggtggccaaggattaccccttctacctcacggtcaagcgggcgaactgcagcctggagctacccccggccagcggtccggccaaggacgccgaggagcctagtaataaacgggtcaaacccctttccagagttacgtcactagcaaacctcatcccgcctgtgaaggccacgccattaaagcgcttcagtcaaaccctgcagcgctccattagcttccgcagtgagagccgccctgacatcctcgccccccgaccctggtccagaaatgccgccccctcaagcacgaaacggagagatagcaagctgtggagtgagaccttcgatgtgtgcgtcaatcagatgcttacatccaaggaaatcaaacgtcaggaggccatctttgagctttcccaaggagaagaagacttgatagaagacttgaaattagcaaaaaaggcctatcatgaccccatgctgaaactctccataatgacagaacaagagttgaatcaaatttttggaacactggactctctaatccctctacatgaagagctccttagtcagcttcgagatgttcggaagcctgatggctcgactgaacatgttggtcccatcctcgtgggctggctcccttgcctcagctcgtatgacagctactgcagcaatcaagtagccgccaaagctctgctagaccacaaaaagcaagatcaccgagtccaggatttcctacagcgatgtttagaatccccctttagccgcaaactagatctctggaatttcctcgatattccaagaagccgtctggtaaaataccctctgcttctccgagaaatcttgaggcacacaccaaatgataatccagatcagcagcacttggaagaagctataaatatcattcagggaattgtggcagaaatcaacaccaagactggcgaatctgaatgccgctattataaagagcggcttctttacttggaagaaggccagaaagactccctgatcgacagctctcgagtcttgtgttgtcatggtgaactgaagaacaatcggggcgtgaaactgcatgttttcctgttccaagaagtgcttgtgatcactcgagccgtcacccacaatgagcagctttgctaccagctgtaccgtcagccaatccccgtgaaggacctcctgctggaagacctccaggacggagaagtgaggctgggtggctccctgcgaggggcattcagcaacaacgagagaattaaaaacttcttcagagtcagtttcaaaaatggatcccaaagtcagacccactcgctacaagccaatgacaccttcaacaaacagcagtggcttaattgtattcgtcaagccaaagaaacagttttatgtgctgccgggcaagctggggtgcttgactccgagggatcattcctaaatcccaccactgggagcagagagctacagggagaaacaaaacttgaacagatggaccaatcggacagtgagtcagactgtagtatggacacaagtgaggtcagcctcgactgtgagcacatggaacagacagactcttcctgtgggaacagcaggcatggtgaaagcaacgtctgacagaagcatgcgcatttcggaaagcaggcctgcgtcttacctgtacagtatttgcattccgcagatggaacggtttggagaagcactttttcatacttttgtgaaaatatacatgttgacccagtctcttgtatctgtacctttgtccctagtactgtaactgccaatctgtctgtgtaagctggaatctgtggcaactattaccctgtgttgtatttcacaagtgtctggatggatggagaggtactcaaacaagttactttcaattgtcctgctggatttaaaaaaaaaaaaaaaaaaaaaaaaa

SEQ ID NO: 3256 - DNA, 705 bp, Macaca Fascicularis
tgtgttttgtaatcagctgtcaggccaaatgtctgacccgaaagagaatgtatttacactcgtgctgcgttcagcagcccctctgtgttctgtgtgatttgttttacttttccttttttaaaaaaatatatatgcagggaagtaatggtactgatagtgtatgttttctatgtggttcaaatatgaatttcaaacacaccaagccgctaatgagatagcagcttttttctgggacccagagtcacaaccaaattgatttaagaccagacccaagacacctttaacaataagactgaaaggaaaaaggatagggaaaaagcttatttaaagaaattgtcaacaccaaacgtagaggggaagaaccacaaccaggcataataccaaactggttccgggggaaacaaggctttggcattccactcgctccagcgcttcctccaaaacccaagactggccagggtgctgtcaccgtgcagtctttgattgcagccattcagtgcccacgttttgccttcttgtttcagaagagcacgtggtcacaacaaagtattttctttccctccaaagccttttgtctccttgtgccactttttatcattaggaaaagatccaggtgcttgtgaaaagaaccatgaatgcaacaagggaggctggtcctgttgctgtcgccgattaaatttttaacttttatttattatttatgtc

SEQ ID NO: 3257 - DNA, 721 bp, Macaca Fascicularis
  misc_feature (1)...(721): n = A,T,C or G
ttacagaagattgttcnttccagttcaatttaacagcttcagtgaagttagtataatgataagaaaaaattgactctagctattattccaagtgaaattcatgcagctgagtcctgctgcatcctgggagtaaagcattaattcaaatgaggagtagccagtcctagcactgtagatgccaactttaccaaccaagatatggtaagtgtgtgacattcagctagcattgatctgggcacttagtttgctaccacattgttcccttcattgattaaactgtaaataacataacactttaaggcagctaagcaaatattttaataagccatgaaaggcaagataccagaggaaatctgtatattcagctatttggagaacttgtgttttccacaaattaaactggagatgtcatttgaaattttcttcccttaaacatgctgtcacaacatggattcctgctcatggatgtctttctaggcttataaatacacgatgtgattgctataattttgtgaaattttgttcagcaattaatagtgacttcagcaatatgtgctaagattccaaggcagaaataaatgtataaaggatttgagcctgtgtgtgtaagaagaaactcttcagtcatatttcctaaattcagtgtaagtacctcgctgatttagcactggagttattccttgaatgtgtaaataatgatgttctattctgacctaatgaa

SEQ ID NO: 3258 - DNA, 750 bp, Macaca Fascicularis
  misc_feature (1)...(750): n = A,T,C or G
tatattaggtactcaataaataattgnnnaataaataataaattattacattgatnnngtgacgagcgaatgaaattatctctttaaaaagtgaagagtaattttacataactcatgtttttcaaactcagctagattatatgcatgtctgaattattcagatgttgcaactccagaaagcaatttaatctattctcaaaatatttatgaagtgaaaatgagcaaaaaaattctgttatttgacccttgttaatggcttagtgaaagaaagtctgtctttggtaattttatcactgatattgtttgttctgaaacagtggtcagtaagcaatggnnnnnnnnnnnnnnnnnnnnnnnnnnnnnnnnnnnnnnnnnnnnnnnnnnnnnnnnnnnnnnnnnnnnnnnnnnnnnnnnnnnnnnnnnnnnnnnnnnnnnnnnnnnnnnnnnnnnnnnnnnnnnnnnnnnnnnnnnnnnnnnnnnnnnnnnnnnnnnnnnnnnnnnnnnnnnnntggtccattacagaaaaagttagccaaccctttgtgtaaaaatatttcttattttatcacgtatcatcaatgaacattaaatataatgaatgagactgcttcttgaannnnnnnnnnnnnnnnnnnnnnttacctggccttgatcgattgttggaatcatctgacctcnnnnnnnnnnnnnnnnnnnnnngtgtgtaacccaatgaagctaaaaannnnnnnnnntttaattcagcttcca

SEQ ID NO: 3259 - DNA, 2109 bp, Macaca Fascicularis
aaaaaaaaggccgcggcgccggagcccagcgccgctgcctgggttcggttacataaccggccggctgcacccccgctcgctttcctgcgccgccccccaaagttggcagcccttgtttttggccctgtcccgaggttgtccgttgagattatgtaactgaacaatgggcctcgtctggaactttttcatcttacaaaggggccgatcggcccgtccaggtggccgaggatttgccgcctgttgagtccgggccgccccgagcgtcagcctggagtgcggcaccgataacgcggtttgcgaggatgctggagggtactggctcggccacctgacacctcccgagccatatggtgccttttaaacgcggtgttcgggcctgtaatttgggcggcgcaggcagaaggagttaaaaaaaaattgtcctgcgctgatcgtgtcgtgtcgtgtcgtgtggcgttgatggggggaaagtctggggcatgcagggagactgcgcttggacttgggagtaaaggctggccttccaagcatttgcagtcctagaaactcatccttatccagtttgctctccaaagctcgaggaattgattccagctctgtgaagctccggggtagttctctcttcatggatacagaaaaatcaggaaaaagggaatttgatgtgcgacagactcctcaagtgaatattaatccttttactccggattctttgttgcttcattcctcaggacagtgtcgtcgtagaaagagaacatattggaatgattcctttggtgaagacatggaagccagtgattatgagcttgaagatgaaacaagacctgctaagagaattacaattactgaaagcaatatgaagtcccggtatacaacagaatttcatgagctagagaaaattggctctggagaatttggttctgtatttaagtgtgtgaagaggctggatggatgcatttatgccattaagcgatcaaaaaagccattggccggctctgttgatgagcagaatgctttgagagaagtatatgctcatgcagtgcttggacagcattctcatgtagttcggtatttctctgcgtgggcagaagatgatcacatgcttatacagaatgaatattgtaatggtggaagtttagctgatgctataagtgaaaactacagaatcatgagttactttaaagaagcagagttgaaggatctccttttacaagttggccgaggcttgaggtatattcattcaatgtctttggttcacatggatataaaacctagtaacattttcatatctcgaacctcaatcccaaatgctgcctctgaagaaggagacgaagatgattgggcatccaacaaagttatatttaaaataggtgatcttggacatgtaacaaggatctccagtccacaagttgaagagggtgatagtcgttttcttgcaaatgaagttttacaggagaattacacccatctaccaaaagcagatatttttgcgcttgccctcacagtggtatgtgctgctggtgctgaacctcttcctagaaatggagatcaatggcatgaaatcagacagggtagattacctcggataccgcaagtgctttcccaagaatttacagagttgctaaaagttatgattcatccagacccagagagaagaccttcagcaatggcactggtaaagcattcagtattgctgtctgcttctagaaagagtgcagaacaattacgaatagaattgaatgccgaaaaattcaaaaactcacttttacaaaaagaactcaagaaagcacagatggcaaaagctgcagctgaggaaagagcactcttcactgaccggatggccactaggtccaccacccagaatgaccctaattttcaatgcaaattcaaaggtctctggagtaaggaaaaatatctatgtatgccctaggaagattcaccaggaaaagatggcatgttgtgtccaaacttcattaaactaagaggcaaagaaacttcagccagtccagtccatgaagaaaaatacctcaaaggaacatttacatcacagttcacattgtttagttttatatggttaataaacattttgaagagcaaaaaaaaaaaaaaaaa

SEQ ID NO: 3260 - DNA, 669 bp, Macaca Fascicularis
  misc_feature (1)...(669): n = A,T,C or G
gannnnnnnnnnnnntgaccatttgntgnngagcgctggcctctgcattgcctcttgattaccccaaaacagacacaaagggcagaaggtgaggtctcaacaagataccaagcgaattgttcnnnnnnnnnnnnnnnncagcttggaagatgattgcatgcatcctcataatcatgtattcaatggactgtaatttatgatttttcaaaatcatgttacaagataagacatattctacttagacgtgaaactgtacaagtgtgtacaatgtgaccttctctaaatgtggtagattcaaacaaagatgctatatagacaagtagaattaaacctgcgaatccgtgtaaaaattcagtgaagacatgcactgctggcttctttacttttttttttttctttttattgaaacccagtcttcatttagttgctaaggctttaatacattttgaatggcaccaaaacaaaataagtcaaaatggacagtccttttttttttggagaaaatatttgaacaagtgtctccaatgtgttgtgttttgtcatgaaccttcattttcttcacttgtaattagaacttgctacgtgtttatgaaactgaaagctcaacaggggagcaataaaccgagaaatcatgagaaatgtcnaatcccacaggaaacctgtatgccg

SEQ ID NO: 3261 - DNA, 728 bp, Macaca Fascicularis
  misc_feature (1)...(728): n = A,T,C or G
gagaatgcacttactggctcannnnnnnnnnnnnnnnnnnnnnnnnnnnnnnnnnnnnnnnncacagttttcgaaggaggatgccctggagacgcacaggcagannnnnnnnnnnnnnnncatngnantcttctgtctgctgtgtgggnnnnnnnnnnnnnnnnnnnnnnnnctgcagcagcacatggaggtccacgcgggcgtgcgcagctacatctgcnnnnnnnnnnnnnnnnnnnnnnnnngccacacggccctcaaacgccacctgcgctcnnnnnnnnnnnnnnnnnnnnnnnnnnnnnnnnnnnnnggcagctgcttccgggnnnnnnnnnnnnnnnagagccacaaacgcatccacacgggtgagaaaccctannnnnnnnnnnnnnnnnnnnnnnnnnnnnnnnnnnnnnnnnnnnnnnnnnnnnnnnnnnnnnnnnnnnnnggtgagaannnnnnnnnnnnnnnnnnnnnnnnncagcgctcccgggactactcggccatgnnnnnnnnnnnnnnnacgcacaacggcgcctcgccctaccagtnnnnnnnnnnnnnnnnnnnctgccccagcctctcctccatgcagaagcacatgaagggccacaagcccgaggnnnnnnnnnnnnnnnngaggatagagaagacgtacctctacctgtgctacgtgtgaagggaggcccgcggcggtggagccgagcggggagccaggaaagaag

SEQ ID NO: 3262 - DNA, 1037 bp, Macaca Fascicularis
  misc_feature (1)...(1037): n = A,T,C or G
tatttaatgccccaaagcacaagagtagtaagctggcatattattataattgttctattttattattgttgttcatgtcttactatgcctaatatatatgttaaactttatctcatatatattaaactttatcgtaggtatatatatatatatatatgtagggaaaaacagtatatagagggtttagtactatctatagtttcagataatccacgggagatcttggaatatatccctactgataaggggacactgctgtagctttgtggagggattataagagaatttggaatgtgtgtttatccctaactgtaatgctgaagtgacagaagacagtcatactgaccatcaaaatataccttgcctccattgtcagatacagtagcttgattgaacagataaggcatttctcttcaattccatcaacatttttgagttgaatatttaacttttaaagtaagaggtcttaagctaacaaaattggcagatactgtgaactgatagtgaaaaatctgtttcctttttgtcctgggtatacagcaagactatatttcctagcctcacgtgcagttagttgtaggtgcaaaactgaattttagaaagtggaatggatgtatttctatttttaaggttttgagaattctaatgctttctcccagttttttctctttgtaccaattggatactgattacaagcttgtaagagatagtggaatcggctgggcacgnnnnnnnnnnnnnnnnnnnnnnnnnnnnnnnnnnnnnnnnnnnnnnnnnnnnnnnnnnnnnnnnnnnnnnnnnnnnnnnnnnnnnnnnnnnnnnnnnnnnnnnnnnnnnnnnnnnnnnnnnnnnnnnnnnnnnnnnnnnnnnnnnnnnnnnnnnnnnnnnnnnnnnnnnnnnnnnnnnnnnnnnnnnnnnnnnnnnnnnnnnnggaggttgcagtgagctgagatcatgccattgcattccagcctgggccacagagcaagactttgtctaaaaaaaaaaaaaaaaaaaaaaaaaaaaaaaaaaaaaaa

SEQ ID NO: 3263 - DNA, 710 bp, Macaca Fascicularis
  misc_feature (1)...(710): n = A,T,C or G
ccgatggtcccggcaccccctgcttcctccctctgttgtctgcctgtgtgacacacatcaatggcaataacttcttccaactcctcgcagaagtgggagaggcctgcagcctgcaccgggaggggctttcctctctcttgctccccgcttcattctgttttggnnnnnnnnnnnnnnnnnnnnnnnnnntcattccctcgcctcccctagtggacggaggcgggggtcttgccttttcaattcctgtgttttggtgtcttcccttatctgctcccctgaatcacctgtcccggtcttgctgtgtgatgggaacgtgcttgtaaactgcgtaacaaatctactttgtgtatgtgtctgtttatgggggtggtttattctttttgctggtccctagaccactttgtatgaccgtttgcagtctgagcaggccaggggctgacagctaatgtcaggaccctcagtggtggagcctgctggggggacccagcnnnnnnnnnnnnagtggttgagctcctatttggcctcctctttttttttttttttcccccaagtaatttgtgtgtatttctaactgattgtattgaaaaaattcttagtatnnnnnnnnnnnnnnntgttgtgagatgaacctcctgtaacttctatctgttcttttttgaggctcagggagaaactagcatttttttttttccaaaactactttttgtcac

SEQ ID NO: 3264 - DNA, 732 bp, Macaca Fascicularis
  misc_feature (1)...(732): n = A,T,C or G
aatgtgcacaggtacacttannnntttttttagtttttccnnnnnnggnnnacaacattgtgatctgtactacaggaaccnnnnnnnnnnnnnnnnnnnnnnnnnnnnnnngtacataaaatgtatctaaatattcataatgtggggtgggtaatactgtctgtgaaataatgtaagaagcttttcacttaaaaaaatgcattactttcacttaacactagacatcaggtcgaaaatttgcaagattgctatagtacttatttcagnnnnnnnnnnnnnnnnnnnntagtgttgaagctaaaaatagctttatttatgctgaattttgatttttgtgagaaatttttttagttctaatcattggtgatagcttggagataaataatnnnnnnnnnnnnnnnnncagttcattattcctataaataagaattcagtgagtttaaagagaatggtggtgttannnnnnnnnnnnnnnnnnnnnnnnnnnnactatttatttgttacattattccatttgtattttaggtttccttttacattctttttatatgcattctgacattacatattttttaagactatggaaataatttaaagnnnnnnnnnnnnnnnnnnnnnnnnnnnntaagtttgaaaatgtaatattttgataatactgtactataactgtcacacaaatgcttttctaatgttttaaacttgagtattgcagttgctgcttgtacagaggta

SEQ ID NO: 3265 - DNA, 1686 bp, Macaca Fascicularis
  misc_feature (1)...(1686): n = A,T,C or G
ctgcactttataatcccgtctgtaatctagaaatcatttgctccaacatccctatctagcatcagttgaatgactactttgtgaagttccattcatgccaaccatgcaattgctcctagattgaggtttattttattgacaacttgttacccattatagcttcttgttacttgcacgggactctgagaactttattacagttagactttcacattgttttggtgaaatcttggggctgaacaaattattccgccagttcttctgacatgaggcaacacctgttaccatttgttatgcccgattagccttgagggtgccaagttcacaacctgcttgtgctggtagttaatgcttacaaaagaccccctttttcctctgctctgaactttctctcttctctcaagtcatcatgccgcataactttccggaccaccaccatcagtttattttattttttctgtgtgccatttttaatgttcttcatatacaaagacatctgcctgtgtttacaatctttaatcccaactgacacgatgatctgattgtatatacaataaatacttatgatcttatgtcccttattaatagaataactgggacaccttgcatattcctgagggttttgctacagtaatgcaatcccctattccatccttaatatcactcttcatgatacctgtgatctctattcctatatatctctcttttctcttctataatcctagagttcatgatgattgtatatcatcatggccaataatttatatcctaggatgattataaaagcaatctcttcagctgggcgtggtggtgcnnnnnnnnnnnnnnnnnnnnnnnnnnnnnnnnnnnnnnnnnnnncacgaggtcaggaaatcaaaaccatcctggctaacacagtgaaatttttagtagaannnnnnnnnnnnnnnnnnnnnnnnnnnnnnnnnnnnnnnnnnnnnnnnnnnnnnnnnnnnnnnnnnnnnnnnnnnnnnnnnnnnnnnnnnnnnnnnnnnnnnnnnnnnnnnnnnnnnnnnnnnnnnnnnnnnnnnnnnnnnnnnnnnnnnnnnnnnnnnnnnnnnnnnnnnncaaaaaaaaaaaaaaaaaaaaaaggtgctacttagattgaaacctcagctatgtatctctcctacaaactaaaagctaatacttagctgtctcagaatgtactgatgtcacaacccagagaaacaggtcagagatggagctatttatttgttcttttgttccagaatatgtttgcatgtcgattttgtttttctcatagttgcaataatttattgtaattatggcttcttattggtgagacaaaattattaaatgatatgaccaaaattattaaattataaggaccnnnnnnnnnnnnnnnnnnnnnnnnnnnnnnnnnnnnnnnnnnnnnnnnnnnnnnnnnnnnnnnnnnnnnnnnnnnnnnnnnnnnnnnnnnnnnnnnnnnnnnnnnnnnnnnnnnnnnnnnnnnnnnnnnnnnnnnnnnnnnnnnnnnnnnnnnnnnnnnnnnnnnnnnnnnnnnnnnnnnnnnnnnnnnnnnnnnnnnnnnnnnnnnnnnnnnnnnnnnnnnnnnnnnnnnnnnnnnnnnnnnnnnnnnnnnnnnnnnnnnnnnnnnnnnnnnnnnncaataaaaaaaaaaaaaaaaaaaaaaaaaaaaaaaaa

SEQ ID NO: 3266 - DNA, 741 bp, Macaca Fascicularis
  misc_feature (1)...(741): n = A,T,C or G
gacggttggttcacacaaaccacgtgaaggtgagaggccctaacaacactgaatccagaaacaggagccggagaacctagggactgtcacaccgttttgaaaagaggcaccgctctcactgaacttcttttctctgctacgtccctataaccttgacagtaagtggtggtgtcctgggctccgatcagcagtaagcatcagcctcaaaggactatgcccttgacaggcttccgagtgccctgggcagtggctgggcagnnnnnnnnnnnnnnnnnnnnnnnnnnnnnnnnnnnnnnnnnnnnnnnnnnnnnnnnnnnnnnnnnnnnnnnnnnnnnnnnnnnnnnnnnnnnnactgagtcctactnnnnnnnnnnnnnnnnnnnnnnnttttcagactnnnnnnnnnnnnnnntgccaccggccagaagcccagggtgtcgtcctccacccctccctttcccacaccctcagcgtcgaatcactcacccagccctgccagttctatttcctcaccctgtcttggggcagtcccgtttttatacccactgcccaggctgtgctgcagacccccagcagggctccccgcgcatggctctccgctccagcccctccttggagctgcttccatcatgttcctgctnnnnnnnnnnnnnnnnncattgcaaagctgaggccacttgttggagaccaggagttcgagacnnnnnnnnnnnnnnnagcaagacaccgtctctacaaaaa

SEQ ID NO: 3267 - DNA, 627 bp, Macaca Fascicularis
  misc_feature (1)...(627): n = A,T,C or G
ctgtcagcttacagnntngggaacagaggccagctgggatctgccagaggacagagaacatggtatcttgcagggccctgcctcccaagccccacccttacaaagccaagtaccttttcagctttttaactgcccccagccaggcccatggaggcctgtgtcactctggcacgagctgccatcaccagccacccacacacccccccagcacacctcgcatgggaccacagccccagccgcagctgcgctaccaagggccaagcacaaaggcnnnnnnnnnnnnnnnccagtccctggtggccaggcctccccttgccaagccactgccaccccatcctgtgggaagtggccccggccatctcctctagaccaacacaggcagccccagggtccccagacccctgcccagatcagcaggtctgtagccccaacatctgcttcctgttgcccaatccaaaatcgatgaaatgggggctcctctgggctgggccacattcacattcccctccccctgtggcccagtgaagcctctggaccccaggctctgccctgcacccccctcgtcagaagtacatgaggggcacagacacccggcagaggtgagcacacagccttgggcatggtcca

SEQ ID NO: 3268 - DNA, 732 bp, Macaca Fascicularis
  misc_feature (1)...(732): n = A,T,C or G
gtgagctgctgcccaaacggcgtnagcagaacccccggaagccccgcgggttggtgaccacnnncaggtcctgccagggagacgcaggggggaagttggctaattgctgctttcaggccctggaaatcagtcgccaaggcccaggagaaccccagtgagtccgtccagttgaggcagagaggcaataacctcccactgcnnnnnnnnnnnnnnnnnnnnnnnnnnnnnnnnnnnnnnngctcaggaacacgcggcctcnnnnnnnnnnnnnnnnnnnnnnnnnnnnnnnnncttatccgagtccctaatgaaacgacttgtgcgacaatctgtctgtgccttacgaaagtgtctgtgcactttttatcctttttaaaagcaacttttaaaagtggatggggatgggggggctggcatacgtggtagggttctannnnnnnnnnnnnnnnnnnnnnnnnnnnnnnnnnncctgtttttgatgttggagtgatgaagtgtacatccccccaccccacacaccactacctgtgtacagaccttttaaaacatgtcttcttttctgattcaatactgtgacctctccaatacagtctaatccttggggatctgtaatcaaagttttaaaacctgggatgtgggttgggaagggtttgcactggtcttgcgtgttgtgcttttctgtgttgtgtgttttgatttttgtctgtttttatctgttttatattgacataa

SEQ ID NO: 3269 - DNA, 3116 bp, Macaca Fascicularis
  misc_feature (1)...(3116): n = A,T,C or G
tacgagctcggccggcaaccgagggacccgcgtccagagcttcagcgtccgttggatttttccaagagaaagttcgtggagttccttacactgtagatgtggatcagatatgatgattcagtagaagagcacatgtcaggggcagtggaggctggctgctgaaggatgaacggagaggaagaattctttgatgccgtcacaggctttgattctgataactcttctggggaattttcagaggcacatcagaaagtcacgggaatgattgacttggacaccagcaaaaataataggattgggaaaattggggagaggccctctcaagagaatggaattcagaaacacaggacgtcactgccggctcccatgttcagcagaagtgatttcagcgtgtggaccattctaaagaagtgtgtcggcctggagctgtccaagatcacgatgccaatcgccttcaacgagcctctgagcttcctgcatgtgagacagagtgactgacgttgttgcagcgtctgccaggaagggcgcggccccgggggtggaaggcagcacccagttccttctttctgtgctgtcgacggagtggcgggtgatgaagggcgttccctggaagtcctataatctcagacacactgcttggagaaaattgaaaaatcacacggaacaaatggtgacagaaaccaggtgcccaccgccctccacgagaggccgtcttctccggcgcatttcgtaactgaagctgttcctgcccgtcctgtggattatttacagtctgtggctgcttttgctgtttcggccgtggcttcccagtgggagaggaccggcaaaccatttaatccactcttgggagaaacgtatgaattaatcaggtaagggaaaaaggcccatcataaatatcttgtaaatggaattccttggatgacagatgagtttgattctttcactagcattgattccactgctctgagaataaactgtttgaattaagagctcactaaagcgtttggatgctgtaggcgagatgtttcacacacatggggtgttgtgctaacagtgccacggtgtctgagtgagtgtaaagcattggcaatgagatattttagtgtgttcgactcaagcgtggagacagcgtgtaccgtagacgcttccgtgtgtgtgcaacgtctgtgaaatgtgtaggattgttgtgagcttcaccgaaaatggaaataggtactaatgagcaaaactaggctgttttaccaaagtattcagtgaatgctattgaaaaagcaggtaaatccggagacaggaatgattgcaaagaggagtttcactcccaaggccacgtttgccaccacacagcctccccagagttttagcaatggtcagacggccctggccaagggagagttaaccagaccatgcctcatctccagacatccctgaaacttcttcctatggaactttcttctaggcagcgttgctgtcccttcctagagtcccctcagcttccctcctgtctctggtggccctcaccttacagacctgagactgactccaagtcccagaactctgaccccagaggtccagccaggccccatatcacgttgtctgcggctgggcctctggaaggactggttggggttctcttcacccacctggttgccccggggactgctgtggttattcacagaatcatcctgagattctgccccggtgacagtgcctacccaaaccaacaaaggaagtcagaagcaggccagaccgcagcatgagtgcggcagtgtggtaattcctcagccatcaagcagcctggctggggctccgggtggctgtggatgagagaatagatgtgtgtggcttccttcagggccgtttggtgatgtctaaaatgatttttattccactgcccgtggaccccctcattctcttgtagatgcatgtgggtgcccacggacagatgtgtagggagagtcagcggagcacagttgagcccctgtctctgtgacagggctaagctatggtactgaaggagggagaggcagggcactctcagctgcacccttcactcctccgactgtctggtagcccagcacacagctcgctccgcctgcccggggagaaggagcttgctggtgggacgcccttcactcctccgactgtcgaggtagcccagcacacagagctcgctccgcctgcccggggagaaggagcttgctggaggggcgtgggtggttatctagacaagcctgctgtgcagaatgcaagctgtttgctacaggctgctgggctgcacgcctccctgcccaggaacagagtgcagacgggagggaaggcaggctcctttatcatcttgttttattatttttctatgaaaaagggagttgagccaaaacaattagcctcttatttggattctggtttagttgatattctgttgggttattttattatgaagtctgtttgttttttaattataagaatgtgctccttatagaaaatgtgtaacattgagaaaggtagaaaagataaatcaggcataatcccataaaagacaatagctgactannnnnnnnnnnnnnnnnnnnnnnnnnnnnnnnnnnnnnnnnnnnnnnnnnnnnnnnnnnnnnnnnnnnnngttacagtgatcgtgccactgcactctaagctggactacggagccagaccctgtctctttaaaaaaataaagatagctgtcagcattttgttactttcttttgtgtgtgtttcaaaatatgatgttaatttgtatccctttttatttaacagtatgtcataattttcctgtgatattaaaacttttgctcaagcctgtaatcccagcactttgggaggccgagacgggcggatcacgaggtcagnnnnnnnnnnnnnnnnnnnnnnnnnnnnnnnnnnnnnnnnnnnnnnnnnnnnnnnnnnnnnnnnnnnnnnnnnnnnnnnnnnnnnnnnnnnnnnnnnnnnnnnnnnnnnnnnnnnnnnnnnnnnnnnnnnnnnnnnnnnnnnnnnnnnnnnnnnnnnnnnnnnnnnnnnnnnnnnnnnnnnnnnnnnnnnnnnnnnnnnnnnnnnnnnnnnnnncaaaaaaaaaaaaaccaaaaaaaaaaaaaaaaaaaaaa

SEQ ID NO: 3270 - DNA, 681 bp, Macaca Fascicularis
  misc_feature (1)...(681): n = A,T,C or G
tgtagcaggagagcccagcgtcccttcctggtcccagtcagnnttaacaatgtggcatccttcgtagcacacacagtggcttgcagtctgtaaagaagacccgagcctttgcagagaggcaccatggagccgcaggcccgcacagcagccccagcctcccactcatgactgtgaggacataggttgtaggagagcactttctttaaagctcccattnnntaaccacnnnnnnnnnnnnnnnnnnnnnnnnnnnnnnnnnnnnnnnnnnnnnnnnnnnnnnnnnnnnnnnnntttccaagagttaagtctttctttgaaggcagggaagcaggatggatacacatgtatcatacacataaagtaccaggcgcaggagcagcccaaactagagggtgactaaattggagnnnnnnnnnnnnnnnnnnnnnnnnnnnnnnnnnnnnnnncagggagggggcgcccccgcccctgggcttgagggtgccactccctgtgggcnnnnnnnnnnnnnnnnnnnatgcatnnnnnnctttgcccctggcggccatcctcaggccaattttgaccagcaatgatagactgtttttaaccctttcaaaaaaattttttcagtgggacaggaaggagagttaaaaaaacatttttttaaaggtggtaacatnnnnnnnnnnnagggtatgg

SEQ ID NO: 3271 - DNA, 725 bp, Macaca Fascicularis
  misc_feature (1)...(725): n = A,T,C or G
tacatatttaaaagcaccaaatgtaatanctgacactgttaagatgcccaaaagagcaaagttgtagnnnnnnnnnnnnnnnnnnnnnnnnnnnnnnccacagtgttagtgagtccagggctgacttgcagtgatgaagaaaagcagggagctgtnnnnnnnnnnnnnnnnnnnnnnnnnnnnnnnnnnnnnnnnnnnnnnnnnnnnnnnnnnnnnngatgggtgtggcagtggacctgtgaagagggagaatctggccctcagcctgtccagtgttaaccactagagaaactgagctttatatccttttgtattgcctgtgaattttagcatattgaaacattaggccaannnnnnnnnnnnnnnttcattaaacatccctcagataatttagctgtatgtcgttagaaagggaaagctatcatttttattttaaaannnnnnnnnnnnnnnnngtaaactgtcaccaaagtcttcccttttttattgcatgtgtgtcttgaatttcataaaacattaattcacaatagggggtcagaatgtactcttgttgaaacacttcttgtaccattttatgttcataattatgtttgaggaggtaaaaatgtatgagcagcttaagtgaagtagaactattcatgatgcttttcatacattgtggcataagatgtaaagtttgtaattaatgttcatttctgtgcattttaatattcttttataattat

SEQ ID NO: 3272 - DNA, 773 bp, Macaca Fascicularis
  misc_feature (1)...(773): n = A,T,C or G
aatgcatggctatgctgtaatctgatgtttatttctgcctgtaaagttctatcatggcctacctggaatttaatattcagtagacaaattaattggtcctctgcacaactttttaaataagtagattattttacaaagaaatttgaacaaatttaattgaatcttttgtttagcttgcctctaagaacttttcttaataaagctcccaaaacttctcagcaaataaatctcccttaagtaggaaaactagatttcatatttgcttactttgaattaacagcaactttccacaagtaaatctgttcttgcaaagatgtgagcagaagagttaaaaataatatttttatgtttcatggttctaaatggaagccataaatgcagtaaatactatctgttgtttaactacttcaatcgtcattttttacatcttcaagtatattcagttaaaaaaaaaaatagggcagccttggaaggcacctactacagaaaactgcagttttgcgttaaagataaagtagtattttcagctccctgaaaaaccatnnnnnnnnnnnnnnnnntagaaattgtgaagctgcatgagtggagagtattgaatctgtggttatagtagttttctcaggtttgtttatcttgatgtttgatgcactgtgttttgtagttattaaagtcgagtaatattatttctatgcagtgttatgtgtcattggccttttgtgaatgtgcatgttttaaactgcaaattttcaacattttgtcctctaattataaaa

SEQ ID NO: 3273 - DNA, 704 bp, Macaca Fascicularis
  misc_feature (1)...(704): n = A,T,C or G
agtagctgggattacagcggnnnnnnnnnnnnnnnnnnnnnnnnnnnnnnnnnnnnnnnnnnnnnnnnnnnnnnnnnnnnnnnnnnnnnnnnnnnnnnnnnnnnnnnnnnnnnnnnnnnnnnnnnnnnnnnnnnnnnnnnnnnnnnnnnnnnnnnnnnnnnntgtgcccagtctaatttttgtatttttagtggagacagggtttcaccatcttggccaggcaggtctcgaactcctgacctcgtgatccacccgcctttgcctcccaaagtggtgggattccaggcgtgagtcaccacacccagccccgctcctccttttttttttttttttaagnnnnnnnnnnnnnnnnnnnnnnnnnnnnnnnnnnnnnnnnnnnnnnnnnnnnnnnnnnnnnnnnnnnnnnnnnnnnnnnnnnnnnnnnnnnnnnnnnnnnnnnnnnnnnnnnnnnnnnnnnnnnntannnnnnnnnncacctgggttatttcatttttattttttggagaaatggggtcttgccatgttacacaggctgggaaacttgaagtcctattcnnnnnnnnnnnnnnnnnnnnttgcattgtcccaggtcatagttacatctttctctcccagccaagaccctggttcctaataatatctctgtatttgctactttgctcagttctgtaaaacacatgatagtttcaaaattgctacaccca

SEQ ID NO: 3274 - DNA, 689 bp, Macaca Fascicularis
  misc_feature (1)...(689): n = A,T,C or G
agctcacggggctccctgggtgaaggnnnnngcgccaccatattcccacagttacttgttgactccagtccctatcacaacccttttaggnnnnnnnnnnnnnnnnccagccgagggcaggctgctgtgttcaggagcccagctgcacagaattttccatgacgtcatgaacgggggtggcagagacaacaagaggcccggggactagtttctcaccaagactcagagggtgtgtgtgacaaagtcccactgctgctaaggggatgacctcagctctacggccctgctaaccaggtgccactagctgtaaggaggtcttacctaagcccctttcgtatccctttcccctgtatcataggcaccattttagcttcctttcgccaggacctgtccctggcttgctcctgccttctgcattataaactgggatcagaaaccattcaccaattaaagcacattatcctgctccatctacctggaaaacaggagtttgagacagttttttttttttgtttgttttttggtttnnnnnnnnnnnnnnnnnnnnnnnnnnncaggctgaggcaggagaattgcttgaacccgggaggcagaggttgcagtgagtcgagatttcgccacgcactccagaccggtgacagagcgagactcagtctccnnnnnaataaaaaataaaaaaaataaaaaaa

SEQ ID NO: 3275 - DNA, 720 bp, Macaca Fascicularis
cttattggagagattgtgcatttttgtgtatgtttatcggccatttgtatttctctctgataatttcataatgatatgttttacaattcatgtaatggtatttttcatataatctgtaaatttatttcatataattagcaagtttcttaaggtctgtatcataacttttgtttgtatttgtcttgaagaaactttcatttttacatagtcaaattgttcaatattttccctatcatgtctggattttgtgacttgtttttaacaatatgtccttttagggctttattgatttgtttaaagaacgtactcaactcctacattatttagtaatttactttctcccattacagtacatggacatcactaattccaactaatgtagatcaaatgtatcatttgaatttctgtgtagtaatgctcattataggtatgttctgatttctttaactcttccctataagatggatattaaggttgtttttaaaaattcccaccactaatgacttttcaataatcatcaatatacatggattccactgatgtttttgtttatatttcttcttttctgtagtataggattctcaaagtggtataactgacctataatacattttaattataattttaattatactggcagattactttccaaaaaattgatcaattaacactattatcaactacataagtaagtctctatgtaggctaaataacactgta

SEQ ID NO: 3276 - DNA, 742 bp, Macaca Fascicularis
  misc_feature (1)...(742): n = A,T,C or G
nnnnnnnnnnnnnnnnnnnnnnnnnnnnnnnnnnnnnnnnnnnnnnnnnnnnnnnnnnnnnnnnnnnnnnnnnnnnnnnnnnnnnnnaactgacactgtctaaaaaaataaaaataaaaataataaataaaagagaggcaaaaacagagtgttctgaatgcaccaaggaaaatggtgcattcataactctcaggtgaagcctcccaagccatgcgtgtgtgtacatgagtatgtgtgtgcatgtgcatgtgcgtgcgtgcgcatgcatgtgcctgtgtgtgtatgtgcgtgcacgtgcatgtgtgcatgcttgtgtgcgtgcatgttcgcacatgcatgtgtactgcagcaagggagactttgaggaagggattccagcggccgagaaggactcgcattgccctggggaaaggttggaaggcttcacctgagagtgtgtcgtggcctttgtcatatccactgcttgattcctccctttaaaaagtatttttattggccgggcgcggtggttcacgcctgtggtcccggcactttgggaggccgaggcgggcagatcacgaggtcgggagatggnnnnnnnnnnnnnnnnnnnnnnnnnnnnnnnnnnnnnnnnnnnnnnnnnnnnnnnnnnnnnnnnnnnnnnnnnnnnnnnnnnnnnnnnnnnnnnnnnnnnnnnnnnnnnnnnnnnnnnnnnnnnnnnnnnnnnnnnnnnnnnnnnnnnnnnnnnnnnnnnnnnnnnnnn

SEQ ID NO: 3277 - DNA, 749 bp, Macaca Fascicularis
  misc_feature (1)...(749): n = A,T,C or G
acttcatgatccgctcannncagcctcccaaagtgctgagattnnnnnnnnnnnnnnnnnnnnnnnnnnnaaaatgaattttctagattattgaataacaatagtcctttgatatgagataacaacttggtttatgaccttaatatactacttaattacttaagatgtttattaatagaatgataaatgtacaaagtaacctataagcatgacatacttttgctttcagtagttttatgtaaataaaaaaacttgaaaatagtaatacctgaggacccatgggaacaatagacactggggaggtagggtggggagcgggaggaaaagctgaaaaactacctactgggtactctgctcactacctgggtgacaggatcatctgtaccccaaacctcagcattatacagtatacccagctaacaaacnnnnnnnnnnnnnnnnnnnnnnnnnnngaaaaatggaaatgnnnnnnnnnnnnnnnnnnnnnnnnnnnnnnnnnnnnnnnnnnnnnnnnnnnnnnnnnnnnnnnnnnnnnnnnnnnnnnnnnnnnngaaacaatttgacttttgttccagtnnnnnnnnnnnnnnnnnnnnnnttttgaatagatctttataacctaatgccataaatacaagattctctgataccgtcatttaatatatcnnnnnnnnnnnnnnnnnnnnnnnnnnnnnnnnnnnnnnnnnnnnnnnnnnnnnnnnnnnnnnnnnnnntgatagataataaac

SEQ ID NO: 3278 - DNA, 776 bp, Macaca Fascicularis
  misc_feature (1)...(776): n = A,T,C or G
aagcaactgcagacagacagtggacatgaggacaggaagatnnctgcagaccaggagaacagtcaggacgagggctggaccatgaggagggacaggccagcctcagaaggctctgaactccagggcacagggtggccctgataaccctgcccagagacactctgggacggggcagaaccccgcacccgggcagaggannnnnnnnnnnnnnnnccaacccactccaggttcaggtgggcactcaggaaggcgcggagccccatttcctgcatgactccacccgggttgacagtggagggnnnnnnnnnnnnnnnnnngcagaccccagggtctcaggtcactgtcctgagcatcacccctcatgggtgccttgctggtggctgcttccaccctactctggcctctggggtagcttctccctctcagagctgtgaccccaaagtgagcccaagagcttcccctcagggggctggaacatctaactgacctgggcctgcacgggggatggaaacaggtggcctagcatggggtgtctccactctacagctcctcacctataggagccccgggagcaaacacctgtgcaagagtgaacgaaagacacagcaaatctgctcctcgccctctctgggaagcagagggtcttccctgtcccacccactnnnnnnnnnnnnnnnnnnnnnnnnnnnnnnnnnnnnnnnnnnnnnnnnnnnnnnnnnnnnntgaacaaatcacagaaatttgtacttaaataaatcttaataaaataggtactt

SEQ ID NO: 3279 - DNA, 751 bp, Macaca Fascicularis
  misc_feature (1)...(751): n = A,T,C or G
tgattgaggggtggagggaacgaacaattgagnnnnccagagtgaaaatccatctgaaaaactaaactacctttagtttttagtcctaatttttggtgttgtctctgtggacggtgaagaatcacaatgctctgtgtgccctggactgtgtggcaaatgcaggttgcagcgtgtgtgttacatgaggatcttccacaatttcagaatgcacgccagagctgtaggggaaacttggtaacttgcccattattctctgcttttagccagagttaaacagactgatgggtctggtagccaacaacttggcaacttcccctccttctcacctcgtgagattaagggctgtgaaaagaaatctagtctaactccaacagaaatctgtctctgttaagtgttttaccttctgtaagtagagatggtagagccaagatttttcttttggtaatttccctgtctataaagtgagaccacagggatatctgttccctgttacctttttggagaattcataacatttgaagatcaaaaaattgaatgataaatatgaatggcttttcaattctgtgggctttgtaccgtttggcttcaccttgtactgcaagatgaatttgtaaacaaaacaaaattggattgtctggaaagctaaagttctaaaatatggaatgtactgcctctaatttttctttgtcttcctctcattggcatttttttctctcnnnnggtttcttaagaataatgtttttaaaggagg

SEQ ID NO: 3280 - DNA, 721 bp, Macaca Fascicularis
  misc_feature (1)...(721): n = A,T,C or G
gaaagtcagagcaggagtcagcagaagctggaacagattatgttggcatcagccgaaatctggactttgctccaggcgtgcgcatgcagacattccgcgtgaccatccttgatgacctgggacagcccaccttggaaggcccagagaagtttgagttagttcttcagatgcctatcggtgcagtgcttggagaaccaaataaaactnnnnnnnnnnnnnnnnnnnnnnnnnntgactgtaagcagagtgcttgtagttcctttgattgaaagactttaagagggaaaaaaaagagtcaagatatgtctcctaacaacagaatgaaactctactgtttatagatcttagcaattctgggatatcagtgatattgtaccatcattggtgttatattctggtgatatgtggaaatgtaatttatgtgactgcatggaaatagaaatatatatacatagaaaannnnnnnnncacaaagaattagaccgtattcatgttctttttctattttgttttactttgtttctgaggcaagcaagaaatccactgtgatcaattaaatcaaaagttaaaatcaaaagattaacctctctttactgattgatgccacatatgaaacacttttcaactgtctctccatatataaagttcttttagtgaattcttcaatttttcttcacaactctttatcagaactacttggtaggaatattttcaactctta

SEQ ID NO: 3281 - DNA, 2340 bp, Macaca Fascicularis
agtaatttctctagggatgcaggaccatttctagtcaggactctggtagaagagatcactgaagagcagtattacatgatgcggagatatgaaagctcagcctcacaccccccacctcgccctcccaaacacccttcagtagaggaaacaaagttaaccctgctaaccttagcagaagaaaggaaggtggacctgcccaagtctcccaagcgtcatcacgtagacataaccaagaaacttcacccaaatcaagctggcctggattcgaaagtaccggttggtagtcagaatgatttggtggatgaagagaaagagaggagcaaccgtggggccacggcagtagcagaaacattcaagaatgaaaaacatcaaaaataacaagatgtgacagaagccacttagtcaacaaacataaatgttggagggaaaaaagaagctagccttctagctgaaaaacaaatattccccaatggactccagaagaaacttgactcatcgctgtaaaggagagaacaaccttaaaacttttaacagataaaacttagagaaacctaagatataaaattcgtatagtctattctgttgtgtctaaatctgtatgtattgttttgttgttctttaggatatatttatttaacatgcacatttttttcaggttcttatttctactaccaacaactaagtaattgagaaataattttgtatttcagtttctgagtaaaaccagtctgaaataggataaaagctcaccaaatattttctttttttcccagaatttgttttgccattttttagtgctatcatcattcctaacaagactaacttacagaaaaataattatatctgattgatttaaaatgtccaggtttcttatccaaatcccttggaactgggatccctacctatcaagggtggaagggagtttgacttcacattcacagtgtatttacaaaatacactttgtaataaatatgtttgaattccaacaaccaaagccattgagagtcataggagttttccataacctcttctatgacccaacaagttcatgactgaaatttcaccggatttctgagaagatgccttagtattttatgtactgtataccacacaattctttagatgaatgtttcttaggattgtaggaaaattatctagttaatcataatatttgatgtaaagaaaaaggcaataaaattgtaatgagatataataaatttggctgacaataaaccaaagtgattcttaattagtgtacattagaatgatgctcttatagttgcatcatctataaaaattactttaagagctctcacattttgataatttatcttattatgtattaagtatacaggagcaatattatttttcctctaacaaaatgaagagacaggctatctggttaatgttacacaggaatttaacagtaacacttaaacttcatccatagatcatactctgtacaaaatctgttagctaacatcctatctcataattattttatgttacttggagaaatttgttgattttgtaccaaagtgtttctgaagacaataaattgtgagtcagcttttgaacaaaaaaaaattacagttagagttttttgaatgtttatattctgattaagctcactttaccttactttttttctaagtgacaattaatcctgatttctaatgtcctaaatattgcttagtgatttgattgtggtaatatcatttcttatctacaatgtctaaacttttatgggatagttttacttttatttattttgcctgtttgtgcagattagagcagaaacttttctaagccccacatttggttattgaaggccacagcgaatcttaacctgacaaccttggcaaactgcaccttaggtaattttagactcatataatttgttatttttcaagtaatagtgaataattaatattttcatttggaatatgagaatgattaaatttgtacttttgataggtatcattctttgattagaaaattaagagaatgcatatcttcctttggccgtaaattatcaagggctttctaatggaaatcatatataacatttctaaatataagtcctttcacatactgcatttccagttgtcttgatattgaaaagtgtaataaacttcatgctcacttattggagatttgggaaggttgaaaataaatttcctaatttttatttgtatgtgttctcttctatgtttaactctaggataactatcttcctgtaacgattaggttaaaatagtctttaactagaattgaaataaattgttcactaaggaagggattgcttgtgctaaaaaaaaaaaaaaaaaaaaaaaaaaa

SEQ ID NO: 3282 - DNA, 690 bp, Macaca Fascicularis
atcgacttcagctctccctcccctccctctttctccacgttctgctcccactcgctatcctgtccccttcccctcccctcccggcggaaagccccccgaaaccaacaaagctgagccgagggaaacaaacaaaacaaacacaccgggccagacaagcaatcgacaaaactttgcaaaagcaaaaacaaaaaaggaaaaactaaccaacctcaaccaaccagcccccgagccacccggggctccctcccgcgccctcttgcaccctcgcacacacaaaaggcggcgcgccggagcccgagacccggggagccgccgccgccccgccgccgcccgcagccaggggagcaggaagtccggacgcggcccccatagatatggcaatggtagtcagcacgtggcgcgacccccaggacgaggtgcccggctcacagggcagccaggcctcgcaggcgccgcccgtgcccggcccgccgcccggcgccccgcacacgccacagacgcccggccaagggggcccagccagcacgccagcccagacggcagccggtggacagggcggccctggcggcccgggtagcgacaagcagcaagcagcagcaacacgtcgagtgcgtggtgtgcggggacaagtctagcggcaagcactacggccagttcacgtgcgagggctgcaagagcttcttcaagcgc

SEQ ID NO: 3283 - DNA, 741 bp, Macaca Fascicularis
ggaccatggagacgtgctcagaatatgccgatttccctctcctgactttgccaagccttgggctgctttgccctgataaaaggcagggccattcaaagacacttcccccagtcggcttgtttgtggagtcacaggaggtagtgtctgctcacacatttttcaaaagggcagtatactcagaacttcactgtacctgggatttttaattcctcttgcagtgttgaccagcagagagactcgaggctactttaagcctccactatgtgtttgtagataaaaatctccattcaaacattttaaaggactttgaacattatctgtttatagaagtcgtgcccttcacttggttagtaaccacctcagccgtaatacttatcatcataggttttttaaaatgctttttttttcccctaaacttgcgtttccttagtgatttcaaaatgaagtatgagaataccagatcccattagcaaaagcctgggacttgtttctccagacattgtactaacattcaacttgttttaaaattgtgactcaagaattttaaaaaattattctggacatgaattaaaactcttttttataatataagtatttttctgatagattagaaaaaaggatataattgacttcactataattgtcgtatatatttccataagtaaatggattttgaagtatttttattttttgaactttatttaacccatcgtgtgacgacatgttccacttttgcacgta

SEQ ID NO: 3284 - DNA, 773 bp, Macaca Fascicularis
  misc_feature (1)...(773): n = A,T,C or G
tgcagaagagacacaaaacagcgacagccacatggtacgggcaccagaagtgagtgaaatcagaaccgtcccaccgagtcttccaaaagtcacataatttttttttctgtcacctgcctttggtgacagggtcaaaggcacagattgaaagagaagatcttgacttgggagaagcatttatatccagatgcccaccctcacactccctagcttactttccacataatttagttttaagagaaggaaatgcataatgtggtttttagtcttagcaagcacttaaattcgttagatgcatagaaaagaaccatttatcattttattatttttatttttatttttattttgnnnnnnnnnnnnnnnnnnnnnnnnnnnnnnnnnnnnnnnnnnnnnnnnnnnnnnnnnnnnnnnnnnnnnnnnnnnnnnnnnnnnnnnnnnnnnnnnnnnnnnnnnnnnnnnnnnnnnnnnnnnnnnnnnnnnnnnnnnnnnnnnnnnnnnnnnnnnnnnnnnnnnnnnnnnnnnnnnnnnnnnnggtcaatatggtctccatctcctgaccgcgtgatccacccgcctcggcctcccaaagtgctgtaatctaagcagacagttctgtaaatgcgtgaggaccacctnnnnnnnnnnnnnnnagtggaggtcaccaaagggtcaactgaggaagggaagagggaattcacttgaccaaaggcttagagatgcccaggcaagctgatttttccatccagaattatcttgttatttaactctgctca

SEQ ID NO: 3285 - DNA, 1802 bp, Macaca Fascicularis
gaaggattttcaagggaaggaagttgtcaaaggggtcaaagatagggaccctgagaaacctaacccaggtgggccaggtacagagccaggcagctggtctgtccaggtgagtaccagtgccactcctaggtagcactgtctgtcccaggcaccctgaggatgacctccctatccctcaggcaggtgggcaacaggtgtgctggataagacactaagggccctggccagagccacgaggaggcagctggaggggagagtgcaggtgccctggcgggttgaggggcaggggcaagtaaagagttaagcggtggagttgcctcacgtgagggctttccctgccacacaccaggcaggtgctgcgggtcttggtgctcaggttccagcactgataggtgaggcctggctgagctgtggatgtagtttggccactgtccccatgggggcctctggggcaccacagctgagctgggcagggttgcagcctggctcaggcttaaacacactacactgtcactgggcccctcccctgctcccaggagcccagggcaaggtgacctccagtgggtgtgctcctctggacccccacatccaggggccagaagaagcttctcctccccacccccagccagcccacagccagccctaagcacaaagaagtctgcctacccaccttctccccacaggtgtgcctttacatacactgactctcttatatccctgagccttgcacacacacaacacacatatacacacatatgtacgatacatgtgcacacacaagcaatacacaggatacacatacacagcaaacacatgccatgaacaacctacaacacaaaacgtacacacagactctacacacaactaatagaaaacacagttgcatatatacatgcaaacacacaggatactttcctcgcatttttactttgagcaacaaacaaccaaagaaagtttaaaaattgaaatgggactcagatttgagagaattgctcccactccccgccatatctttcccagtggcccttgtggcatttgggacggccccaggaccaagtgctggtcttagctcagtcagtttcctgtctgtcgagtgcgctggcctcgccaggtgccctcccccgccacccgcctcagacacagtggaactggcctcaggctgtccagtcacagatccatgggacttccctagccctccacccctcttgccatttccacacaccacactccctgcagaccctgctggttgtgggtcacccggggaaggcctcactgctgagtgtgaatccagcctctctgggcctctgggggtcagggtgtctgtggctctctaatagcctctgtttatgagcaaggcccttgtcatggagtgagtcaccggatgccccctgccaccctggtgagggccagggccagcggtatgcccgttttacaactgaggatctgagaccctaagaagtggggtacaccagctcaggctcaagtaaattggctgaacctgtgttcttaactctggggtcaaaccaccgtgtctgctcccttgagccattttctttgagcctcgtgagggccccactgtgggtgcacggggttgtcgcccctgcagggcagtcagtgccaggagcttacagggctggtccaattacttggcttcctcatgtgccaggttcttcttctcccaactgcggacaatggcaacatcttccctatgggctgtggtgaaattaaaaggttaatccatgtaaaaaaaaaaaaaaaaaaaaaaaaaaaaaaaaaaaaaaaaaaaaaaaaaaaaggccaca

SEQ ID NO: 3286 - DNA, 708 bp, Macaca Fascicularis
tcacacgggtcgagcagagaagattttgccagggctactaaagtcaaaggaagatggacagtcagttgtgctgtggtgaacccagcccgtgccggactgcattacaaggtgattcaagccattcgaaactgcagggccatccgcacgctagtttttgtttcctgcaagctccatggtgaatccactaggaatatcattgagctgtgctgtcctccagactctgctaagaagctcttaggcgagccctttgtcctacagcaagctgtccctgtggatttgttcccccacaccccacactgtgagctggtgctcctcttcactcgataagcagcctcctagaagactgcaggctatttgttaaggctgaagtttcagaaactttcagactgaagttacgcgttcttgggaggaaggccacagaggtaacatgccatcctcatcacatcatatcaaggatacatgctgtcaacatgacttatcactgatgatgttaaccttgatcacctggccgaggcagtgtttgtcggatttctccactatcaagatactccccctactttctatcctgtactctttagaaggaaatcagtatgcattggccacacttatagaatggggatttatcctccacctccttgaggtggagtatctacaaaagttgcttggaattcttctgtatgggggagggggtctgtctattcttatgca

SEQ ID NO: 3287 - DNA, 712 bp, Macaca Fascicularis
  misc_feature (1)...(712): n = A,T,C or G
atcaacatgtnnnnnnnncnnacagccccaccaaccggccgctctacccccggcaggaggnnnnnaggccacgctggtggtcctnnnnnngnnnnnnnnnnnnnnnnngctgcttggcacacccctgtacctgctgcgccgccaccgcccccacctgcggaggaggcccgctggccgacaggnnnnnnnnnnnnnnnnnnnnnnnnnnnnnnnnnnnnnnnnnnnnnnnggctggagctccgatgaggaaaaggcagggggcctggatgatgaagaggaggctgagctcgtcccnnnnnnnnnnnnnnnnnnnnnnnnnnnnnnnnnnnnnnnnttctgcctgggctgcgtctccaacaccgcatcctacctgcgcctgtgggccctgagcctggcccacgcccagctgtccgaggttctgtgnnnnnnnnnnnnnnnnnnnggcctgggcctgggccgggaggttnnnnnnnnnnnnnnnnnnnnnnnnnnnnnnnnnnnnnnnnnnnnnnnnnnnnnnnnnnnnnnnnnnnnnnnnnnnnnggggctctcggccttcctgcacgccctgcggctgcactgggtggaattccagaacaagttctactccggcacagnnnnnnnnnnnnnnnnnnnnnnnnnnnnnnnnnnnnnnnnnnagggcccactgcaggtcctgccagacctccgtcctgacctctgaggcaggaga

SEQ ID NO: 3288 - DNA, 957 bp, Macaca Fascicularis
agtggtctagtccatcggcaacatgctgcgcttcctggtgttcgcaaccctggtcctttatggacacagcacccaggactttccggaaaccaacgcccgcgtagtgggagggactgaggccgggaggaattcatggccctctcagatttctctccagtacctgtctggaggttcctggtatcacacctgcggagggaccctcatcagacagaactgggtgatgacagctgctcactgcgtggattccccgaagactttccgcgtggtggttggagaccataacctgagccagaacgatggcaccgagcagtacgtgagtgtacagaagatcgtggtgcatccatactggaacagcaataacgtggctgccggctatgacatcgccctgctgcgcctggcccagagcgttaccctcaatagctatgtccagctgggtgttctgccccaggagggagccatcctggctaacgacagtccctgctacatcacaggctggggcaggaccaagaccaatgggcagctggcccagaccctgcagcaggcttatctgccctctgtggactacgccatctgctccagctcctcctactggggctccactgtgaagaacaccatggtgtgtgctggtggagatggagttcactccggatgccagggtgattctgggggtcccctccattgcttggtgaatggcaagtattctgtccacggagtgaccagctttgtgtccaagcagggttgtaatgtctccaggaagcctacagtcttcacccgggtctctgcttacatttcctggataaataaaaccattgcctccaactgaacattttcctgagtccaatgaccttcccaaaatggttcttagatctgcaacagaacttgcgatcatcaagtaaaaaacattctaaaagactattgagccattgatagaaaagcaaataaaactggatatacatt

SEQ ID NO: 3289 - DNA, 2104 bp, Macaca Fascicularis
acgtactcatttggactcactgggagaagggattaactagaattctcattggaagaattgacaggaaagctccctccaatttctcaatttccaccccgcctggtacctggttttatgattccacaccctcctgatccatcctgccctcctaatacatcccactctcttaagccatcctactcttgtgctcacaaatccctcccccttcttcaatctgccaagccccttcctcctctccagaagcatgtggatttttcagttttctgccctaactgttatcccactgtggctcatacctgccctccccactaccctaccctaatactctacctgccctgctcttctgctattcgttacaaaccatccatttgtcattgctctggtcccagatctctttctggaaactcccctatccatcaccctagccctcctcctagtcctactggtcaactttggggtcccagaactcttccttgtgattccccaatctgttcccctattcctcctcctagccctccttgccaacactctggtcccagaactcttttctgtgactcccctatctgtccccctactcctcctcctagccctgcttgcaaacactgtcgtcccagagctgtttcctgggatgcctctacctatgactctactcctcctccttagccctacttctttctagtccccagccccagccccgccatctccaccagacctgacagttcacaaatctcaccttggagatggtttccctgctcctggggcagttctggtatggttcaggatggccaggactgtgggttctcagcagcctggcctggtggacaaaggaaatgcaagacggtggcaaaccagcattcagcctcaccaccctgcatgagcctctgtatttgtttctggcttctccatggaactcagcctacagccacaaagcaaaccacggggccagtgacagagaaggcagaggggagtgaggagtgggaaacacctaacctgttctcaaggaagggaatgactggccaagatgagattcaatcgtatgtccactacctcctggcctgccacctggctgtgagtcctttgtgggtggtgtccagaggcggttccagtgaccaggcaggtgctgagaagcacaggcaggtgagttgagcgatggaaggaggtggggtgtgaaataagatcctgagaggtgggaggggagtgggcagggtgggtggaggcaggggaatgggtgacaacaccgagatctactccccctcatgggacacctgccaggagacagcgtgtgatgccactgcctagagtcggcagaagacccaggagcaggcaggcagcacaagggcacccagagtgctcctgatcagacagagcagcatggaggctgcagtgggacacccgagggaaaaggtgaccccagatgaggttcagcagaaccagatactgtgggaactccctaaccagaccaagcagcatggaggccacggtgagactcctgagggagaaggcaaacccagataaggctcatcaggaccagatcttgtgggaactggagagaacaatcccagatgacgtccattgggaccagatcttgtgggaaacacagagaacaatcccagatgacgtccatcggaaccagatcttgtgggaactggcgagaacaatcccagatgatgtccatcaggaccagatcttgtgggaaccgcacttcaaagtgctgccaacccacaaacactgcatgcagcatcacatggatgccctctgcaagggggaggggatgcttgcaggatggaggaaataccagagtggcatgtggggctcattaaaggagaagttaccctctcacaccctacctccttctatagactttaggagcgatgtctttggaaggagttcgcctacatcacatcagatgtattaaatatattaaaacacatccacgcctcatggaacattttcactgtagaaatgagagtttttccatccgaaaaatggaaataacaacccaccactccacgagtcttttcagaattgaagatttgcttaaagcatgtggctcagaggaggtatacaataaataatgtctatcatcaaaaaaaaaaaaaaaaaa

SEQ ID NO: 3290 - DNA, 676 bp, Macaca Fascicularis
  misc_feature (1)...(676): n = A,T,C or G
taaaggatttggatgtagctttgcccattatcgagaattataaggatcggtgtttggcaattggagaggttggactannnnnnnnnnnnnnnnnnnnnnnnnnnnnnnnnnnnaaggaagagcaaagacaagtcctaatcagacagatccaattagccaaaagactaaatttgnnnnnnnnnnnnnnnnnnnnnnnnnnnnnnnnnnctaccatcaaccttttacaagnnnnnnnnnnnnnncaaggtactactgcatgcatttgatggtcggccatctgtagccatggaaggagtaagagctgggtacttcttctcaattcccccttctatcataagaagtggannnnnnnnnnnnnnnaaacagttgcctttaacctctatatgcttagaaacagattcacctgcactaggaccagaaaaacaggtacggaatgagccctggaacgtttctatttcggcagaatnnnnnnnnnnnnnnnnnnnnnnnnnnnnnnaagaagtgatagaannnnnnnnnnnnnnnnnnnnnnnnnnnnttcctaagctccgacacttnnnnnnnnnnnnnnnnnnnnnnnnnncattacaaaatctaatcaactgcagggggcnnnnnnnnaaaaatagaaatgttctgatgaagaatctgaactaattagaagctgttttatagg

SEQ ID NO: 3291 - DNA, 727 bp, Macaca Fascicularis
  misc_feature (1)...(727): n = A,T,C or G
gagaaggaactagtgttggtggtttgtaacaagagttatatgtctaggggcttgtgccttggttttcctttgattgctnnnnnnnnnnnnnnncagagaaatgcattgagtgtgaatgttgtcatctgtaatccctccctcagctgatgatggtagttgatctgttgtaaatatacacatatatgcatatttgcacttccagatgggttgcataagaatcaagtccttaaatacctcccaatctgatgaaatgatagaaaagaataaagtaacatttcccagaatggaggaatacattattttattttatcttatatttttgtccaagtgatgagctgatggtggtattgcttctctgcatgttatcagtgtgtacatccggtgcttttcatgtgtcatttgtgagccacaaatgcaaagttgccatatgaattcagtcaggctacagggtggtgtcagccaaggtctttcaggtaggggagaaattggttagggctcccactgccaaatgcaagcagatagcataacctgactgttatgtgccctcaggcagcatgcttagggacaactctgtggcctgggggacatctgtgtcacagtataggattgccgttcaggtgttttgtacctgtttctttcctgacgtcccctttttttgtactgatccaactgggagaacctcagccaatgctggaagtgtgattgaagtacctctcttttgtgactc

SEQ ID NO: 3292 - DNA, 725 bp, Macaca Fascicularis
  misc_feature (1)...(725): n = A,T,C or G
ctgctgccctgactgtgatggtgagggtcaggggatagggaactgcgggggtgggatgggggggaccagagggctgggtcagcataatctttactgccccagggtggatctaaaatatttattacagtaagaaaaagccctgaggctgggagcctagctcgagcctgtgacnnnnnnnnnnnnnnnnnnnnnnnnnnnnnnnnnnnnnnnnnnnnnnnnnnnnnnnnnnnnnnnnnnnnnnnnnnnnnnnnnnnnnnnnnnnnnnnaattttaaatcagttggttgcggtggctctggtactacttgggaggctgaggtgggaggattgcccaggggtttgaggctacagtgagccatgttttcgccactgcactccaggctgggtgacagagtgagaccttggccaaaaaaaaaaaaagcctgagacaaaagcctggatctcctcctgcctctgttactatttggtgcgtggtcttaggcaagttacataacctctgggcctaaatttggctcttgtaaaaagacccagtcccccagtcctcctgtcctccctcactcttgtgcaatcttggcagttttggccagtcgccctctaccaactgcaattttgtttactacttgccttccgattaactcacttattaatttaaattgatttagaaaggagttttatatcatactgtaagtggaaaagtagacttgccaggaccacattaccataaaa

SEQ ID NO: 3293 - DNA, 699 bp, Macaca Fascicularis
  misc_feature (1)...(699): n = A,T,C or G
gcccaagtgcctggcacaaacaagcactgagtaaatacttcttgaatgnnnnnnnnnnnnnnnnaaaaatcatttaattaaatgcacctccacactttccacttctctcctttcacagcaacactgtatttctgcttttctggggggatgggggacagagtctcactctgtcacccaggntggagtacagtggcatgcaatcttggctcactgcaacctccgcctcctgggttcgagcagttctcttgcctcggcctcccgagtggctgggattgcgggcacctgccaccatgcccagctaatttttgtatttttagtagagacagagtttcaccatattggccaggctggtcttgaacttctgacttcaagtgatccacccaccttggcctctcaaagtgctaggattacaggtgtaagccaccactcccagcctctatgtctgctttaagtagagaagcagagcttatgagggaggagaacaagggtgcaannnnnnnnnnnnnnnnnnnnnnnnnnncccttgttgtttagttgaggaaatgggcccagacagtggacaagacttgctcaaggagacaaatgagatggtgtccagtgcaacaaacccaggtnnnnnnnnnnnnnnnnnnnnnnnnnnnnnnnnnnnnnnnnnnnnnnnnnnnnnnnnnnnnnnnttttggttatgtggataaggag

SEQ ID NO: 3294 - DNA, 757 bp, Macaca Fascicularis
agtgtacgttcaagccttactaatcatcatgtgacccatactggagagaaacctttcaaatgtaatgaatgtggcaaactcttccgggacagttcatatcttgttggtcatcagagatttcatgccggagagaaatctaacaaatgtaattaatgtggcagagggttcagtcagcattaaagccttgcaacacatacaataatttatactggagaaaaactttgcaagtataatgaatgtagcagagcctttagttttgttcaaggcttaataaccattagctagtccataggggagagaaactttactaatgtattgaatgtggcaaggccttaaggtaaaagtctgagatcaggatttttcaaagaattcttgctggtgagaaacctaacaaatgtaattaaagtggcaaggtcttctggcacaactctcacattgtacaatattgcaaaatttcatacttgagaaacaaaaacactgagtgggaaaccattatgacttcaaacattcatcaacatcagagaatccatactaaagagcctttatataattatatgtgatagagattttctgcaggccatagtcttactaggcatcaaaaacttttttgatgaaaccatacaaagggaatgtgcacgcttaggcttttacccaagcattaaaactggaacatcacagggtttatactggagagtaactacacaaagataatgaatgtaataagcctttcagtgtaatattcattatttgtcatgag

SEQ ID NO: 3295 - DNA, 1722 bp, Macaca Fascicularis
  misc_feature (1)...(1722): n = A,T,C or G
attatctaatttttttagatactgataacttggtatgtgaagctaacagttggggttctcagtttggtggagagataaagttgattcagtgaaaaaggtttagaaatagggacacaatgtacactcacttggactgagtatatcaatatggtgatcatgaagggctttctaggagagaacagttagcaagtaattaggaaaaaatgagatgcagtagtgacagtaagcagaactgaggtaataagccaaatatgcggattgttggagtgaggaaatatgaaatctggagaactaaagaggcaaagtaagtggtattctaaacagcttaagtggtattctaggtccgttatttagtggagttcaaataaaaatgttggatatttacaaacttatatttcaatggcaaataggaatttgttaaaatgtccagataatgtaaaacatgaaacttgtgtggtatttccaattaactccagttcctatagcaacatttattagatagaaaaatatctcacttctttcaatttatgcctaatttgaatctgtcttaaagtaattatatgttattattaaccattttcactctctcaatacaaatgagtgagctctaacttacatgtacataattaaatagagcttttcttatcaatatccctgtgataagtaatacatgtttattcatattaaacattgtaaacatcctcttattcgtctatattattgaaggttttaaaaagtattttccaatgatttactctgcaaatgatttaatcaaactatgcatttttctttcatggtactttaatactacaaatgctgaactacaggcataccttttagatattacaggttttttgcagatcatcacaataaagactatgtcacacaaaaacatgtcacacaaatttgttggtttcccagtgcatagaaaagttatgctcacactatactgtcgtctatcaagtatgcaattgcattacatgtgaaagaacaatgtacataccttaattagaaatactttattactaaaaaatgctcatggtcatgtgatcctttagcaagttataatattttgtctgttggaaagtctccttgatggttgctaactgattaggatggcagttgctgaagggtggagtagttgtggcaacttataataattcaacagtgaagtttgcggcattgactcctcccttcattaatgatttctctgcagcatgtgatgatgcttgatagcatacagtagaacttcttttgaaattggagtcaattctctcaaaccctaccattgctttgttagctaagtttacaaaatattctaaaatctcattgtcatttcaacaaggttcacaggatcttcacctggaaaagtttccatttccataaaccacttttttgctcatctctaagaagcaactcctcaggttaggtgcagtggttcatgcctgtaattccagcacttttggagtcctggtgtgggtggattgtgaggtcaannnnnnnnnnnnnnnnnnnnnnnnnnnnnnnnnnnnnnnnnnnnnnnnnnnnnnnnnnnnnnnnnnnnnnnnnnnnnnnnnnnnnnnnnnnnnnnnnnnnnnnnnnnnnnnnnnnnnnnnnnnnnnnnnnnnnnnnnnnnnnnnnnnnnnnnnnnnnnnnnnnnnnnnnnnnnnnnnnnnnnnnnnnnnnnnnnnnnnnnnnnnnnnnnnnnnnnnnaaaaaaaaa

SEQ ID NO: 3296 - DNA, 776 bp, Macaca Fascicularis
  misc_feature (1)...(776): n = A,T,C or G
gactaaccatcaggatggtatcaaagcacaatactttggangnnnatgcgttgaactggggcaggtactgtgtaacacaaagtggaaaaccactttggtgctgccgctcctgcccccactttaggtgggaggaacgagttttgccctctagattttaacccagctggtgtccaccggatgttgccctcctggggagcagatatcagtctgtggaacgctgggaaaaccacaggcacatttttcggtnnnnnnnnnnnnnnnnncacataactgggnnnnnnnnnnnnnnnctttgtggaaatnnnnnnnnnnnnnnnnnnnnnnnnnnntggtgcgtggtggtggctgatgaatgtgtcagtctgctcagagaaaggacagaaaggaaattcttttcaaaactgtgttcacagtttgggtgtgtgtatggctctgcatgtgtgtgtttttgtctctgtataggtagaggtgttcacgtcttactccgactgtnnnnnnnnnnnnnnnnnnnnnnnnnnccaccacagttgccattttgtaatgtccttccaacatggagaagacacaagctcnnnnnnnnnnnnnntttgtctttttttgttgannnnnnnnnnnnnnnnnnnnnnnnnnnnnnnnnnnnnnnnnnnnatcaggcaagatccctgccctttggcacattcactgaaaggccaaacagcaagtccgagtgagttttaaatattaattaatcaccctttattttttacacttgagagtgattgtaataaaggctgtca

SEQ ID NO: 3297 - DNA, 547 bp, Macaca Fascicularis
ccaagatcaaccacttcttgcagaaccttcattctttcagcaaacagctgggctttatgttaggccctggggaaatggcaattaaggagactcagtctctatcctcacagagcatcccatctgatagggaactagctcctggcctgcaatgtggtaagctgcagtaatacgtgcaaggaccctgacctagtggcaatgatgtttgagccgagatttgaaggataactaacaacagtgtgccagagaaaggagtagggggtggagagaagtggccaggggaatatttctgggcttggtaagtaagccaggtccctgctagacatggcctgagaagagcaaagccaggagtgatagctgatgattattttttaactgaggaaggaagatccttgagaacagaaccccttgggaccttctacccagaacaccagagcacctcacagggatcagagccaggccctcaggtggattaagcaactaaaattgattgtcctgaaccatgagtctgtctgtttatggggaaagaaactttgtgatgaattaatcc

SEQ ID NO: 3298 - DNA, 533 bp, Macaca Fascicularis
  misc_feature (1)...(533): n = A,T,C or G
tgaccaagganngcagccacgtgnnggatgggcctggaggacggcaagctcatcgtggtgggcgccgggcagcctntngaggtgagcagcagccagttcgcgcggaagctgnnnacggnnnnnnnnnnnnntctcccaggtgtcctagggagagacggaatacaaccctgctgaggcgcgcnnnnnnnnnccagtccggctgctcgggccccgcccccgacgggcttggcccggaaggccccgcccagaagtcgacgggaacaccccggggtgggccgcccagggggtgggcggggcccccaccnnnnnnnnnnnnnnnnnnnnnnnnnnnnnnnnctccctcagggattggcgggcggaagtcctgcccctcgccggctgaggggcggccctgagagtcagcgctggcgtctgcggccnnnnnnnnnnnnnnnnnnnnnnctgggtcggggttccccggcttccaagtcccggtttcgtcagagcacgagggccgcctgtggccttaattcctaacggcggccccggtctcc

SEQ ID NO: 3299 - DNA, 698 bp, Macaca Fascicularis
  misc_feature (1)...(698): n = A,T,C or G
gaacaagacacacccggccatcaacaccnnnnnnnnnnnnnnnnnnnnaggaaaggaacagagaagtgaagaacagatgatatctccctccaaggtcaaatgcctcttgatcttcgcagagtaggnnnnnnnnnnnnnnnnnnnnnnnnnncttccttctacagattctagagagctgggccattaaatatgggggacacttagaatactgcccctttaataccaccaaataaagacctttgtgtgtgtgtgtggtagcgggggcaggggtctttctcttctgaacataaatctgtgagctgaactctcattcccctgttcctccccacccccaaagaggcatggagtaaaggggcttgggggacagctcagcaacccagtgggagttagcaccccctcccacctatgatatgtgtggacctggccagtgcccctctgaacatatcattattagtgtaattatcatttattttgtgtatttgttacattgtgtgcatgacagcctttgttaagggtgtctgaggagtatggagctgacaggggcactggaatgccgggaaagaacttcttcaactgagatcaaggcttcctggagggaannnnnnnnnnnnnnnnnnnnnnnnnttttcaagttatgtgacagagggcaaagatggcctatagggtgctctgagttttgggatggtcacatgacacaa

SEQ ID NO: 3300 - DNA, 760 bp, Macaca Fascicularis
  misc_feature (1)...(760): n = A,T,C or G
aactgcaggctggctctgacctccggaggcgacggcgggaccttaaccctcatgcagagggcgagctggccccaagggacggggtcatcatgnnnntaactccctgcctgatgtccaggtgaacaacctccgtggcgccttggacgcccagctccgtcaggctgtggggggagctctgcaggtggtccacagccggcagcttagacaggcgcccggggctctggaggagtcctagcacctgctggccatgagggccacgccagccactgtcttccccggccagcagcaggtctttctcagccgcatcccagccgaactctggaggtcacactcatctatctccagggtttcacgtctgaggccctcaccaagtgtgagtgagagcataaaagattcactgtggcattgtttccagaatgttcttgctgtcgttctgttgcagctcttagtctgaggtcctctaacctctagactctgagctcactccagtctgtgaggagacgtggcctccgctgcgagccggccggtgcacgcccaggctcaggctgggagccgctgtgtctgcggtcaggcctcctgcttctgccaggcagcacgcgtggtcttcaggttgagctcggctgtgcgtggaggtgcacatggctgctgatggtcccagcacaggctaccgtgagagccagcgtccaaccccaaacttgcagcgactcagaattataactgtttactgatgtttcccacagtgggcaggaagtttgaataa

SEQ ID NO: 3301 - DNA, 749 bp, Macaca Fascicularis
  misc_feature (1)...(749): n = A,T,C or G
tcctggaggagcatgttcaggggagcctgggtctgcacaagccacatggggcaccttggcctgctggcaggaggtggacacccagccagaggcctggctcaaggtggcctcacctggccacgggcgtcctgggtgcacaggcccgagcgcaggttgttttgtacatattggagtatgtgttaacttatgccccgcagcccaactcacacggaagcacgggtctcgtctcagtctcgccgctgcgtttggaaagcagtctcgggcccgcgccgggctgaggtgtcccgaggtggtggcaactggcagtgccctcagcccccgagtctccagcctggcnnnnnnnnnnnnnnnnnnnnnctttgggtcaacggttccttggccagcagcatctcctaaattgtaagaactctgtcccccagggccctcccagggctgcgaggacagaagcagnnnnnnnnnngagctaacagcttagtcaccaggacccnnnnnnnnnnnnnnnnnncttcctggagggggaagccaggaacagcagaactgcccacgaaacaaggctgtgaacttttcgggaactggaactgtttaacnnnnnnnnaggatcgtttaaagctttatttatttatagcttcttaaaaaaaaagtgttgagaagaaatgttttggttattcataacaaaaaaaaaatgagttgatgatggaaaagcaagtcataatcatctaattgtttttgtctaggtcgagaatgaatgt

SEQ ID NO: 3302 - DNA, 1848 bp, Macaca Fascicularis
taaattatcatctgcaaaggatgctatggaaggtgttaataagttctatctaacttcaggagtgttcactggggccatagaaacttgcaaccctgcttaaagggaagtgatgtgcgtcatcagcagacattcactgccagtatcatctgtaaatattttaaatttcaggaaggattctataatgccacatatatttcctaaatcatggaagttattgctgcatagggattaattatgatattgagcgaaaaccctacagattttgctttataggtaataacttaaatttgtacaccacccctaaggggtcagtgaaaccatcatccccatttcaaagataaagagaggtacagagaggttaagtaacttagccaaggccacacagtcggggtagaactgggatgtgaactcatttagtctgttcctggctttgaaaaatcacacaataatgccttcctaaatctctgatgactaatagtagggacattccactccccacaaatagcaaaagtgcttcaatttacccatttgtcatctggattcatatatctgatcctgatttttcaactcttttccaagctcttcacctcaatctgcattatcatgatcacacaggttttaaaagttgtttcatttaatgcatgtcaggaatggttactcttgcagaacatttgtcttttacctcaaggagttaagaactaaatcagatctgtaattgactgacttgtctactgacagcctttgaagagccaccactccccaccttgtttttctgtctaaagagcaagattgacatctctttatatgtttaaaatttgtcagttgtgtaaagtgctcagtaatgatggaaattaacctgaggctttatctgactacctttcctagcaactccattgaagatctgataacaattaaaattttgatgcaaacaactgttcacatcagaaaaaaaatattttttttctgtcttgtcatacctttcttcaaaatattctgggtagtagtggctcttttcctcacttttcaccgcactggatgcatctgaatgaaaatttccccagccaaaatacaccagcacattagaaaaggagataaagaaaacaaagtaacaatgcatgttgaaacggtctgacggtgaaacactgaacataatttatctcttcttgtgtcagtagttgttatctccttaaggagaactgagtaagaacaggtctgcacagggtagcatttgtggccttacttctgtctgtttatttgggatagcctttgaattgtctcccactttctttcctcccactgtgaaaagatgaactattatgtatgtaacccatagggatgtgattcaaagacagtgtttatttgacctgtggatatcagatatctaatataaaccaaaacccaaacagcatcaacacataatcaagtggcagtagtttgcagaacatgggtcagtagcaattaagcaagctacacatttctcaagtaacaaatggaaaacaattttgatggtcttctgtgataccagcattctttttagatcttctctgaagtatcaggcagacggactgccctgtatattcacaacctctatctgctggcaggcaaaaagcccaagaacctacctttaaagttattttaatatatcggttttgctcggattagccaagttagatgtcgaccattggtatgggaaaggttgggaattaatttaaatttgagctaacctcgtcatcatctcttgctgagtgagtcccttagcctgtgagacattcttttcagatttgatttctccattacttggttgatactctctccttgaaaggaaaaaaaaaaaaaaaaaaggccaca

SEQ ID NO: 3303 - DNA, 1878 bp, Macaca Fascicularis
attcgtggcatcactgaaattgggtttactaagcatttatggacagcctacgagatgggtactgtggaggacagcctggcgatgcaaaggcctggctccaatcagctaatttttcagacctttgatccattgatcctttgggcagtctgggcttgcttggttcagtgagaggcagcagaggacgagagaaattgtgcagggctgagagctgtgaagtcaccgggtgagcggtgtgaccacaccaggccaaggaagaagcacgtgcccagcctgccatctgccctcctgtcctggagccagctctttccaccagcttccttcgtcttttaacacttggtgaaaaggaatgacacgtcagtcacagccactggccagtgctcacggagcatctggcaggaggaagcgccttcctggctggcctcccattcatcagtcagagccgcaggctgggccaggaagctgcatttgttggccaggatttgagatttctttcactgaggcctccggagagtcattccaaaggtgaacatggagcacaaactcaagaagtgaaaccacatgtactgcctcaaaagcaacaaggcaggagggtgtcgaaaaccccgggggggagatacaaaggctcaaagttctgcaacccgcaccccttggaaagagggtaggtcagctcctctcccaacccaaactcccagtttgaatttttaaaacatcagccttctaagcaagcatctgccactgtccggcttctgaatgaaaggtgaagatcagagaaaggaatctttgtgttttcatcaggtattttagcaaatgcaatgaggacattcagatttgatttccctgttttgtacacacacataagtcggtgctaagaggattagttttcctgcaaccacgtccttcctaaaggccccggtcaaaagagacccttgttcaacagcgttctctctgattcctctggcttttcttccttacctcaatgtgcacacatctagcttgctcctaaatccacccacctcgcagactttgggataacgaagatcccagccctccattctcctcccgccccggttccttaataaagctggagatgaacattagcgcttggttcagcagcatccgaaaaggaaagggtggcctcctcgagccctcgacgccccatagaaaaatgtagcctttttgcctctgctccgatgaatggcttttcgagggttttcatcagggccgggtctgctggtgcagaaagcctcacagatgttgacactttttcatccctgggttaagatgtcttccataagcttttattcctcatttgttacttctttattatccgggaggttttgcctcctccctcttctcctttctctgaagagagcagcggtagctgagcccgtcattatctcggcccttttctcctgcctccagaggcagcccgggactcgggtcccattgtggcgaacagcaggtagctgaggcaggccgggtcactccccagacccttttgtgcagcccgtcccctcctccctgcagcttggttctggggatgtaaaaggtcaggagcagccaagcttccatacctgagcttttgtctggggctggaggcaaatgattttagaagcaatttcttggaaagcagcctggagactcccttctccctcgttaaaatgcacagctgtactcctagcccaccccttggggctgggggtgaggagacagggggattagctcagatcatctggatccaaaaatgccctgagaaaaaactttctacatggaggatggttgagacgattcagacggaagcctagagtccctgagatgttaagcagagcgggttttgtaataaacagagtgcactgttcctcaaaaaaaaaaaaaaaa

SEQ ID NO: 3304 - DNA, 2287 bp, Macaca Fascicularis
  misc_feature (1)...(2287): n = A,T,C or G
tttctggagatttttgggtggaaagataacagatctgacttctatgttaagtcaaccttaaacacttttgttttccttgcttttatttaaaattactgtctttcaaaacctggaaccttttttgtaggtcagtatttatacaaagagaattagcaatatgaaacctggagggccatctgtgagttgcaaagcaacacctgtggctgttactagccaactagcataatcataatttggagtcatttgacctgactactaggatttttttttcctagttcatctacttatattgtactttttaaagtgagttttaagtctcttctcataatttgttgcctcagtttccttttttcctataaaattataaacagtaatactatatttgcctccttcctaaaagtataaacattgaggtatttattaaggatttcatattcctttcaataaaaatattctagggaggcaataatgataaagaacatggactcaggccaggcacagtgactcatgcttataatcccagccctttgggaggctgaggtgggtggatcacttgaggtcaggagttctagaacaggctggctaatttttgtatttttagtagagatggggtttcacaatcttggccgagctggtctacttgataatttttaaggagactcacctaattttcttacattttgtttttgtaggtaattttaaccaatcagatgacaacaaagattgataaaaatcaggccttgctcgttcctgcattaggtgggtaattaatcagataaacattttagttaatcacagtttttcttatctctttcatttgattttccagataaacattttagttaatcacagtttttcttatctctttcatttgattctcattgaatactatagcttcatgaaagcagactgtatttgtcttattcactggttaatcttagcactaagcacagtacccttaaatactggctgttccttttagttatttaacatttattgagtggccagacacagcctnnnnnnnnnnnnnnnnnnnnnnnnnnnnnnnnnnnnnnnnnnnnnnnnnnnnnnnnnnnnnnnnnnnnnnnnnnnnnnnnnnnnnnnnnnnnnnnnnnnnnnnnnnnnnnnnnnnnnnnnnggacatggtggcgcacacttttaatcccccctacttgggaggctgaggaatgagaattgcttgaacctgggaggcacaggctgcagtgtgctgggatcgtgccactgcactccaacctgggggacagagtaagactcttaaaaaagtgcgtatctactgtctggcaactatagggtcaaaattcttgcccccagggagttcacagtgttagagagaaggaagggtgaatacacttaaatacaaatcacattacagtgaatatcgtggttttgttagaatgcaatgcttcaaggtttatttccactaaaatcttaaagagtattctaccagagttttggccaggcacggtggcttatgcctgtaatcccagcactttgggaggccgaggtcggtggatcatctgagctcgggagtttgagaccagcctgaccaacatggagaactcagtctctactaaaaatacaaaattagctgggtgcagtggcacattcctgtgatnnnnnnnnnnnnnnnnnnnnnnnnnnnnnnnnnnnnnnnnnnnnnnnnnnnnnnnnnnnnnnnnnnnnnnnnnnnnnnnnnnnnnnnnnnnnnnnnnnnnnagagcaaaactctgtctcaaaaaaaaagtttctgccctggactagttttcaactaatggcatagatcattctataaacagataatgtcgtaaaggttacaatagaaaggtacagggtactgtacaaaggacagattctaacctggcccaggtgagcaggatgaaaaggaggaaggttagggaagggagtgtaatagtctcatgtttcttccacctctttttgtcactttctatcacccatttaattaagagcttcctaatgtttggatccactcaggggtaatcaaactcagcctttctcaaactcattctttcagcacgccatgataaagcaaatttataaatttagtgagaattataattgtcaaacagagtgaaatttatgttttctagtcagtttattttcttnnnnnnnnnnnnnnnnnnnnnnnnnnnnnnnnnnnnnnnnnnnnnnnnnnnnnnnnnnnnnnnnnnnnnnnnnnnnnnnnnnnnnnnnnnnnnnnnnnnnnnnnnnnnnnnnnnnnncaaaaaaaaaaaaaaaaaaaaaaaaa

SEQ ID NO: 3305 - DNA, 560 bp, Macaca Fascicularis
agggagggaaagtaggcaggctctaccgtatcggccagccctagccctccgtgacctggcctagctcccctagccttcgaggggtctgaagggcgctggcgcagcctatttgcataatattggctgtgaggagtccccgcggagaaaccgatgcagccttgcggcccagggctggtcagccttggcagtggcgtctgacctagagtctggggcagctggtctgggaaaggctgcgccacgcaaccgagggttggacccagggcctctgctcccttcccaccgcgcccagcccaccccgccctccctccctgatccccgcaagccaggtggggcccagaggggacgtcactccctttctgcagaggcagccccggaagggcctggatgaggctgctggacaggtcagcggggcaccctcctcccggagcccacgcttctggtctgaggctcggatccccactgcctcctgcgcgcggaggaggcgagaagcgcccggagacgggggccacagacggcaccccgcaggctgccattccttcaaccaagatgtagagaacgcc

SEQ ID NO: 3306 - DNA, 1654 bp, Macaca Fascicularis
gatgtattccttaaagtatttaaaatatgcaaatgcactgcagcctatgaaaaatatgtattgctacaaattagagtagttaacttctcaagttaaaccaatcactgaaggaatgtttctatctttgaaggacagtgtaagttctgctaagtattgtaacttggtgacaagccatctatgttagatgtgcttttaattaacgttttccctaactgcagcatctttctcttcgaagaatggctccaagagaatgaaaatatctttttgctttatgtaaatgtcaaaagtctcactgatcaacatagtcctaggaaaaatggaaatagtttttggagaggattctacaacagacttcagaatgaatgaccttatcagaaaccagcttaattcttcataccacttttaaaacaaaattgaaaattaattttaaattttgatttttattgtcatatttgcataaaatttgagtgtatgagagaaaaatgtagaccttatttttataccaagtgtacaaaagggatcctaagtagtagtattagtattgctgccaccttagctatatcctcttcattactgtgaaacaagacacaagcttctatgaaatataaacctacatataaagccaaggttttatttagtctgaagaaattttttaaaaaattaacctctgattttcttatcaagacaaataaacaaactgacacagactcccaattaatttgtggttaagcctaacatttacaagttgtagaaataatagtcaaataattagtgcttattaaaaacaaaaccgttccttccaaaatcaatttctgtataagttttgaaaaggtgtaacatctacacttgacattgatctgtttcaacttcaaagctaccaggtattagcagaaacagctcacgaattatcagctctgtaggaaagcattattgatgacaacaaaagaaaatcttaaattttgatgcaagaatattgatctggtttctgtgtctcagacagttttggttttaaattagcaacaagttaggagtctctatatggtggtaaatatgtgtccatggaaatactaacaaaaacatagaaagaaaactcattatcttgaaaaaaagtaaaacttaagtcaaacctctgccagtgtaactggttttcttttaaaccataacttaaaagcattttatttgattaattcaaattctggcacaactttacagtgccaaccgacaattagaagaaaatctattcttagctttgtccacttcttaatttagaaagtccaggtttgcaacaattgaccttttccatgctaatgttttgggactaatttctaaacagttctccttctctctgtccaaaatcagtatttctttttctccttatagtagactataattcacagtgataaaaaatgtatccagcccggtatatacacatatgtaaaaatgggcaaggcaaattcagggttgtgaaaacttggaaattcagtcaccagaaatagagtaccataggcttaataacaggggtgttaaatattcagccttcagctttttataattccaagcaatagggaacacagaagatatgatcttactattattaatttccaaatgataaagtcaatttcaacagaaaaaaaaaaaaaaaaaaaaggccaca

SEQ ID NO: 3307 - DNA, 721 bp, Macaca Fascicularis
  misc_feature (1)...(721): n = A,T,C or G
tcagagctactagatgacttattannnnnnnnnnnnnnnnntccttcattccttctctcccagtgacctgtgtacccccaagctttagaactgaaccatctccaacttagaactcattagagtttgttgcattagtgattggatctcctcatgaaagttttttgaccaatgacagtggagccactttaagctagccaggcccaagatagggaagcactgctggtttacatttctgctctttctaattcagttgtctattgcatgcagtcatcccttcccttgacttctccannnnnnnnnnnnnnnnnnntccttacttgtccagcttctctacctacacactaacatgcctttccccatggnnnnnnnnnnnnnnnnnnnnnnnnngacannnnnnnnnnnnnnnnnnttagttctgctcttttgttcctacccacttctaaatcttcctccatttaatcccttattcttataaggagtctaatttttgtgtattgtccttgattagggcagctgacagctttacaccaaagctgaagtctctcatttaatcctaagcaaggggctagagagaactaagatatccctcccatatcaaggggcataggttactagaagggtggaggtctcttaacaggctcactcacctttcagagtttaaattatgatcaggcttaagaagctctctcttgtgactgagtgtatttgcatagacatgtct

SEQ ID NO: 3308 - DNA, 733 bp, Macaca Fascicularis
  misc_feature (1)...(733): n = A,T,C or G
cacgtgattgaaatgatgactctannnnnaaaagggaaaaaaccatgtnnntgtttacagaagagaaactgaaacaagccccanncagctcagtcacagaagaggagaacatagaaagtgttaggatcatgaactctgaaaaaaagaaatctttgctttgtggttcctttaaacacactcacacacacttggtcagagatgctgcacttcttggaagcaaggactcaaaggcaaggtgcacgcagaggacgtttgagtctgggatgaagcatgtacgtattatttatatgatggaatttcacgtttttatgtaagcatgaaacacaggcagtatgagagaaagcaaggccnnnnnnnnnnntccgtacactacgtatgctgtagagccattttgtatgttgtgtaaaacaaaaagcattgatcaaaaagcaaaaggtgatgtatgtatatgagaaaattaattgtacgatatcattccagtacgttttgttgtacattttagtcttgtttactttctcttcattgtnnnnnnnnnnnnnnnnnnnnnnnngtttccagctagttacccatattagagaagaaataagaagagagtattagaagaaaacaggagagaaagaacatttgtgaattgcagttgtcaaaaaaacaaaaaaatagcctagnnnnnnnnnnnnnnnnnnnnnnnnnnnnnnnnnnnnnnnnnnnnnnnnnnnnncattttctcaaaaag

SEQ ID NO: 3309 - DNA, 1841 bp, Macaca Fascicularis
  misc_feature (1)...(1841): n = A,T,C or G
aatactcagctagctactcaagagctttggagaaaaacaataaagtaaaaggaagagaatattgatttcccagtcttggccaccagctccacctcttctcactataagtattgagatgaatgaatttatgtctctaaaagcactaagcaatcttaaagagagtacggctttataaataaaagagctttattattatcgggtagaaatgttagtgagaaagttggaactcttatcaaagggtgttggtgccccgacatttgctgtcagctctgaaaaggtggctgtgaaactcattgattttttacttcacagcatactttttttttctctcacatgaatggagttccaacttaatgcaatatctggcccagaatagatgaggtctcgctgtgttgcccaggctggtctccagttctcagcctcaagtgagcttcatgttgatcacactgctccttgcatttgccactgcaaaatcagcagcctcattttcaaaatacccttgggacatgttataatttctgtgatttcaaatctccttgcattagttatattttggcctggtaacactcatgcaaggggcatgttcattacacctggagaggctgagaactgacattagcaagccgaagatactgctgacaggagcttgtgtaggcagagaaagtactaaagagcaagtttggagttgattattttgcacaagaaacaggaacaaggggaagacttttgaggagtgggttagtgcagtagcctcctactgggctgtctgcttccagcctcatcctcctgtgctctattcaacacagcagagaggacgttttaaaccagagtcaggtttagtcactcttcatggcttcccacctcattcagagcaaaaatgaaattccttacagtggacaaaggtcttaggtgatctggcccattactttccttaatgcctgcctcctctcactgagttcctgccacggtggcctccttttcttccccaaaaaacttggggcaaggtcagacatcagagtctttgcctttgttgatgcctttgcctacaagctcttcccccaaatatttacttggccagcatcctcaattcttctaagtcttctgtcaaatatcatcccaatgagattttctcccccaaattgacactttatcttccatcattgccttattttttcatgttacttatcacatctattaaaaaattttaattgactcattaagaatagaaacatagggcnnnnnnnnnnnnnnnnnnnnnnnnnnnnnnnnnnnnnnnnnnnnnnnnnnnnnnnnnnnnnnnnnnnnnnnnnnnnnnnnnnnnnnnnnnnnnnnnnnnnnnnnnnnnnnnnnnnnnnnnnnnnnnnnnnnnnnnnnnnnnnnnnnnnnnnnnnnnnnnnnnnnnnnnnnnnnnnnnnnnnnnnnnnnnnnnnnnnnnnnnnnnnntgagccgagatcacgccattgcgctccagcctgggcaacaagagtgaaactccatctgaaaaaaaaaaaaaaaaaaaaagaaagaacaacaacataggctatctgagagtagggattgtcaacagtttttcttcatggttctattaagctaaagacttaagtgctcaaaggatattagcctaatgaatgaaataacttggactctggaatcaatagaccctagactatgccctagaatgaaatttggatttgaaattgagtatttcactgtgtattaaaaaaacatattctacttcaactttcatgaaaatgctggattgaattaaattatgactaatcccaatctcataaatttctatttattaaaaaaacacaaactctaaaaaaaaaaaaaaaaa

SEQ ID NO: 3310 - DNA, 1958 bp, Macaca Fascicularis
  misc_feature (1)...(1958): n = A,T,C or G
ccgatgtttccaacaatagcaaagctataacgtatttcttcactaaatctagcataattcaattacatgtgtgatttaattaagctcacatccaactaacatatttcagattactggcagtctgttattgccattttgggcttacagtagctctttattcactccttgatacataactctccttgaactttgtgccaaacactgtgtcaaccagatacagaaaagaagaagagcccaacactgtcccagcccagggggaagaaagagcagctcctcagaaagagagtaactctactgaatctgaattagacggtaattccaccgcgtgatcaagcactcctcctaaaagaattcttgctgctgccatgctagaaaaacaatcccaagttctctattttcgccaagaattcaagaatgcatacttccaacttactctcccttgatctacctgtaatgtaaatcaatctctcacccatctgtcctctgtatttagatattcctgagtgttacagccctgtcatagattaagttcctgcacttcagtttcctgttcacagttcatcccttgtgaaatctaaattgcagtgtatgattaagtgtttcgtgaacagaaagtaagatcagggaaactcaacagtatgtgaacacatgacttaaaaaatgagggagctgaggcgggcagatcacgaggccaggagttcaagaccagagtggccaatatnnnnnnnnnnnnnnnnnnnnnnnnnnnnnnnnnnnnnnnnnnnnnnnnnnnnnnnnnnnnnnnnnnnnnnnnnnnnnnnnnnnnnnnnnnnnnnnnnnnnnnnnnnnnnnnnnnnnnnnnnnnnnnnnnnnnnnnnnnnnnnnnnnnnnnnnnnnnnnnnnnnnnnnnnnnnnnnnnngcctggggccagggtggtgatggggagggctggggaaatgaaggaagtaaaaccatcagagtttgtctgccctacaggcaaaagcaaaatatcactttaaatctctctaccccgtatgaatctaatcaggctttgacccttagaatttctcatcagaggaaatatttgttttatgaatgttaaagaatctcagaccacgttgccagggacctgcagggggaatgtgttcaccattccctcgttttttattttgctgatttttctggatgtgattattctctacccctccttcttactaactctgtgatttgacgaggatcttggtgtgactcctcgtaataaatatggggtcaaaccagactttttgtgcttgttgctgattcttaaaagtttgcaataatttaggactcaagaaacttcctacattttctagaaattctggttccacactttgatgctaatcaataagagaaaggtcttccactcagccatcctgacaaatacggtgagcttgtttttgcctgctgcaattatccagtggccagaggctcctgaagatttggatttgaagatatggtcatcattgcttgtgaaacctggcctaatacggtctctcaaggcttcagcgatgcactcaagtgcgcgtaagatgacccgggcagctgctcagggccgtgtgcctggtcctcctggaatgtgaactcttttcttgctgaacaaactgcccacgtaatattcttttcatgaccgtgtggaagcctccgtgtttgcaattagttgtttttggtaactgtgcttcaatgaatcctataattgtttttatagtaactgtgcttcaatgaatcctatcttaaactgtacaaatccctgcactcgtgcagtagcgagttggaattaatcactcattgaatttacattaattatggaaacatcgagcatctgctaaatttgctagaaaaaatgcatttttaaatggagctttttgtgatttacagagtataaatgcaagtgttataaccaacaaaaatatgtgacccaaccagacaaaaaaaaaaaaaa

SEQ ID NO: 3311 - DNA, 2576 bp, Macaca Fascicularis
attacccaggaggtaactcgcagatgccacactgatggaaagctacggcagcgtggttcgagtccagggccagctggagcatatcagcaaggctgggcttggacgtatgtgctccacccagtgggtgggtctgtggagctggggtgtcgtgagagccagagggtcctggtagaaccctgccagatgacaggaaagaaccagtggaatcgaggcagggagccgaaggagctcaggaaggagcgagccgtcatagggcgggaggctcaggagccagcaggaaaaacattgaccaccgatgatcccgtttgtgtgctgggaatcagcaaaacaaatgttatttttcaacctgtggcagagctgaagaaccaaatggattttgagcacaggattcccaaagaacggtggtggctcaagctgcggcccctcatgaagatcctggccaagtacaaggccagctacaacgtgtgagactcaggccagctacagcacgtgcagccctggagcctctgatccagtcccacctgcacgtgcctgcaacctggactcaccgtggaccatctgtttttgtaatacttaagttattgatcagcactttatgcaggtattggcattaaaacctaatcagtgagcacctgtcaccacccgtgtgccccaccagctccagtgcgtgctgtctgtggactgtctcatgctttcagatgtgcgtattaaacatttgcctacaactccaagtagggtggctactaagggttttctcagcagttttgtgggcaaagattatcaaaatatttttatagggatcactgaactatgcgcaagtcataaaaggagaacaaagctagtagtttacacaggccaaggggaatgccatgtttacttactgttacatatttgtcacgtgtcagtttccatccagagcagcaggccaggaccctgggcctggaccccaggctcctgcttctcagggactgcttccattcggccgccctgttgaacttccgtctgttaggaggatgctcccacagggcctcggtgtgatcagtttcatgaatcagcacaggcggaggtgggacacctttgtgtgccttttcattctgcttctgctttttaataaaggccctaaatgctacttaaaataatgactcaagcagaggttaagtcagagttgcccttttagattcttaaatattctagaactaatgaggtaaaactagcctttgtcagtagaaagtaaattctatgtggtgcatctttggcactttgtgcataactatttcaatgaatgtcttcctagttgctcttaagactgacttgccagtcagtggcaaaaccttaagaatgacataatgttcttggaaaaagcagtagcatttctgacttttcatattcagctctagaggccgattttctcaggggctcctgcacagtcgggcgtgccagggccactcatctgatgatccaggatgggtccttggcgattttggggttctcgggtccgagtatggccaggccgtgcatgctcttcccagtgccgagagcctgaggggaaggcaggcgaggtcagcgaggactggcttctgcgtcagtgccgttaaggcctccattcccagacaccgtctcccccgctcctcactcacctatagctgacagtgaagagctgctccctgtgggcctgcttcatctcatctgagaggccgtacaagaagaggtccattcctagaagacaaactacaggcacagtgggctgtgcatttgtgtcccggagtgaggcaccccctgcgaggtggggagtaatagccacccccctccccccgccttggctattaggagccatggtggactcacagcctgtttaggatattgtgagtagtatcatctgcccctctggaaataatgaactgaatggggaacatccaggccccgagacccactcaggagcagaaaacggggaaggagccttgaacagaccctcgggagggcagtcagcaggagccatggaggccaccaggagggaggaaggaaggcaggcagggaggccagaggtgacgtggtggggagaggagacgtggccagaggcaacgtggccagggaaggagatacggctggaaggaagtgacaagaggggtctccaggcctcagactgtgcctgatgtatggatgacattttaactaagatgttatatctaaagtagcaatttagaaccattgtgtacatttaaagcacggtacaaatatagcacatttcccaaagcaaagaacagtgcgttgaaggaagaaatagcagctcaccaataaaataaaagtgagtcaagaaaaaattcatttaagatcagaaatagatcctacagctcttctagtccaatccccaccctaacatgaatggggggaaaagggaagtagattctagtcagtcagaattaaaggcaaaactgatccactttactttctacttgacagaaaacaagaagctcatcaaggaaatccctacgaacagtagctttaggagtccccaaaatgcaaaattcaccttcaaattaaatcaactgctaagtgtggaaaaaaaaaaaaaaaaaaaa

SEQ ID NO: 3312 - DNA, 1130 bp, Macaca Fascicularis
  misc_feature (1)...(1130): n = A,T,C or G
tattgacttatctaaacctcaaaacaactctgcaaggaaggtatgattgttattcccattttacagaagaggagactgagacacagaggtttaagtgatttacccaagatcatggagttagtaagtggccgaatccgcattcaaatccagatagtctggctccggagtccgctctctgccccacggctggttgccttggttcagcaacagtgactgtcacacggagccctcaggaatcgcgctgacaatgtgtgggccctgccttcgagttccacactgtttgtatcattacaacactactggaagtaggtgcagttatagacccgcttgttcaagatcagctgaaatgaaagtcaggtcatacaagtccatactgtggagccacctaaccaccaactccaagcaggaaggtggacaatcccagactcggttgaagacaaccatgtctggtttgcttgtcttccttctccacgtggatggcacgaacatggaggaatgcatacttaccctgccagcccaagaaaactccacatggaggagggggccaggggtttctactttgccttgagccagttgctgacactgtctgaatcctgtctgtaaaatgaagtaatgctgctcctcactcagagttgtgtgaattgggagagtgctcatatagtgctctgtgaattgcgtaacatccattttgctgttgaagatcttttattttgggttcttagtctctcacaaaaccttagaacactgagaccaagatttgagcctttccctttccaaacataattcccgtggacacctaaatgatactttgtttccagaagtagaactgacaaccacacctcagccccagagcactttgggaggccgagacgggcggatcacgaggtcagnnnnnnnnnnnnnnnnnnnnnnnnnnnnnnnnnnnnnnnnnnnnnnnnnnnnnnnnnnnnnnnnnnnnnnnnnnnnnnnnnnnnnnnnnnnnnnnnnnnnnnnnnnnnnnnnnnnnnnnnnnnnnnnnnnnnnnnnnnnnnnnnnnnnnnnnnnnnnnnnnnnnnnnnnnnnnnnnnnnnnnnnnnnnnnnnnnnnnnnnnnnnnnnnnnncaaaaaaaaaaaaaaaaaaaaaggccaca

SEQ ID NO: 3313 - DNA, 726 bp, Macaca Fascicularis
  misc_feature (1)...(726): n = A,T,C or G
actggaccgaaacannntggaaaatatgcttgtacgggttcnnnnnnnnnnnnnnnnnnnnnnnnnnnnnnnnnnnnnnnnnnntgaagacacagactaaaaaggaacgtttcagaagcaatcgggataaaacagcattagatagtcacgctgctagatctttattatggaaaacatttcaagtttactccttctgttttgagttttgtagcagtgtacccacactgggtattaccatgtaaataatctgtgagtgaaagttgccattattctatgtagtggttttaggatacttaacaaatacattcaaattctttttttattattatttatttgattaggtatgtttgtaactttttacattacagaatatgaatgagaatgtgccatgtataatttttttcttgtagtaagaaacatccatattgcacaacgctactgttgcaaagcttccttggaagggggctcttttactgggttcttaaccagatggttgtgtatgggtagcactactaaaagtttagaacttgcagtgtctttcggaatttttaaaataaactgtaaactaataggctggggtttttgttttgttttggggttttttttgttttgttttgcattttagttactgaagccttacaaggttatgtagagagataccatattctgtaccaaaaatagacaagagaatgctgtcaatattggtgtactgtaatgtgaatctat

SEQ ID NO: 3314 - DNA, 543 bp, Macaca Fascicularis
  misc_feature (1)...(543): n = A,T,C or G
ttaccaaagctaggaaagnnnnnnnnnnnnngnnntnnnnnnnntggcatgagannnnnnnnnnnnnnnnnnnnnnnnnnnnnnnnnnnnnnnnnnnnnnnnnnnnnnnnnnnnnnnnnnnnnnnnnnnnnnnnnnnnnnnnnnnnnnnnnnnnnnnnnnnnnnnnnnnnntgtcgctcctgttaatgggaggatcattcacacannnnnnnnnnnnnnnnnnnnnnnnnnnngtttttggtgttgatttttannnnnnnnnnnnnnnnnnncccaccctgaggagaggacaccatggcttactactcaggacaagtatgccctgctcagggtgtnnnnnnnnnnnnnttccaaacttgtacacagtttaaagatggtggagacagattttgcctctgcctagtgaaccccacttaaagaataaggagcatttgaatctcttggaaaagaccannnnnnnnnnnnnnnnnnnnnnnnnnnnnnccaggttggtgcgaagggcttgcgaggggaaataaaaannnnnnnnnnnnnnnnnaacat

SEQ ID NO: 3315 - DNA, 773 bp, Macaca Fascicularis
  misc_feature (1)...(773): n = A,T,C or G
aagaatgccagtgggagatatnnnagaaactgtggacctttgtgacacttgggaggccctggagaagtgcaaagacgcannnnnnnncaagtctatcggggtgtccaatttcaatcataagctgctggaactcatcctcaacaagccagggctcaagtacaagcccacctgcaaccaggtggaatgtcacccttacctcaaccagagcaaactcctggagttctgcaagtccaaggacattgttctagtcgcctacagtgccctgggatcccaaagagnnnnnnnnnnnnnnnnnnnnnnnnccccacatctcttggaggagccaatcttaaaatccattgctaagaaacacagtcgnnnnnnnnnnnnggtcgccctgcgctnnnnnnnnnnncggggagttgtggtcctggccaagnnnnnnnnnnnnnnnnnaatcaaagagaacttccagatttttgactttgagttgactnnnnnnnnnnnnnnnnnnnnnnnnnnnnnnnnnnnnnnnctccgatatgataagttacaatttgctgctaatcacccttattttccattttcnnnnnnnnnnnnnnnnnnnnnnnnnnnnnnttaccaccacaatttcctccttttaggtgacatagagaggatttctgtatttgatagaggagccggaagtaggatctgaacttgcaggttgcttgcctttcctttcttttatgaaatgaagactttaacaggaagatgtttgtttttcctgataaagtaacacccataaatttttt

SEQ ID NO: 3316 - DNA, 742 bp, Macaca Fascicularis
  misc_feature (1)...(742): n = A,T,C or G
tacaaacaatactaggagtgcgcacgtatacaaaaatcgtaatgatacagaggttagnnnnnnnnnnnnnnnnnnnnnnnnnnnnnnnnnnnnnnnnnnnnnnnnaatatatttattaactaaaaaccaataggaggagcacttcaagtcgagtctaagggcccttcacagaagcagaaggaacactggtccaaacccccagcaccccagaaggagaggtgagatgggagcagcctgggagccccccattggcgccgtcctgctgggaaagccagtcctaagaacaagtcctaagtcaaggaannnnnnnnnnnnnnnnnataattaggaagcacttaaaacagcctggcatttgggaacagccatgttaacgggagcaaattcccctcatgaaatagcctgcagctgttaagaagcacgtgtgtgcaggaagcggccgtgcaggacctcactgcgccagtgtgannnnnnnnnnnnnnnnnnnnnnnnnnnnnnnnnnnnnnnaatcagagggagaaagggagagaagggggagggagacaacccaaacgttggagggtatttgttgtaagcttcaaactttcggcaggtttgaaatgtttcataactccagggaggaggaggaggggcgaaaagaaacnnnnnnnnnnnnnnnnnnnnnnnnnnnnnnnnnnnnnnnnnnnnnnnnnnnnnagtatatgcctttttgtatcctttgaatttccagtcatgtaaatatatt

SEQ ID NO: 3317 - DNA, 2696 bp, Macaca Fascicularis
aagtagaactgaggctggcacctagactgtggtgggctgattcatagaggctgggttggactgaatggagaagagataaaactgtgagaaagaaagtgaaaaacatgaaaatccatgagtcaatatggaccaaacctagggcaaatgtgtggaggtttcaggaagacacatgtcatctcatcaaaaagaaggacgtcaaggtttgtctgagctgcactgagccccgtggagagtgaatcttctgcttccggaagttttcaaacaggttgcaaaagactgcaggctcaagtacccagttgaacctgaggatctgtcggatatattcagtagagataagtcatgtgggcagatggggctgctaggagaaatcgcatgtttcattgatttcaggaccagcccaacattagaattctttctcttgaactgcactgctgggatacaatttaagagtactctcatttacctggtctgcctctgtgaaacctgcgtaatgtaactgagatcacccggaatttttgtgaagccaactgaagatttttaagggaaggagaagagatttcacgtctggtgagaatgtccttagaggaatatcttcagtgggcatgacaggtattgtgtccaagaaatctccagactgctttccacagtgactgatctaatttacattcccatcagcaatgtttcagtgaattcgggactcagtaactccattagtgactgcacccacacagacctttttctaaaagtctccacatttgtccggttgtttcttccttggtccaatgccaacgctccatcaatactatcgtcacccccattctgcctcttccaaaagcccgcatcactcatggagtcctcttcacctgaaagaaacatttcaaaaagaccagctcttctcctatttgaaggcttgactcttttctgaaaaagtttggtaaggtctggcatttgaacactcagccacatgcagcagaacctagcacatggaggacagctgactccacagaaccagtgactggggttttgcaatggaacaaatacggttgctgctgcttctaacaattagagtgctttcagggtctgctcagttcaatggctacaactgtgatgccaacctccacagtagatttcctgccgaaagagacatcagtgtctattgtggggtgcaggccattacgatgaagattaatttttgcacggtacttttctcgggttattcggaaacagatctggcactgaatggaaggcacggggactcccactgcagagggttcatcaataacaacacctttccagcggtggtcatttttatcatcaatctcagcaccttggagggctgtggaaacaacttggtggtatccacaattcctggagtcagtgcttatggaaatgcaacttcagtgcaaataggaaatatttcaggatatattgatactccagacccaccaacaatcatcagctatctacctgggcttctttacaaatttagttgtagctatccattggaatacctggttaataatacccagcttgcttcgtcctcagctgctatttctgtgagagagaacaatggcacatttgtcagcactttgaacctgctcctttataacgattcaacctacaaccagcagttaattatccccagtataggattacctttgaaaaccaaagtatttgcagctgtccaagccactaatctggatggcagatggaatgttttaatggattattgctatacaactccatcaggaaacccaaatgatgacattcgatatgatctcttccttagctgtgacaaggatcctcagaccactgtcattgagaatggccgaagccagcggggccggttttcgtttgaagtgttccgatttgtgaaacacaagaatcagaaaatgtccactgtcttcttgcactgtgttaccaagctctgtagagcagatgactgtcccttccttatgccgatttgcagccacagagaaaggagagatgctgggaggaggacgacttggagctcccagagctcttctggcagtgcggtgctctctgctggtcccatcattactcggagtgatgagactccaaccaacaattcacaacttggttctccaagtgtgcctcccttccagctgaacgccatcaccagtgcactgatatcaggaatggtcattctgggagttatgagcttttctcttcttgtgtgcccactggcccttctgcacaggaagggacccaccagtttagtgttgaatggcataagaaacccagtctttgactgactgtaacaggtgcctcctctctagagaaggcttcactgactaaactatgtgtgactgcagtcagtgttccatctgaatttcatgtcagtccacattcaatatttgtaggtttgataaatttcacagtgtagcttgtcagcgcaatgatagtgaaagaagtttataatattgctattgtcactgatgcatgtggccagccgtacttttatgccaccaatgaatatattgacaataagtgaaaaatattcaggacttagctcttccaggattagtaatatttcattttacgtcagtttgcttttgattgttggttaaaagataaaaggttggagtagacaaaaaatgaaatgtgttgcatttcccccttaagcattaaagcccagtgcagcggcatttagatttgcaaaaaaaaaaaaaaaa

SEQ ID NO: 3318 - DNA, 4438 bp, Macaca Fascicularis
aaaaaaaaattttaagcaggaacagcagcctctgcagcagttggcacatctgagaaggcagagattgaagagagtaggaggagtgtgcagcggcggtgacagtgccaggccggcgcggctcaggccagcgcaggtgcaggggctgcgggcgggtggagcgcgagagcgcagagcgcagggcgcagggcgcacggccggcgggcggtgcagggcgcacggcgggcgagcagctgacagcatcgtcacggcggcgggagggagcgcgctgcgcctgcctccgggaggagccgcatccacacaccctgcgctgccctgtcctgcgcgagcggagctctgaagaagctctgagcggagttgtgttcttccccaggtgtgtcctggctgatagttggagccctccagcaacatgcctgagcagagcaacgattaccgggtggccgtgtttggggctggcggtgttggcaagagctccctggtgttgaggtttgtgaaaggcacattccgggagagctacatcccgacggtggaagacacctaccggcaagtgatcagctgcgacaagagcatatgcacgttgcagatcaccgacacgacggggagccaccagttcccggccatgcagcggctgtccatctccaaggggcacgccttcatcctggtgtactccatcaccagccggcagtccttggaggagctcaagcccatctacgaacaaatctgcgagatcaaaggggacatggagagcatccccatcatgctggtggggaacaagtgtgacgagagccccagccgcgaggtgcagagcagcgaggcggaggccttggcccgcacatggaagtgtgccttcatggagacctcagccaagctcaaccataacgtgaaggagcttttccaggagctgctcaacctggagaagcgcaggaccgtgagtctccagatcgacgggaaaaagagcaagcagcagaagaggaaagagaagctcaaaggcaagtgcgtgatcatgtgaaggcccttcctgcgggaggagcagctgtgtgtccccggcacctcactccccccaagtgacacccaccgtcgtcagggtagcatgtacaatgcccacgtgttaaacattgcatttaatcgagatgcgccctatagtccttaagagggcgttccacaccaccaacagtaagccaccccctctggagtcacacaatctgccaggcggttcaagtgaaaaccaaaacgctcagcatccccgggaactgagagctgccagcaatttctgagatggcgatgaacacccgaaggtgggagggaggactggtacccacaaagcaacatgtaccgagaggactaaatgtcatctacgtgcatgtgagagcctgttaacccagagctacccgcaccaaccccagacagaagccaatcacatctttgggggaggggaggggcaggaagaggtgagaagatcagatggtccaaagtggaccacagttggtccattttacacatttttaaaggggattaaaaaccacagcctctcccccaaagggtgttcattcttaattcccacctggcctgttaggagccttgctaccctgagggcatgtgttcacctcacgtagacctagttaggaagtatcattttaacctattagagtatttatcttcatgtgcagggataagtgcactaatagtgtgctgctctgtcagaagttcttcagttttgaagtgaggatatcgtgacagtattaaaacatcgcaataatgttcctgtgtgttatacatcgagggttttagaaatgtgattttcttcttttgatctgtgaggagtataacttctttcagccctcagattttaaatataagcaaatagactcggtatttttagacgtttttttcctccaaggtggttttcttctcttaaataactcaatcggtacccagctgggtagcagccagcaaaggccatcagacaacctgaagcacatccatttttgtagtgtcacaaacatgtatatgccacactttgcaccttaatgaaatactttgaaacagaagttattcactgtgtttttgatgatctatctatattggaaatatattcctggaaaatgcatttaagtaatagtaaattctcctgcatgttccattatacatgtcttctaagagcggttcgatacagtattcactctagaaacaattatctttttctcctaatgattttgtgtgcatctttaatctttcaagccaaattacagccatttcaggtttcctgtgttagcttggggataggatggtagctggaaacaggcaggctgctctgccctgggaggagcccactcagcttaattgctctgccatcgtagagcatggttggacttggcttcctgaaaactcccactgatagtgcctgttagatctcctgtttgtttcagttggcagaacatttactggccccaactgtggcatcatcctctgagcaatcttcttgtcacccgcctggcaggcagaagaagctgcagtcccacgtgggcctgcctggggggtgggggctgcctggctgttgggtggcagtgccagcacaggcagggcttaagttggggatgtttgactgtgccacctcctgcaactgctgtttctcctgtccctcctgtgcagggttagcagcagcagcaatgtggccatctccatcccccaaagcgcacttgctctctcaatatgtcctagttttctttagccttttctggttcagttcccttgtcctgatctcatcctctctggtctcccaataactcacccttgggatgtgtttagtacgtgggaggtgcctttgagaactgcttgactccatggtctcctagaacaaaaccgccctgactttgcagggggagcacttatgctgagctgagaaagcagagaagtggcctgggagccagctgggggtgcagagcatttgggccagtcctgtgccccgcttcaaattcctcaagcaggattgttctgttctagaaagctgttgcacagcattcgcaatgagatctttagttggcggattttctggaacatttgtttttcaacttgtcccgacatttttttctgtttctattctgagagagagatgatcaagttttaatttgggtataggttaaatggaagaagaaacagaacttcatggccaaaatggggtgtatagattttgagtgggttctttgctaacggtagaatgtgatatttaccaccgactatagtgttaataaaacttttaatgtgagacattcctacgaaccatcccatttctactgattgtaagtcagaatttcttttatccctttcaaatcggtttctacataagtgtttagggcttcatcagcatgagaagtttataattactgaaaatctgatttcattcaggacacgttttttccttcatattttgcctgtgaatttataggctaggaaggctattgaagcttcaattatgggtcttcattttgagatcattttctatgagccgaactgaggatatcgatgattatcgcaaaatcatcttttaggagctccccaattgactcagggtttgaggagttagtatcacagaatcaaatttttttaaagcatttgtatgtttccattcccaaatatgtagctgtggttcttgaaaacacatcctacattgcatatgggcacagcagtttttgacccagccagaatcagttaatatttaattaaatattgctttgaggatggcgctctgggcatgagcatggggctccatgacttcccttctgtccccacgagcccctcctccatccagcgacaagccatgggcatgcacacaatgcagcaagaccaacacaagagcaatattggattgttcattctatctaaaattacatgtatataaaacatataatttatcttcctgcatttttgaagtataaagtcataaattgtacatatctgtaagctagtatacttgtttcactgtttgtaatatttaagaaatgctcattctttgtagaacaaaaatgtattaaatattttaaaaattgctctgtgatacttaatttttttcccctaaatttgtaatgtgttgcttctacataagttctctggaaatatctacaactaataggacacatgtaaatccttgaagacacatcctggaattcagtaccccacaaggacagtgtgtatacaaagtatttgcagagcatgacttttatatgtgtgggatatcgatgtgtatatttatatttaaagtgtatttattgttacaagtctattctctattatattttatttactctgtggttataaaaatcacccttgcatacaagtttctagttgccagtgatgttctggaaataatgggacatattacaataaagttcagttatgacaaaatggatggaaaaaaaaaaaaaaaaaaaaaaaaaaaaaaaaaaaa

SEQ ID NO: 3319 - DNA, 725 bp, Macaca Fascicularis
  misc_feature (1)...(725): n = A,T,C or G
ctgcaaatcggggtgaagtcacaggtcccgggtcgtggagactccatnnnnnnncnnnnntgccagccaacgtgtcctcatctcaggccaggtcctggtaccccatgtctgcccaggtgggcggccctgagcccaggggacttagtcccctccatgaccaggctggcagaaacctcccaacagcggtctgggcaccgtgggctctccccacctctcctgccttgtttgcccctcagcgtgccaggcagactgggggcaggacagccagaagctgagaccaaggctcctcgaagaagggcccggaaaggccccgcccttgggacagcctcctctgaagccctgcacagcaccagctccccggcaaatgcagcaggccacctcccgcagcggctgtgggtctgcacagcacggcccgagaccaccaggagctgggactctgctacacgcagtgagacgccatgtcctttctccccctgccccttgatgcccccctccccacagtgcccaggagacccgaggggcacggtacaggagggcctggaccccgtgggccagccaacagctaccagacagctacaaccagcccagccaccatccagtgcctggggcctagccactggcttttcacagtggaccccagcacctcggggtggcagagggacggtcctcactgccnggcagatgcacaagcttctggagggcaannnnatgtgacatctccaaca

SEQ ID NO: 3320 - DNA, 707 bp, Macaca Fascicularis
  misc_feature (1)...(707): n = A,T,C or G
aaactgagaaggagaagggcagctnnnnnnnnnnnnnnnnnnnnnnnnnnnnnncacggcctcaggagcaggagtctgtgcagcccccaggcccagcaaggccacagagcttgccccagggcaagggccgcagccgccggagccgcaacaagcaggagaagccagcctcctccttggacgatgtgttcctgcccaaggacatggacggggtggagatggatgagactgaccgagaggtggagtactttaagaggttctgtttggattctgcaaagcagactcgtnnnnnnnnnnnnnnnaactggaccaannnnnnnnnnnnnnaaaccactcccagcacagctcagtgaggccctgcccaggctgagcttcnnnnnnnnnnnnnnnnnnnnnnnnnnnnnnnnnnnngcctacaatttttccgtgtgccccacctatccgcccaagaccttctctgctccccaccatcctggaccaaccaaaagctgaacggatgccacactgtgctggggccccttgacctcagcagagccgcttcctggtgctacgcagcctccacactcagagcccgtggactgggctggcctaagggccggggctgatggtactgctagcccaacactgctctctttgtgttcagtttttttgtttttgtttttattttatttttttcacaattctttacttttgatactgtgaagatcttt

SEQ ID NO: 3321 - DNA, 742 bp, Macaca Fascicularis
  misc_feature (1)...(742): n = A,T,C or G
aatatatcattggagaggannnnnnnnnnnnnnnnnnnnnnnnnnatggctgtctagacttactaacagagatgagcaaatataagcacaagcgcagccctttattgcctcttcttatctttcataatatttgcttcagtcctgctaataaaccnnnnnnnnnnnnnnnnnnnnnnnnnnnnnnnnnnnnnnnnnnnnntctggaaagtgagaatcaaaatgctcagaggattggnnnnnnnnnnnnnnnggctctgatttacaattatcagaaggcaaaaacagctttgaaaagtccatcagtaaaaagannnnnnnnnnnnnnnnnnnnnnnnnnnaagaaaacttttccagactcagaagcaaannnnnnnnntgcctattatttgaaatgtcttgaaaannnnnnnnnnnnnnnnnnnnnnnnnnnnnnnccatgagatgctacaccttgaagnnnnnnnnnnnnnnnnnnnnagctcaagttgaannnnnnnnnnnnnnnnnnnnnnnnnnnnnngacatgctacctctctacaaagtgttgatcccctnnnnnnnnnnnnnngannnnnnnnnnnnnnnnnnnnnnnnnnnnnnnnnnngcagctctccagaagtaatagcagctgacaactatctgtgccttttccattctgttgaaaaggcatataaagttctgggaacataaacatttttacccttttctatgccatttattttgtaaaaatcctattaacag

SEQ ID NO: 3322 - DNA, 788 bp, Macaca Fascicularis
  misc_feature (1)...(788): n = A,T,C or G
acttgacatcaatncnnnnnnnnnnnnnnnnnnnnnnnnnnnnnnnnnnnnnnnnnnnnnnnnnnnnnnnnnnnnnnnnnnnnnnnnnggcacgaatagaccaggcttgggccagaannnnnnnnnnnnnnnnnnnnnnnngaaaggcaaggtggggggactgaagacgcgctnnnnnnnnnnnnnnnnnnnnnnnnnnnnngaaagtgaactccagaaccacatccaaaccgtccaccgagagcttgtgccagacagcaacagcacacagttgaaaacgcnnnnnnnnnnnnnnatgcnnnnnnnnnnnnnnncccagtcggatgagaagaagacctatcaatnnnnnnnnnnnnnnnnngttttctacaatgaatggnnnnnnnnnnnnnnnnttgcaaatcacannnnnnnnnnnnnnnnnnnnnnnnnnnnnnnnnnnnnnnnnnnnnnnnnnnnctnnnnnnnnnnnnnnnnnnnnnnnnnnnnnnnnnnnnnnnnnnnnnnnnnnnnnnnnnnnnnnaagtgtccagtctgctttacagtatttgttcaagcaaacaagttgcagcagcatattttctctgcccatggacaagaagacaagatctatgactgtacnnnnnnnnnnnnnaagtttttcttccaaacagagctgcannnnnnnnnnnnnnnnnnnnannnnnnnnnnngcaagtacagtctctcaaggagaattgcttttgtggcacaaaaagggaacatgttttactctttgcannnnnnnnnnnnnntgttaatgtatatta

SEQ ID NO: 3323 - DNA, 717 bp, Macaca Fascicularis
  misc_feature (1)...(717): n = A,T,C or G
tggagaggaagccgccgcgaacgaaggcagcagggcaggactgtctgcatcaggggctcgtgggtctggagctcactgagaaaggnnnaagctttggtgaaatcttaactgtgccttgtcaatatttttcctcttttgcatggaaatctttgtttattctaagtaacatctcgtatatttgtttccagtttgttttatacctccctgaaactagttaagttaaaagccacctgatgctagaaagccctttatggactgtgtgtgtggatnnnnnnnnnnnnnnnnnnnnnnnnnnnnnnnnnnnnnnnnnnnnnnnnnnnnnnnnnnnnnggagctaagtatgacattcggaaccttcgtccgtagtttctgagtggggtttgttctttggaggcaatccatgaacctcccagccacagagctctcatctgattggcaattcccagcactgaagagcaaatcctgctctgggagcctcatgtatttcttttnnnnnnnnnnnnnnnntacctgggctctgattcatcagctaaattnnnnnnnnnnnnnnnnnatgcttataaaaatattctaaagtcatgcctaaactttaagggggaaaggtctagatgtttcattaaacatttatcacttttttggagggaaagaaactttattttcctctcttggggaattacccagaagccataaaatgctcttttataactgaatatccca

SEQ ID NO: 3324 - DNA, 736 bp, Macaca Fascicularis
  misc_feature (1)...(736): n = A,T,C or G
gggagagaatgcccccnnnnnttcgtcgtgctcaagtcggccagtaacccccgtgtctnnnnnnnnnnnnnnnnnnnnaatacagatatcaagggccgcctgccnnnnnnnnnnnnnnnnnnnnncctcgcggccaccatgtttgaatttgcctttcacctgcgacagcgcatcagcgaactgggggctagggcgtgactgtgccccacccaccctgcaggccagggtcctgtcgccaccacttccagagccagaaagggggccagttgggcttccactgcccacataggacccggccccaggctgtcaccctccaccgagccatgcagtgcctggagtcgactgtctgagcaggctgtggggtggagcactggactcnnnnnnnnnnnnnnnnnnnnnnnnnngggtctggnnnnnnnnnnnnnnnatggnnnnnnnnnnnnnnnnnnnnnnnnnnnnnnnnnnctgccttgccagggcagggtctgggctgggcgcctgacttggctggggagggccagcgcgggggcagggcagggcagggcaggctaggctgtcacccgtgtgaagatgaaggggttcttcatctgcctgcgctctcgtgggtttttttaggattattgaaagagtctgggacccttgttggggagtgggtagcaggtgggagtgggctnnnnnnnnnnnnnntctgcctctcccaggctgtccccctcctcccagggcctcctggggacct

SEQ ID NO: 3325 - DNA, 773 bp, Macaca Fascicularis
  misc_feature (1)...(773): n = A,T,C or G
gagatgnnnnnnnnnnnntgtgggagaaagttccacagtgaggtggccaaattnnnnnnnnnnnnnnnnnnnnnnnnnnnnnnnnnnnnnnnnnnnnnnnnnnnnnnnnnnnnnnnnnnnnntaaaggaagagtcattgaaatactctttagttggacagtctggtttccggaagacatcaagatccgagatgcctatcagatgctgaagaaacaaggaattataaaacaagaccctaaactacnnnnnnnnnnnnnnnnnnncccaccatctccctggccnnnnnnnnnnnnnnnnnnnnnnnnnnnnnnnnnnnnnnnnnnnnnnacaaggcttctaaagagcaaccaccctgaggaccttcaggccgcaaaccggttaatcaagaatttggtcaaggaggaacaagaannnnnnnnnnnnnnnnnnnnnnnnnnnnnnnnggtggaggaagtgcgaagccatgtgaaggtacnnnnnnnnnnnnnnngcatgtaccgcaggccagggcagnnnnnnnnnnnnnnnnaggccctgcacgtcgtgtatgagaggtgtgaaaagctgcggcccacgctgttccggctnnnnnnnnnnnnnnnnnnnnnnnnnnnnnnnnnnnnnnnnnnnnnnnnnnnnnnnnnnnncctcacccaaggagttctgctgtacaaacaggtgatggagggccgggtcacctttggaaacagnnnnnnnnnnnnnnnnnnnnnnnnnnnnnnnnnnnnnnnnnnnnnnnnnnnnnnnnnnnnnct

SEQ ID NO: 3326 - DNA, 652 bp, Macaca Fascicularis
  misc_feature (1)...(652): n = A,T,C or G
aggggagacagatggttngnanacatgagaaacagtcttggaggtgtnagtgnnnnnnnnnnnnnnnnnnnnnnnnnnnnnnnngttatcactttaaacattattcngattcacaaatataattaaccttgatgtnnnnacattgagtttgagggctttttcataacattaaagtgatagacttacataaattttccgttatcttcaagttactgaaagtactttatagttttttattttccttattttgtactccatgagtgaggcaggcatctaacatctgctgaaagcctttggataggtggatgctgataggaggaccctgggctgccagcgaganccagtaaggtgattcagaaattttggaaataaagtcacnnnnnnnnnnnnnnnnntgcnnncctgcctagccccttcctccctgggaaacacctgcatagtcccttcctccctgggaaactgatttgtcaagtgacccgatgaaaagaacactccttacactcagctttccaagagttggtgaagacaggacggggatggagagctactgccttctcctgtgtcagtcactccttttcctccttgcaaaattttatttccaaagtgtatgttcacatttgtaagatacaaagataactattaaagtagcctc

SEQ ID NO: 3327 - DNA, 1941 bp, Macaca Fascicularis
cattatattaaagatgaagagagcgtctcagagagggtaagaaaatacttgatgccacacagctagttagtggcagagttaggttttgaacccaggtgtttctgattccaaagcctgtgtgttttccgctatatagtttatcccatctgaaatatgtctaaattattcagataggatttttaaacctctgatgttctgataatggctagaaattcgagatttatctttgtagagaggtttgggtttccaagaaaagtcttaacaaccttttttccttctgacatacttcaattccttcagtagttctccaactggactagacaatcctacaaaagcaaaagagaccctaattctgtctgacattgtgacacaattttatgttaaacatatagatataaacatttggtttgagatgggagtaatgaaacttctttaagcctattttgctgaaatgtgacttgaaatggattgttacaagacaaggcttatgagagattcagtgctcactgcaatattaattacttggctgttaaagtgagtagctcttagtgagaacaactgcctcatagatgtttcttattgaccacataaatggggaagaaaacactatcccattttcacttttggccagaaaacaaaagacaaaggaatagattgtgtcagctaatagattgggttgctaaggtaaccaaggcctctctttcaggagaggtgttaggggctaaattatgttccttcaaaattcacgtgttgaagccctaacccctagtacctcagaatgggactgtacttgcagacaggacttttaaagtttatgtgaggtcatacaggcggatcctaatccagtctgactggcgtctttgtaagaaaagggagacatgccagagattaacatctacagtggaaaggccaggtgaggccacagtgagaggggccatctgcgagccaaggagcaaagctcaggagaaaccattcctgctgacaccttgctcttggacttccagcccccagaactatgagaaagtatgattttattgttaagctacccagtcttaacaaactaacaccagaaggattagatattgggcatctcccctgccatcaatgccatgacagttaagggagatgtcagtggaatgtaatagatgagcttttactacccagaagggtccttaacagaggctgaagatcagctggagaaaaggtttttctgggagtaaaagggaagtcaaatagtgacgtataatgatcaaacctagtgacagatatcaactggggggggggtgtgtgtattttttttttttgctatataatgtaccttataatactaatgtatttatgattattatccaacaattaccgattttcccttattttaatagctaacaactgatgaaaagatttcattggctagatactggtcaacagtgtgggcttctgccagcttgcctaggtttgaatcttgtcccacaacttcctagctctatgatttttcaggaaacaatctccttgtgcctcagtttcttcatctgtaaaatggtgataacagtacctacttcctaaggttatataagaattaaatgagttaatacatgtaaggtgcctagaaggatgcctggcatatagtaagcacctagtaaatgttagctatttcaattttaacctatctttgcacaagaataacaaatagcaaaaccattgtacctatactgtttcaccaagatacctgccagcaggtgctagctgccaccaaaattgccagtgtagaggtaaagaaaaatagtttttagattatgaaatattatgataataaagctatatttctgactaatgtgttgaaaaaaaaaaaaaaaaaaaaaaaaaaaaaaaaaaaaaaaaaaaaaaaaaaaaaaaaaaaaaaaaaaaaaaaaaaaaaaaaaaaaaaaaaaaaaaaaaaaaaaa

SEQ ID NO: 3328 - DNA, 714 bp, Macaca Fascicularis
  misc_feature (1)...(714): n = A,T,C or G
ggcactctacaaacttgtctttggatatgcaaacatcaaagaacaaatatttannnnnnnnnnnnnnnnnnnnnnnnnnnnnnnnggaactggagtgcttaaagcagttacannnnnnnnnnnnnntagtaacccattaaaatggataaaaacacttggaaactctgtgatttnnnnnnnnnnnnnnnntttaatctgtgttgtttgtctttnnnnnnnnnnnnnnngtggctcttgactcctgcaagaagtagctcactgtgacaaagctgcctttgcctttattaatttgcaaatcaaggaagggggacgtgttgggaagaagcctcccaaagtaaggccataaactggcccnnnnnnnnnnnnnnnnnaaaatctctgcagcactgtaacatgttcatgatggccataaagcccatagtggaaggttgtgggtttactggaatgagagcaaggaacacctgacctggcccgcccaggacagaaaaccgctcaaaggcattcttaagccacaaacaatagcacgagtgatctgtgccnnnnnnnnnnnnnnnnnnnnnnnnnnnntagcccaacctattcctgtaattcagcccatcccttcgtttcccataagggatacttttagttaatttaaaatctatagaaacaatgctaatgactagcttactgttaaaannnnnnnnggtaaatttctgttcgggactctcagct

SEQ ID NO: 3329 - DNA, 723 bp, Macaca Fascicularis
  misc_feature (1)...(723): n = A,T,C or G
gctgcggataagctcatccagaacctggatgccnnnnnnnnnnnnnnnnnnnnnnnnnnnnnnnnnnnnnnnntgataggcggcatcaccggccccattgccaaactcatccgcgagcaggagcagcagagcagcagctagagacccctttggccacaccttccaggcaccggcctgacaccccgccctggtgctctccccaggctccctcctcagcctcctgcccacccagggccctttactctcttctctctccagaccttcctctgacccttgctgaactggggtccttttgtgagtgtctcagtctaggggtacctccctccctggggtgtctcagcccctggagtcagtgggctcttggggcccctctgtgagatctcagtgctgtctgggggccctaagagttttctcacctgttcagtctcatctaactttccaatgtctgatgttcctgcccaattcctgccagattctgggtctgtcctaacctccagaggtcagcctggtgcttgaggtctccctgcttttggtggcagtggcggcggcagcagcagagacctctccactttccttccgtagcccctctgttgggtagagaggcactttcagggacttccctccagttgcctcttcatctgggagtgagctaagcaaggctgagcctcctcccgttgcttgaaataatggtgatataaaggccggattggagtttgtatcccc

SEQ ID NO: 3330 - DNA, 734 bp, Macaca Fascicularis
  misc_feature (1)...(734): n = A,T,C or G
tgcaaatatagtatatagggttttatgtatctgtcannnnncttcccctagtgatagcccaaaccctttttatggacacaaatctatcacattgtgagtagatttctatctactgtcacattgtgagtacgcttttgagggtacatctatataggcctgcagttttgtctgctgaaaggactactttggtttaatgagacagcaggtatatgactgcctcaggtaacatatactaaaatgttttttttgttttcatgtttttcttgaatatgaaaaatgctcatgttttgaaatgattcataatgaaaatttcttactgttaaacagcttttactgataaagcatatgtaaaatgcatacctatcagtcaagtgctgagcttaatttttcatgtgtatacacccaagtgactattaccaacataaannnnnnnnnnnnnnnnnnnnnnnnnnnnnnnnnnnnnnnnnnnnnnnnncaggcagtagtcctcaaagggtaaccnnnnnnnnnnnncggtggctcatgcctgtaatcccagcgctttgggagtccgagatgggcggatcacgaggtcaggagttcgagaccagcctggccaatatggtgaaaccctttctttacaaaaaatacaaaaattagctgggtgtggtgttacactcctgtaatcccagctactcaggaggctgaggcaggagaattgcttgaacccagggaggcggaggttgcagtgagcc

SEQ ID NO: 3331 - DNA, 2408 bp, Macaca Fascicularis
attcatacttgcaagatggaaaatattaatactatccctattttagttgatgaagaaattgaaacactgagagatcagatgagtttctcaaagacaaacagttcctctaggggaaagccagagttctaatccataccctctcacttgacaatcaatgcctataccaacagtttaatacttagtcaaaatggtttcatatactttatcttatttaagtgatatttataagttcctttaatagaaacatgtctctgatttttacagtttattcatttattattcatttgcttatttttaccttataccagaagggtaactatgctaaccaatgtaatatattgttttgaactgagttatattagttgcaaatactgagaatagaataatataaagaattttttaaacctgtttcatcttttttattttgatgtaagccatctacttttcagaagcagtaataatttcacaattgttaaaaaattttgaatgtcattatcaggtagaattattttcttttactgaatgctgtgtccaggaattagttttttctttggtacttatcttccaattttatgaatacttacaactgaaggatcatgtagctttttatgaagtaattatttattttttgcactattgaatactttttcttctttctgttgttagtgcttttttaggaccaacgctgggtggatttctgtatgagaaaattggttttgaatgggcagcagctatacaaggtctatgggctctgataagtgtgagtaatgagtcttttattttcattttccttatatttgtggaaaaacttgacttggaaaattcacattaatcagtacttttaattgtgtttaagggattagccatgggcttgttttatctactggagtattcaaggagaagaaggtatggtcaatctgggggcttttttctctctttaaaagttagccagtgcaagtggaaaataaataacattttacatttattcttccagtctgtggatttctaggcactctgaggctcatcagttgtgtagatactcttttaatttttattttttgagatggtgacttgctctgtcacccagactggtatgcagtggcacaatctcagctcactgcaacctctgcctcctgggttcaagcaattctcctgcctcagcctcccacgtagctgagattacaggcgtgggccactatgccctgttaatttttgtatttttagtagagacaggatttcaccatgttggccaggctggtctcaaactcctgacctcaagtgatctgcccaccttggcctcccaaaatgctaggattacaggcatgagccactgcgcccaggcagtagatacttttttaaaaagatagttggatggagatagaggtactggttttatgtttgtttgtttgtttgtgtttaagatgagaaatattgatattcatctctttccttcaatgtaggtctaaatctcaaaacatcctcagcacggaggaggaacgaactactctcttgcctaatgaaacctagtctgatggatcctggattgatacaaagttgagaaataaatgcttctggccttaaacatcactgtaggaagggtttctaaaattttacgcacaaaactccgtggaccccatgccagtgtcttggaagtgtcaatgtgtttttggatggtcttgtattgggttgtacttactgtgatactgaaaagcagtcctgccgaactagctatatttgaaatattaagtatgaaagaggtaattaaaaacaagcaaaacaaaacaaaacaaaacttagtttttaagtgaccaaacttgtccttgaagatgttgttattaacttgagttagttctcatttcctctgtttattttttattctgagtacactaattctgtgaatgtacttttttatgaacagggaaataaatgaactaatttgatatgctctaaatatataaaggtgcttcaaaatatatacaaacattactatgaaatcagtttttaaaagatatactttctctttgtcctgaggtttttcggtcttgttcaaaaggaagaattcttgcctgccatacagaaactctctagcactccctggctttaaacgtttctaaaaagtctgtttatgtgaaaagtacaagaataacaatacttacaacttccatttttgtaacttacgttcacttatgatctggatttataaacattacttggtataacgttgttcatttcctttaatgtctctgttttttggttctgccatctgttttgtttttgtttttatccatattcttggtagatgcatttcatccctagagcaagtcagcctccttcccctaatgcaaatgcttgttttgttagggaagggcttcttccaacttcgtgtgaaatccatgatgttgttaaag

SEQ ID NO: 3332 - DNA, 514 bp, Macaca Fascicularis
cagatgcttggaaaccaaggaagaatgaatggtctttatggataatgaatggctgaataggtgatttgtgcgaccacaaaaacaaaaaaaaaaaagaaaaaaaatgaaaagatgaagcaaggaaaggagggaggaagggagaaagattactttgatatgccatatgattgaaacaaatgctcttttttcaaagacaaggattatactcctttgcattccagctactttggtccattgtaacttggtaacctttgccttgaaaacaaagagaatccctggatataatctccttccttgtaattttttttgtaagatgtcagtatggtaataggtccattagcaagtaagtacagtcacatcttattttattatacttctcagatagtgcattttttacagattgaagagtttgtggcaaccctgcatcaaggaagtctgttgacatcattgcaatagcatgtctcactttatgtctctgtgtcacattttggtaattcttgcaatatttcacact

SEQ ID NO: 3333 - DNA, 614 bp, Macaca Fascicularis
  misc_feature (1)...(614): n = A,T,C or G
agcagttggaaactaacgatatatgtattnnntggttagtgacagttacgaagtaagantacaagagaatttgaaatcttccatacaataatgattnnnnntgctnnnnatatcnannnnaagcagttcttattggtgaaggttcctttccttatcacatacatacacacacacacacacacacacacacacacacacacactaccaccaccaccaccacaccatgaattaaacaaagtaccacacagtgaaagagattagaggtnnnnnnnnnnnnnnnaatttaaaatgtnnnnnnnnnnnnnnnnnnnnnnnnnnnnnnnnnnnnnnnnnnnnnnnnnnnngaaaactgttgaaaacacatggtgctatgttaaacgtaaaacaccnnnnnnnnnnnnnnnnnnnnnnnnnnnnngtaaagcaagtcactttatacatttcttcttggaaaggaaaaataacatcattaatgctataaaaatgagatggtgataaataatgcttgagattctctttggtccatcagctgctttcaagaaagttgaaatgattaatgctaagtttagtatgaacttgacaaaatatatatacagattacattttttaagtga

SEQ ID NO: 3334 - DNA, 771 bp, Macaca Fascicularis
  misc_feature (1)...(771): n = A,T,C or G
aagcatagctggaaatcaannnnnnnnnnnnnnnnncttaaaacgtgccagcttaggctgggcgtggtggctcgcgcctgtgatcccagtactttgggaggatgaagcaggcggatcacccgagatcaggagtttgagaccagcctgacgaatatggagaaagtctgtctctactaaaaatacaaaattagctgggtgaggtggcgcgtgcttgtaatcccagctacttgggaggctgaggcaggagnnnnnnnnnnacccagggaggtggaggttgcagtgagccaagatcaggccattgcactctaacctaggcaacaaaagcaaaactccgtcttagnnnnnnnnnnnnnnnnnnnnnnnnnnnnnnnnnnnnnnnnnnnnnnnnnnnnaacctgccaagaagagatgctgtagatgttactcttacactgtaaaacattgtgaaatcggattactttaaaatgatgtattacaaagttatggaaaaaagcagttgtgactatggaatcccaaggcttatatcccagctctgtcttacactaaatatgagtacagtgtttccactctgtccgtaaaatgggagctaataccctccaacctgtgtgcctgacatgatggctaaaaggattaagcaaaacaagagtttgtaatttactctnnnnnnnnnnnnnnnnnnnnnnnnnnagggagtaagttgactaaaaataaatttaaaaaaaaattctgataaaacaagtttgtaatttataattgtatacaaataaaaga

SEQ ID NO: 3335 - DNA, 679 bp, Macaca Fascicularis
  misc_feature (1)...(679): n = A,T,C or G
nnnnnnnnnnnnnnnnnnnnnnnnnnnnnnnnnnnnnnnnnnnnnnnnnnnnnnnnnnnnnnnnnnnnnnnnnnnnnnnnnnnnnnnnnnnnnnnnnnnnnnnnnnnnnnnnnnnnnnnnnnnnnnnnnnnnnnnnnnnnnnnnnnnnnnnnnnnnnnnnnnnnnnnnnnnnnnntgatccaaagagcccctgccctgcttcctgctcttaggttttgatgcttgcactgtcatgcaaggagccccggcttgggaggcaatgtgactgccttctacacaggtttactagggcaacccagctgcgatcaagacagaaagctcctacccgtgttgagcttttatgcaagaggcaaaagacagaacagcagaattagactcccagttcagcctccctctgactctgaccttctctatgaaaatgggagaccgggcgcggtgatnnnnnnnnnnnnnnnnnnnnnnnnnnnnnnnnnnnnnnnnnnnnnnnnnnnnnnnnnnnnnnnnnnnnnnnnnnnnnnnnnnnnnnnnnnnnnnnnnnnnnnnnnnnnnnnnnnnnnnnnnnnnnnnnnnnnnnnnnnnnnnnnnnnnnnnnnnnnnnnnnnnnnnnnnnnnnnnnnnnnnnnnnnnnnnnnnnnnnnnnnnnnnnnnnnnnnnnnnnnnnnnnnnnnnnnnnnnnntt

SEQ ID NO: 3336 - DNA, 731 bp, Macaca Fascicularis
  misc_feature (1)...(731): n = A,T,C or G
gcacagctcccnctgntnnnnnttgctgtttgggcatgtgaggcatgacttggagggggcctggtgcctggggacctgctgaagagaatgctcaccaccagccctctgtctccctttctgctttggtaatcaacacgtgtttgcctgcagtggccgggatgatgactgtttctgcccttgtgcctagttaagagccttcaaaagcataatggacatttttgatatgccattgtaactttaataaatgctttatttccctctaattgccctcaaatgccttaattttgtggactgtttatttcaacaggtggaagtgttggtcgtgtgaaatcttggtgtgcacatttcaagaagaagggagttcttctttctttcttctttctatggaacgtttcaagtgattggatagaaagaaggactctgaagcaggacttttcacctgctctcagggagcttcgggctccagggacgtaccccaaatgttgcccagtttgaaactccctgacagcctgttttatttagtggctcgtggtttccagtttgaagagagttgtgcccctaaaaatgtttgaaacccgtggctttcaagtaaggtgccattgtccccacagtgttccgtggggtggggggtgatggagactgtgggcaagcctgttgcttttggccccctgttgttacatgggacctgttttcacagtgggagggtgagatgtgacagattcgggatgaac

SEQ ID NO: 3337 - DNA, 688 bp, Macaca Fascicularis
  misc_feature (1)...(688): n = A,T,C or G
gcagtggcaggatcttggctcactgcaacctccgccttctaggttcgagcaattctcgtacctcagcctcctaagtagctgnnnnnnnnnnnnnnnnnnnnnnnnnnnnnnnnnnnnnnnnnnnnnnnnnnnnnnnnnnnnnnnnnnnnnnnnnnnnnnnnnnnnnnnnnnnnnnnnnnnnnnnnnnnnnnnnnnnnnnnnnnnnnnnnnnnnnnnnnnnnnnnnnnnnnnnnnnnnttccagcctcttgccttttatttccctcttgcagctatgctatgattcagagtcagaaactatcaagatctggtctgtaaataatttcaaattcaccagacacagtcataattatccagcacgtagatttcacatggcatgtgaattccactgaaaactcatctacttggggaagaactaggggactttcatcaaagacttagtggaagttccaaggtcttttggcagagcctcgtaaagcatggccgcagatgagtaatgaaaacaggtgtgtgcaacctctgccctccttattcttccccattccaaaccctttctcttgaaaaaggtacatgcgatcttccattttgactttttttttttttttaagagacagggtctgagtctgtcacccaggctggagtgcagtagtgtgatcacagcacactgcnagcctcagctcctgggctca

SEQ ID NO: 3338 - DNA, 162 bp, Macaca Fascicularis
  misc_feature (1)...(162): n = A,T,C or G
aaaaagcattttgtgagcactttgtgtgcccagcattatgataggcacaccacataagtgtgtgtggggggtgtctatacgccatcttatcagtgtcttttcacccaccagatttcacgggtgcctttgcnatatgtgtaggaggtgggaccttttgtgggg

SEQ ID NO: 3339 - DNA, 727 bp, Macaca Fascicularis
  misc_feature (1)...(727): n = A,T,C or G
tnnnngtgtaannnnnnnnnnnnnnnnnnnnnnnnnnnnnnnnnnnnnnnnnnnnnnnnnnnnnnnnnnnnnnnnnnnnnnnnnnnnnnnnnnnnnnnnnnnnnnnnnnnnnnnnnnnnncatcttttgtatccctagcagagacggggcctcaccatgttggccaggccggccccaaactcctgacctcaggtgatccacccgtctcagcctcccaaagcgctaggattacaggcgtaagccaccacgcccacccaataactctaattttttaagcttataatatagcttcaaaataataaagcaaaactgataaaactctagggagaaatgagcaaatccatttttgcagtgggggattttgatgtatctctctgtaattgataaatctagctaactaaaggttacataaaatttgaccaactctaccagtaaacctgatcaaagggaccgaaatagattccaaacacagaaaacacaagctttttaagctacacagagcattaaggaaaaatgaacactttctaggtcatgaaacagacttcagcaaaatttaaacgactagtattttacacactgcattttctagctacaacataattaagtttgaaatcaataactcccatacatactaaaaattttaaatatattgctttctaaataatctgagtctangaaaaaatcgcaatgaannnacaagatatctggaancnaatattaatgaaat

SEQ ID NO: 3340 - DNA, 655 bp, Macaca Fascicularis
  misc_feature (1)...(655): n = A,T,C or G
ccccgtgctggaacttcctgcnccagctgggatctgctcccaggcaactgtgtgaattttacattatttggagcctcgtctgtgtcaggctgtaacattctatcctcatttgtaaaacttccccatccattattccttgcactataacaactgtcaacaccaactgttaggaagttactattttgctattgatcactgaataaacatcagagtattttaaaaaacagttctctagaaagaactgttaaaatgagtcggaaaggtgaactagtattaacgccctatatttgatggcactttatagtacataaaattaatttcgccccattctcatttgacccatttcccaagtgtttattcaggccctaacatgtcaggaactcttctgggtgcttgagagacatccatgaataaaatagggagagacgccattgacctcgtagagcttacatctcgtggatgtacctgatcttcagaacccatggatattcctgcaaatcctctgggcctgtattcatggctttgtcagcatcttgacctgaaatgcatttgccacctacctcttgttacggaatggtctctgccctctagacccttgtcatcaaggcactcggggtcctggacacccactggggatggtgagctggtagcgacc

SEQ ID NO: 3341 - DNA, 1891 bp, Macaca Fascicularis
atactgggaagaccacactgaggccaccaggttgagagccacctggctggggggcttgtccagggacagcacgggcagaggcatggaggttcacaggcaggaaatcgggcagtgaacccaagtctcctccagtcacatcaacatcaagagctgaactgggactagaagtcaccgccccagggctttttgctaccagaactgccgggtgaaaatctttggaagagaagtttgagaacctgttaaacaagctctccaggtaattctgtgcatgttcagggtgaggactgctgcatctgaagagctacttggctttcgagtggccctgcagtggaggagcggagtaaccccagtggctgaaagcagaggagaaaatgtttcatcacgggccctcaccttctgaacactatttgaacatggaattcaatccttcagatcatcctcgggccagcacaatattcctcagtaaatctcagacagacgtgagagaaaaacgcgagagtctcttcattaaccatcatcctccaggacaaatagcaaggaaatacagttcctgctccaccattttcctagatgatagcacagtcagtcaaccaaacctcaagtatacaattaaatgtgtcgctcttgcaatatattatcacatcaaaaacagggacccagatggaaggatgctcttagatatttttgatgaaaaccttcaccctctttcgaaatccgaagtgccaccagattatgacaaacacaacccagagcagaagcagatttaccggttcgttcggacactgttcagtgctgctcagctgacggctgaatgtgccatcgtcaccctggtgtaccttgaaagacttttaacatatgcagagatagatatctgtccggccaactggaagcggattgttttaggggcgatcctgctggcctccaaggtgtgggatgaccaggctgtatggaatgtggattactgccaaatcctgaaagacatcacggtggaggacatgaacgagctagagcgacagtttcttgaattgctgcagttcaacatcaatgttccttccagtgtctatgccaagtattattttgatcttcgttctctggcagaagcgaataacctgagctttcccttggagcccctgagcagggagagggctcacaagcttgaggccatctctcgcctctgcgaggacaagtacaaggacctgagaagatctgcgaggaagcgctcagccagtgcagacaacctgactctgccccggtggtccccggccatcatttcctaactgcggaggcccgccggaggccacaccatcccttagtttctccttcagtttgagaaaagacagacttggggtgggtttgtttttgttttttctttccttttcttttttaacgcatagttccgtcaggctgcctggatgagcgcccacgcagcaaggcttggaggaagcgtcagtaccctggaggtcccagctggctctcaccactgtcagcaacagcacttcctttgtggaggaagcagactccaatcctgcaggaggaaataaagggaaagggaagtcgtggagaggcagggaaaatgattaagcggcccggccctctggagtccccgtgggggcggtagctgaagttggtgagcgcagcggtggatgcagagctggctgcacccagggctggaccggtgtgtcctgtaagacttcttgcattccttctgctgcttttttgggatgggggggatttttgttcgtttgtttttgccctgttttgattttggtcccacagagcaggggatgtagtttgtacccaccatggcgcagacttccaaataaatagtactggtcaaaaaaaaaaaaaaaaaaaaaaaaaaaaaaaaaaaaaaaaaaaaaaaaaaaaaaaa

SEQ ID NO: 3342 - DNA, 714 bp, Macaca Fascicularis
  misc_feature (1)...(714): n = A,T,C or G
tcaagaaaaagcannnaacagctcccnnnnnnnnnnnnnnngctcctctttggggagtatcgtaaaggttcnnnnnnnnntgaagttgatcttgcggaggtctgttggtccctctgaccnnnnnnnnnnnnnnnnnnnnaccctctgcccnnnnnnnnnnnnnnnnnnnnnnagatctccccagagtggtccttgcnnnnnnnnnnnnnnnnnnnnnnnnnnnnnnnnnnnntacacagggcctccctcacccagcctggcccctctgttgagcactctgcaccgctcttgatgggcagcagtgggactgggtactccttagagagggccttgtgactttacannnnnnnnnnnnnnnnnnnnnnnnnnnnnnnnnnctccnnnnnnnnnnnnnnnnnnngagagnnnnnnnnnnnnnnnnnnnnnnnnnnnnnnnnaagaatcatgaaaccacaggagcatgtttaggannnnnnnnnnnnnnnnnnnntgtctctcaaaggacacagatgataaatatttattgtcttagatcatggattcctgatacctctcactcaaggggaccaaaaggaacccnnnnnnnnnnnnnnnnnnnnnnnnnnnnnnnnnnnnnnnnnnnnnnnnngatatatatatatatttttctttannnnnnnnnnnnnnnnnnnnnnnnnnnnnnaaagtgatctctttttgcattggttgtatttg

SEQ ID NO: 3343 - DNA, 790 bp, Macaca Fascicularis
  misc_feature (1)...(790): n = A,T,C or G
ttcagtccatannnnnnntccgatgctatggatgtctgacnnnnnnnttcacaacttagaattatttttaactctttaatttctttgggactttcccagacagaannncttcaaccatactggaccgaaaacagattctgatttataatgcgagtattggagtgaacgtcaaaacgtccaaggtcattttgacctttcttaaaaccgataattactagcctacctgtagccaccgatgtggctcatttcccacatccaaagagagaaatgagttagtttgaatgactgttattcttaaaatacgtgtacagtaccaggcattagtctcacttggggcgctggtgaagatgcattcagtagctagtgttcttttatcacgggagagtttggagcttttcaaactttctttgtggctttatgcataacttactttgattttatcagtcagtgcatcgcagtctgggaacgatttagccctcggtggagatgcagtggctttttagaacaattaagcaggttattttaagagagaacaacatgttttccaaaacaataacttggtggaaacaaatagcaagagtgtttggcaggcgttttttggatgtgctacaggctttcctcccttgttgcttatttttattgataaacatccctaatgtgtgtcatgtctttgtctctcccctttcctctctttttttctaaaattatgtaactttcgaggagagttacttctgtgataaactcttcaagtaagaccgttataagatagattggaaataaagccccagtg

SEQ ID NO: 3344 - DNA, 745 bp, Macaca Fascicularis
  misc_feature (1)...(745): n = A,T,C or G
agacatgagaagcggcatgtgagtctcnnaggcccccttgccccccgcccccgcctacctctcctctcccctggccctgcccagccagaggaggagcccccctgaggagccacctgacttctgctgtcccaagtgccagnnnnnnnnnnnnnnnnnnnnnnnnnnnnnnnnnnnnnnnnnnnnnnnnnnnnnnnnnnnnnnnnnnnnnnnnngccactagctgccgaggacatgcccaggaccgtgcagtctgcgctttcctctcccacctgcctagcccaggatgaagggctgggtgacnnnnnnnnnnnnnnnnnnnnnnnnnnnnnnnnnnnnnnnnccgcggcgccttacgcttcagctcttggtccactggtcgcctcttttagggtagatgcggccctgatcaggcctgactcgctgctctttttgttcccttctgtctgcttgaaccatttgcctcgggctaatccctccctcttcctccaccccgcactggggaagtcaagaatgggggcctggggctctcagggagaactgcttcccctggcagagctgggtggcagctcttcctcccaacggacaccgacccacccaccgctgtgccctgggagtgctgccctcgtaccgtgcacacgggtgctctccttttgggctgcatgctattccattttgcagccagaccgatgtgtatttaaccagtcactattgatggacatttgggttgtttccaatgtttttgtta

SEQ ID NO: 3345 - DNA, 738 bp, Macaca Fascicularis
  misc_feature (1)...(738): n = A,T,C or G
tgcctnnnnnnnnnnnnagtagctggggttacaggcgcacgccaccacgcccagcnaatttttgtatttttagtagagatggggtttctccatgttggtcaggctnnncttgaactcccgannncaggtgatccaccgtctcggccttccagggtgctgggattacaggcgtgagccactgtgcccagccatctataattttctggtagtcacacnnnnnnnnnnnnnnnnnnnnnnnnnnnnnnnnnnnnnnnnnnnnnnnnnnnnnnnnnnnnnnnnnnnnnnnnnnnnnnnnnnnnnngtannnnnnnnnnnnnnnnnnnnnnnnnnnnnnnnnnnnnnnnnnnnnnnnttgccactactgtacaacattcagtgcccacacccacctgtgccattaaggttttttgagacatgagagatgcctcttccctgctgtnnnnnnnnnnnttgggaagttggaaagaaatgacaacatcagggagaaaacatccaagcttctcacctgtaggtagaannnnnnnnnnnnnnnnnnnnnnnnnnnnnnnttcaagaacaataacaacaacaaaattagtcgacatccaagaagcaaatattaggaccaaagatagcatcaactgtatttgaaggaaccgtagtttgcgcattttatgacatttttataaagtactgtaattctttcattgaggggcgatgtgatggagactaactcattttgttatttgcataaaaatt

SEQ ID NO: 3346 - DNA, 783 bp, Macaca Fascicularis
  misc_feature (1)...(783): n = A,T,C or G
taggagacagagtcaccatcactgcccgggcaagtcagggcattagcagttatttagattggtatcagcagaaaccagggaaagcccctaagctcctgatctataaggcatccactttgcaaagtggggtcccatcaaggttcagcggcagtggatctgggacagatttcactctcaccatcagcagcctgcagcctgaagattttgcaacttattactgtcaacaggataacagttacccattcactttcggccaggggaccaaggtggagatcaaaggnnnnnnnnnnnnnnnnnnnnnnntnnnnnnnnnnnnnnnnnnnnnnnnnnnnnnnnnnnnnnnnnnnnnctgttgtgtgcctgctgaataacttctatcccagagaggccagcgtaaagtggaaggtggatggtgccctcaaaacgggtaactcccaggagagtgtcacagagcaggacagcaaggacaacacctacagcctgagnnnnnnnnnnnnnnnnnnnnnnnnnnnnnaccagagtcacaatgtctatgcctgcgaagtcacccatcagggnnnnnnnnnnnnnnnnnnnnnnnnnnnnaacagaggagagtgttagagggagaagtgccccaggccccccacttgctccttagccccagcctcaccccctcccatcctttggcctctggcccttttcccacaggggagctacccctatttcggtcctcgagctcatctttcacctcatcctcctcctcctcctcggctttaattatgctaatatggaggagaataa

SEQ ID NO: 3347 - DNA, 727 bp, Macaca Fascicularis
tctgcatatacctctaagattaaaatttgcagttgtcttttcatcctttgtaatatgatctaactacttatatttgtgctgcgtcgccttacatctgtttttatttcactatatatgaggacgtttgatgaaacttacggacttagtgcctttaaactgatcatcagggagaatcttgaaaaaatcatttgaagggctgatgtgaaggagcactgtaaagctttataacttactaagtaatgaatcttcttaggcagatgttaaattttttctaattcatttttatttatgtagcttgtaaaattaacataccatgttttacattatgataaaaggtttttttggtttgctgaatttaaaattatatgttactgataccatcagagggcagtgatgttctattatatattaaattcagctctgtaaagatctttgtagtaattgaatgagtttaataatctggatgggttataatgagtagtaatatatttgtccatatttcataagtagtgttaatcttgtgtactagagcttgatcataagatttatacagatgtgaaactgccaaggcaagtatgaatgtataaaaaaaaatgtaagtactgtacttacaaaaggtctacttcagatgtaaaaatattaggaggtaattctgtacaatgcatagtcataaaccttaacgttgtttattacaaacatcaattttatagcattttttgtttctcct

SEQ ID NO: 3348 - DNA, 2202 bp, Macaca Fascicularis
tacttttaaaaccagtttttgctttattttagtaatggaacgaagttagaaaaagaagttaaaattctcataccataccccccaaaaatgtcagaggaaataaaagattgaaatgtatggcttgaagccataaaagtacaataaaagatggattttctgcacatcatattaaatgaagaaaccttaaattaaaaaaataggaaatgtgaatataagaaattagtttagaaaagaagaaacaggaatggataagttagagaaaatataacattggacagagtcatagtaatcttaatatgtagcgagttcttaaagatctttaagaaagacagctcagtaggaaatgtgcacaggtggccatgctcatgacaagatctccatgtcactaatactggaagaaacgcatattcaacactgtgcacctcccacagcctggttcttacactatgttctgtgtggttctggctgctggtgcatagaaccctgtggtggagggaggtgtgggacatcggagaaggccaagaaaggtggtgagctttggctgacagagagctctggaagggtgaaggctggggatggcgtagtaacaaaaccttcagtatcagcaagtggtggggagagtgaattagatttgctcagaaatccccaaatccgtgatgatcaaaagggacctactgtaacaacagaaagagcccaataatactaggggcgataggggttaagtagaactaggtttaatatgtggcatttgccacactggggattgtgcagactcaggtgggtactaagggaaacaagatttaaagagcccccaccccttcccttccctatgccaaaacctctacctgggaggttgtcctcatgaagcaaagcaatgacttcatgcagccactcctggcctgtgcttaggagatgacctggattccaaataattgtcaggagggtagggatgggtttggaacactgcacccagtgttgtgggcatcctggtgcagagacccctttgggataagaggtggcttggatcatctggctttccagacagcttgaatcaagggtgttccttgaatgcccctgcgaacactcctttgtgggggctcatctgtagtgctgccttcccaggggcacattcattcatgggggtccttcctctctgggtgacctccgtgccttcgtggaccctggggtgccactgacaggccttttcttctctttcctttgcagaatccacactgcccagatcggggagcagtagtggccagcagatctcaggggcaaaggaggatgtcaagaggtgtgaacaggagcatgctgctgtccaggataagctcttccaggtggcaaagacggaaagagaggctgccaccaagcactccaaggcatccctgcccatgggtgacggcagcatcagccatgaggagcagaagtcagtccggctggccagggagctggagagcagagaggcagagctaagacgccgtgacaccttctacaaggagcagctggggcgtattgagaggaagaatgctgagatgtataaactgtcttcacagcaattccatgaggcagcttcgaagatggagagcacaataaactcaaggtgttccaggctcatcttgtcctttctctgccccagccctggagtcagccgttgctcccaggagccacattccttctgttggaggatgctgctagaaaccacgctctggggtctgagctccgggtgtgttccctgctacggaggtgtcattgcttctaggtgctctcagtgggaagagctgggaaacacgggccccgcagggtggagcccatctgctcagggctgcaggcccagatcctccactgctaccgagatcgcccgcatgaggtgctgctgtgctcagacctggtcaaggcataccagcgctgcgtgagcgccgcccacaagggctgaggagcagacatcattccctgtcctggcagtgacttggagccctgaagaagggaccaatcatgggaccacagtccacagagccctaggccacaggccactgtgccctgccgtttcctgctgggcccctgcatatgcccctgagcctggggctgccatgtgtttaggaaacaaagtatgcgctactgtctgaaaacaaataaagcagatgcctttgttttcagtcgttgacaaaaaaaaaaaaaaaaaaaaaaaaaaaaaaaaaaaaaaaa

SEQ ID NO: 3349 - DNA, 697 bp, Macaca Fascicularis
  misc_feature (1)...(697): n = A,T,C or G
caagacggagaacaccaannnnnnnnnnnnnnnnnnnnnnnnnnnnnnnnnnnnnntccacaatgataannnnncnnnnnccaccattgccgagggctctcacccaaatgtaaggaaacttnnnnnnnnnnnnnnnacctcctccccccatgcccgtgccttggctcattatgataacgttatctgtcaggatgatcctagtgctccccacaaaatccaggagnnnnnnnnnnnnnnnnnnnnagaggaggagtcatttaacatccagaactccatgtcgcccaaacttgagggtggcaaaggtgaccaggnnnnnnnnnnnnnnnnnnnnnnnnnnnataatttaacctaaaacagagcaagaagagagggagcggggctggtgggggggggggggtaggggaaagaaacattatctcctcttgtacagagtctatttcttgtaaccatttgttaaactcttctttttctgatctcatggcatgctttgatgtattttgtacaggaggcaaaaaaaaaaaaaatacttaaaataagcaaagaaactgaacaaaattgcatacattgggttgttttgtctgtgctgtctgtacattgcttctgctgctgtgatttctaaacctgtgctgttattcaactgacttttttttgtactttgacccaccttnnnnntattccnagaaaagttcattcaaga

SEQ ID NO: 3350 - DNA, 744 bp, Macaca Fascicularis
  misc_feature (1)...(744): n = A,T,C or G
tgcagtggcacagtctcagctcactgcaacctctgccacccaggttcaagtgattcttgtgcctcagcctgccaagtagctgnnnnnnnnnnnnnnnnnnnnnnnnnnnnnnnnnnnnnnnnnnnnnnnnnnnnnnnnnnnnnnnnnnnnnnnnnnnnnnnnnnnnnnnnnnnnnnnnnnnnnnnnnnnnnnnnnnnnnnnnnnnnnnnnnnnnnnnnnnnnnnnnnnnnnnnnnnnnngacacctggccaatttcgaagattacaatttgatgagttttaacaaatgtctatacccacaaaaccacatctcatttcgtcatcccaaaaagtctcctgtgccaatttcagtccatcctccaacctcagccctgggctaccacagacctacttttgtccactatagattagatttgccttttctggaagttcatacaaatggaatcacacagtttgtactctgtctggcatctgtcattatattatatttttttatcatttaatcctcctgtattagagttctctaaagaaacagagccagaaccaacagggtgtgtgtgtgtgtgtgtgtgtgtgtgtcagaaggagatttattttaagaaatgggctcacaccagtccaaaatctgcagggtgggctggcaggttagacagggaagacttgatattatggctcaagttcaaaggcagtctgctagccaaattccttcttccttgggggagatcagtcatttttctattaagga

SEQ ID NO: 3351 - DNA, 787 bp, Macaca Fascicularis
  misc_feature (1)...(787): n = A,T,C or G
tactactnnttatataaaatgtncntagggcccataaatcatataacagtgaacccaagatctacatatggagtctagtgaagagnntctgtgtagcctaattgtatttaaattaaggaaatcaaaaaatcctttcacccttcaccccaaagaccccttcacccttcaccagggagttctgtcctgggtgctgtcccacctatgactcctttaagaggccattggaaaaaggccatttacaagttaatgttacttgtagctttgttactaagactcacctattgttagtccagccaagtcacagaaatgcttattgcagttaaatagcaatttgtttccatgaaactgcaattaaagtattactgagcagccattttagattggcagtgctctgaacgcatgttaaacaggcagctactcccacttgcagagtctgagatctgactagcagcaaagtgtaacacattcaccgatgctgggtacctagttaaagaggcatttgtagccctcttctcccatagtgaacatgctgagagcaatgacaagcgggggctgatttttggaaggtgaacttgcaacttacctcaagtgaatactgttttcagttgtacaagaagtgctttatgctagtagatacgtgcatgtttcctagagggaatgttttcaagttcagattgattctgctgagnnnnnnnnnnnnnnnnnnnnnnnnnnnncaataatgtactacaggccctgacatgttacagctgtgtaaacagggccattctattcctaaatcacaact

SEQ ID NO: 3352 - DNA, 1994 bp, Macaca Fascicularis
  misc_feature (1)...(1994): n = A,T,C or G
gattataagaatggatcagggaatctggcaggataaagaggagattgataactgggggtgattaatggagaaaaagtggattggagagcttgagatggaagggtttctgtagtgggagcactggaactggtgacctggaagatctggaaatgtttaaatgcagaaatgtgccaaaagacaggaaacaatttccaggatgataaaataaaaatctcaggagtgaaaatctctttggggttaatgtgagtattttgaggttttcaccgcaattaaaaagtgacactaattctgaagttatagatctttgactaggggaggcagaagaagaccctctgaaccttcctggctggtcaggacaagcttactgggttttgggaaatgagaaattcattttcttctcctagaaggtctaggaagagactttgaagaatctctttattacataatcctagcagacatgacagagagaagcatgactaatgcttaggcaagtaagtaaatactcatggggcaaatcatagggagaattatgcttttaaactattaaagtccacataatgggacttacacccagtttccaactccagtgccatgtttctcctcaatgattacaaaaatcaagagtatcctatgtggatactacaagttgataagctctttattgtatggactcaaacagaagactttttttctggcactcaattgcatttagtaacaatccagtataacatggttagccaaccatagccattgcatggttccgttgtatactactagagtgtttttctcaggtgaatgtgaggcctaaaacactcaaagtgacataatttcacaagaaagtctgggttctatagagaaggttggcagtgtgatgctgaaatagggtaacatgcctgatatacaacctgaaggaatacttgaagaagtgtctggctttctgctacatatcttaagcaggaagacaggcatgttctttcttgttattattatttccttcaaaagatctgaggacctgttacatgtggtcattcttcttcgctgtgtacttccttaggctgaccagtcttatagccatggttatcttccctgcagagaatgaatattccagaatgtttggttaatttccttgagagcttttaagctttagaattttttcacagactagagatagctgtaaaactttagaaaagtgactcagtcttctaaaataaataatttaagccactgaggactttgtaatcaagtcacattttgcagaaatgagctgcatagtataaatgtctttttaaaaggacattaaaaattatgggcatcttgaagatctggaggtttgtgtttactgtatctctcatatgaggagatgcatttttaatgacagattctacctttccctggaagtctttttaatagtctctgtggataccctatgtggaaagcagaaacacttaagcatctgttgctttattactgtgatcatgttcctgaacatgtatctgttaaatactgtcttgcacattacatcagctgtcaaatgcagtatcaaaatgcagcatttagttgagtgacattttagtagcctgtggctatttagtacttatttgctctttctatgcctgtgtctctgtcctacccagcacagttaaaattggtcatcagtggaaagaatgacagaagaataagaatcccaaggtggacnnnnnnnnnnnnnnnnnnnnnnnnnnnnnnnnnnnnnnnnnnnnnnnnnnnnnnnnnnnnnnnnnnnnnnnnnnnnnnnnnnnnnnnnnnnnnnnnnnnnnnnnnnnnnnnnnnnnnnnnnnnnnnnnnnnnnnnnnnnnnnnnnnnnnnnnnnnnnnnnnnnnnnnnnnnnnnnnnnnnnnnnnnnnnnnnnnnnnnnnnnnnnnnnnnnnnnnnnnnnnnnnnnnnnnnnnnnnnnnnnnnnnnnnnnnnnntgacacagtgagactgtctcaaaaaaaaaaaaagaaaaggccaca

SEQ ID NO: 3353 - DNA, 1648 bp, Macaca Fascicularis
gagcttggtgtgccacctgtggagggagatcatcagtgaccctctgttcattccttggaagaagctgtaccatcgatacctgatgaacgaagagcaagctgtcagcaaagtggacggcatcctgtctaactgtggcatagaaaaggagtcagacctgtgtgtgctgaacctcatacgatacacggccaccactaagtgctccccgagtgtggatcccgagagggtgctgtggagtctgagggaccaccccctcctccctgaggctgaggcgtgtgtgcggcaacacctccctgacctctacactgctgccgggggtgtcaacgtctgggccctggtggcggctgtggtgctcctctccagcagtgtgaatgacatccagcaactgctcttctgcctccggagacccagcttcacggtgaccatgccagatgtcaccgagaccctgtactgcatagccgtgcttctctacgccatgagggagaaggggattaacatcagcaataggattcactacaacattttctattgcctatatcttcaggagaattcctgcactcaggccacaaaagttaaagaggagccatctgtctggccaggcaagaaaaccatccaacttacgcatgaacaacagctgattctgaatcataagatggaacctctccaggtggtgaaaatcatggcgtttgcaggtactgggaagacctcaaccctggtcaagtacgcagagaagtggtctcagagcaggtttctgtatgtgacgttcaacaagagcatcgcaaagcaggccgaacgcgtcttccccagcaacgtcatctgcaaaaccttccattccatggcctacgggcacatagggcggaagtaccagtcgaagaagaagttgaatctcttcaagttaacacctttcatggtcaactccgtccttgctgaagggaagggtggattcataagggccaagctcgtgtgtaagactctggagaacttctttgcctccgctgacgaagagctgaccattgatcacgtgcctatttggtgtaagaacagccaaggacagagagtcatggttgagcagagtgaaaaactgaatggtgtccttgaagcaagccgcctctgggataacatgcggaagctgggggagtgcacagaagaggcgtaccagatgactcatgacggctacttgaaactctggcagctgagtaagcctttgctggcctcttttgacgccatctttgtggatgaggctcaggtgcgcgccatggagcgcaccgtggagaacatcgtgctgccccggcacgaggctctgctcttcctcgtcttctgaggccaaggcgcacgttctccgcagtgcagagcagcttgccgaggaccccgcgtgaagaaagccagcgagggggctcccgctccctgagactctgggttcacccacagcactttctgaggaagaggacaccagcccaagctggacctgccatttctccactccctacagacagccagtctccacttgcctccgccccagacgtatctggtcggggaagtgggggatgttcttttgataaaaaaaaaaaaaaaaaaattttatgtatttaaacttttattacaaggtttcaattaaacaggcatcatagcactggcaaaaaaaaaaaaaaaa

SEQ ID NO: 3354 - DNA, 715 bp, Macaca Fascicularis
  misc_feature (1)...(715): n = A,T,C or G
agaataggaaacagaagatgctgacttctacnnnaatagatgggccccaattcagcaaagataaatggactttcttttagtcctttttatattaacttaatcaattctggagttaggctctcnnnnnnnnnnnnnnnnnnnnnnnnnnnnnnnnnncagacctttactgccaaagaacccatttcatactacgttccactgattgcgattgattcagatttttgcactgtaggtgagcatatgtctcagtgctgccccaggccccagggatttctcattatgttcaaatgtcctagtgatttaccttaatcattgcaaacaattatggttatgaagtttacttacaaacaagcaactgagtcactttannnnnnnnnnnnnnnnnnnnnnnnnnnnnnnnnnnnnnnnnnnnnnnnnnnnnnnnntttttctaatgtttggtgaggggctagtgagagttttaatgatatggtgaagaaaaatatatctgtataattaatttattatattggtgtatgggctgtgagttcaccttttagtggtcatttgtcatttcataacaactatgcattttggttcactgtgatgatgatctatatttagtgactgcaacatgtttataccactgattcaaattccatccatgatgaagttatacaaataatgcatatattgataacttttattgcaaaaatgtaaatttaaaacttgtata

SEQ ID NO: 3355 - DNA, 694 bp, Macaca Fascicularis
  misc_feature (1)...(694): n = A,T,C or G
gaccctcacgttccctcttccacttgaagggtccttccttgtgacaatgctggatcatctccttactttaaggaagctgcctggggaaggaggagctggatctatttcgttctttgctagggaccgtgcacaccaaaaacatgctgaatgtttgggtcctctcctgggagaaacacttcaacttttgcaaaagattaattcatcaccatggcgcccagaaaaaaaatgcaaaagagaaggctcaagttgtggcagacccaaggtggctgcaaactctttgagattttcctcatcgagaggtgggggtctaaatcccctcccttgaacctaggcaggcccnnnnnnnnnnnnnnnaacagaatagcgtggnnnnnnnnnnnnnnnagtttttgaggctaagcctgaagagactggcagttcccacttcctgtcttttgggaataattgttcttgaaacctaagtgctatgctgtgaggaagccaagcagnnnnnnnnnnnnnnnnnnnctgagcggaaccaaaccctggnnnnnnnnnnnnnnnntgccccgagctgacagccaggtttgacttgtcttgcataccagtatgtcatgttggatgaggatccccnnnnnnnnnnnnnnnnnnnnnnnnnnnnnctccaaggagcagagatgagccatccccaccgagccctgcccaaatcacagat

SEQ ID NO: 3356 - DNA, 734 bp, Macaca Fascicularis
  misc_feature (1)...(734): n = A,T,C or G
tacagttgatttnnnnnaacacacgtcaactttgacttgctgatttagctcattaccaaccatccatctcgcaatgctgagttttcctcaagaagaaaaggtttcctttcacaggctaaaacgttcccaaacctgtattcatagaattatgccacttttatagatttgtagcctttctaaattcaaaggcttttctcagaaatggtacttgtgagcaccccatataaaggagaagggaaggcgtggggacagtgacaggcagaaattcaccaaatcagctgtggcttagaagcaggagcacagccatatggcccttccacttggcatacggcacctgcatccctccctacatgtggcccctttggaggcgatgcttcgtaaaccaagagctccagaactgaccaagacaggccaatcttatattctttgccctaaataacaaaagttgttcatctggaaacacatagaagtatgtatgtttgaaataacttcacagaagtacagaaagggaaggatgcttgttttcacggaaaggaagagccagctgagccagttccaagcatgccttcctctaagctcccaaagcaaattttacaaattcagagtatacttcatgacacggaaatcatttacgtgtgggtccttgtttccttggagttataaagcaacactgagttaagagtggggcaggttttcatttctgtatccnccagttactagcacaatgcctagaa

SEQ ID NO: 3357 - DNA, 700 bp, Macaca Fascicularis
  misc_feature (1)...(700): n = A,T,C or G
tagcttgacttggtaacttctacattggaaaccattaaagtatgccccattcctagnnnnnnnnnnnnnnnnnnnnnnnnnnnnnnnnnnnnnnnnnnnnnnnatctccactctggccccttctgccatgggacatcttggcccagaacccccaccccgtttccagagctcttccttccccatctggnnnnnnnnnnnnnnnnnnnnnnnnnnnnnnggcctcaggagctctaaagcccttccataggggtcttctttctgggacttgcccgagtgctctttggggcctgggaccacaaggggctgcctactgaggggggggggtcccccagagatccaggctatcgtgtgatttctggtggcatgtgttgtgtatttgttggctacttgtgtcttgaaatctagaattatttcgtgcagaattgtcactatttgtcaggaagagaaaatgggctagtggaagcccagtcttgagttcttgtcttgttaccatttaaaattgacatttaattttcaaatcactgttggtgcctaatcacttaagttattaatttattctgttgtattctgtttttttttaaaaaaaaaaattgtaacatatttatccggtgggtggggcagcagtgtgttcaagtgggtcatgtttttgctgtggtgacacatggtannggcctggagcttgcaggtccnnnnnnnntgt

SEQ ID NO: 3358 - DNA, 1992 bp, Macaca Fascicularis
acctacacagggcattttatggcttaaagatgatggcctagaagggaggggagagacttactttggattaaattcaaaatgggaaaatgcttaagctgctgtaaagaggaccagagcttccagcgatgttctccagaagatcaagttactacagacgcccagcatcgtggagcctcttctatttcacaaccaaatatatctcttggtcataaaacgtcttattcccctataacacgtaaagtcaattcagccaaagcaagtagaaggttattatctctatcaagtccatctttctctgaaagaagatgttctctatttgttggatttcaaaacagaaatgcttcctcataccgtcaacaaagtacagctaactttgattctgaagaagacacaagcttcactgatttaaaatcttcctcagaccattttggtagctttatgtcctgcaggagacgtttctcatcccgtaaactaagtatagtttcctattacaagagtgccaatttttttgatcctcaagcaagtggccagaatgtgtttaatctaaaagaaatcgaaatcttttctaaaacctcaaataataccgatgctaaaaaacatataaccatctctgctcctgaatataacactaaaaattttaagaattttgaaacaaacactacttttccagcctttgggaacactattgatacagcctcctatcaacaaagcacatcatccttcttttctcttgcaaatgatgtttcctctcccgatcaacaaaatggaattgccactgatattcaacaaaggggccaattatgtaaagatttaaaagatttccttcatcctggtactgaaagttacagcacagatcgttctgcaatcacgattcaacagcatccctctcaaagtggaactttcccattcctccataaagctggattttcttcatcttataaaaattctggttgctttatcccatttcaaaacgaagtaacttcaggcccatctgaagatgaagactttgctgtcttgtttcaagatgaagacagatcttcgcctattgaaattcctaaaataaggtcacctcagactttaccctgtcttagaagggcacctcaaatagttttcccaccagtcactttcatagtctgtagaattcatttctcataactcccctttcctcaccaagcttcactgcattttctgaaaaagattcctacattgcagtataaatttaattgctgtacttttgaaagttagtttattgatgttattggagtatggaagtcaaagatgattttgtttcaagtttttttcagatttactgcttaaagatgggctaatctcagatttctgagtgactgttgtaatacttttgtggtctaaaaataacatcaagccttggtgtatggaccttctaaaagtaatacattctttgagagtttagtatccccttttatcatactctgatcgttagaaacagtattcttacataatctctagagttatattcatcagtacacacattttcatatatatcagacttgctagctatatttctcgtgcccgatgttccactgacagatgatgtttttattaacacaagaatcaaattagaagttaaaaaggtttagcagaatatgtagattatttcgtaaccagatattttaactaagtaattttaatacacattcatgtctgtgcaaatctgggcattcaaggaattctgaaatcaggaaaaagtatgtatattagtcttccaaaattttatttttaaaaatgaatgtttttcatttttttaccgtcgtattgaacaaagactattataaagcatttatcaaagtagctaatgaatgaaaatgtgtgtaagcaattgaaaacatttaagttcagattttatagaggaaaggaatttgcattatttctaattatcctaataaaatatcccccaaatttgtatcatggggctaagatgttaaaaaaaaaaaaaaaaaaaaaaaaaaaaaa

SEQ ID NO: 3359 - DNA, 735 bp, Macaca Fascicularis
  misc_feature (1)...(735): n = A,T,C or G
ctgtagnnncnnnnnnnnnnnnnnnnnnnntgtgggggatggagaggttagtgtgatgaggtggcgtctgcccaggaggtttctttcatacatcatggcctcccatccaattaacatcatcagcttacatgtgtaattaaggctctgtgccatgggggaaatgagtcatttagctaggccaggatctagtgacagccacagagtttagaaccatgaaagaagttgaaggtagcattcttcagctctgtgacttgtgaccctatttgaagtttcaggatttgggtgtcacannnnnnnnnnnnnnnnnnnnnnnnnnnnnnnnnnnnnnnnnnnnnnnnnnnnnnnnnnnnnnnnnnnnnnnnnnnnnnnnnnnntgaacccctgaccacatcgcctaaactgtcttccaagcatgagacaaagttgactgatcacactgattgcccaacacataccgtcttgccagtttctccttttctcccagtctcctcttcatccattctgttctcccttggggtgggaatctatggtggaggttactggggaaacagctcagcagatttttagagaccaaaccaaaggcctcactgagaaatttatctgttttaaaacattgcttccttcctggctctgctaaattcaatgctcattgttttttttgtttgtttgtttttttgtttttaaattctaatgttcaaatcactgcgtgctgtatgaatctagaaagccttaaat

SEQ ID NO: 3360 - DNA, 769 bp, Macaca Fascicularis
acaagaggtttagatggagttcagatcttaataagcacttcatgacccatcaaggaataaaaccatatagatgctcatggtgtgggaaaagctttagtcataacacaaatctacacacacaccaaagaattcacacaggagagaagccctttaaatgtgatgaatgtggaaaaagattcattcagaactcccaccttattaaacaccagagaactcacacagaaagcacagataagtggtgaatggtctttttctgactttcattattatgtggattgtgtggaggctttcaaactgttgccatactgctgcaggacctaaagggagccccatctttatggctgatcaagtacaaccctatatgcctgaatactctgcaagaaggcctggagattttgcaaaactgatttattgagaatggcaaggagaaccttgtgaacttttagctttggtgcacagctgataccagaagggaacatcctgaagtgtcagagcaaagtaaggcatatggcttagagtgatgaccccagtcagaaccaggccagatggaaattgctttctgatgttactggtcttcttttccctattagccaaagtgactatctcttaagagaagataatgtgacgtcaagggaagttggaagtcatggatttatatctatgtcagatcctggtttataatgttggccaaggcttatttatatatgtttatttagtattccatagaattgtactttgtagtgaaaatgacatgttttatgttaaatta

SEQ ID NO: 3361 - DNA, 693 bp, Macaca Fascicularis
tcattcacagcttgtcagaggtgcccccacctggtcctgggcaacttgtcatcagcgcacgttttgtggataccaaggagaactaacagaggctgggcagctcccggtgcttccccaggcccccagccccatccatcagttgaggacagcacctccctctcccacccaggctgtacgtgctactgccctccactccaccgggctcagcacacagcagggcctcagtcagtttgcccttatgcctgtatgctctgggcagatttcaaagcactttcccttaactacccacagggtgccatctctctgccactacccctatgcatacacacccagtggggctgggaagagttccccccaccctggacccaaatcaggcacttcctcccaagcgagcccctcctgtgcctcatcggcccactcaaaggccatttattcttccttttgacacagtcctgataccttgggtgcttccattccttaggctggaggggaattagaaaggtgcatgggaggagagagggcctaggaaaagagaagacaggtggtaagttggttttgtcaacatttgcagccgaatttcaagggaggccctggagccactgtataacacagacatgacacctatggggcgcttgttgaaagacacacgggtgctctgttggcttggtggctgtgatgacttcatgcaaatgg

SEQ ID NO: 3362 - DNA, 728 bp, Macaca Fascicularis
  misc_feature (1)...(728): n = A,T,C or G
gtccaaagagactnnnnnnnnnnnnnnnnnnnnnnnnnnnntggcnnnnnnnnnnnnnnnnnnnnnggaaggacagattnctactacgcggaagactaccaccagcagtacctgagcaagaaccccaacggctactgcggccttgggggcaccggcgtgtcctgcccaatgggtattaaaaaataatttctccccacatagtgggcctttgcggttccagtaannnnnnnnnnnnnnnnnnnnnnnntgtttgtgtgattcacaatcatggcatttgaagtgcacaaagtacaaaggaatttatagagatctggttttctgaagtataatnnnnnnnnnnnnnnnnnnnnnnnnnntaaaatgtgatttatctcctaataagttacggtgggagcagagctgtgcagtttcctgcgtcatctggggtctgagtgaagatannnnnnnnnnnnnnnnnnnnnnnnnnnnnnnnnnnnnnnnnnnnnnnnnnnnnnnnnnnnnnnnnnnnnnnnnnnnnnnnnnnnnctttatctgtgctctctgcccaccagtgccttacaagttgcaaacgtgtatagcctcaatgactcattcactgaaatccttcgctttaccaaatctagacatgcataggggctttctcttccttttcagcccnnnnnnnnnnnnnnnnnnntgtnnnnnnnnntgatgaattctaatgctttgcttagagnnnnnnnnnnnnt

SEQ ID NO: 3363 - DNA, 543 bp, Macaca Fascicularis
  misc_feature (1)...(543): n = A,T,C or G
ctagacctagactaggagctttatnnnnnnntaggaggtcctttaggaagactctcaaagnnnnnnnnnnnnnnncccatcccacccttagccctgccctctcaccagagcaaaattcactggggacttttcccaccacacatggaaatctgtccactcggaatacctccgttttccatttcaaattgtagggggaggggatggagcacttccagtgatggtaagaaatctgttatgaaacgaaacacccccccgtgttaataacnnnnnnnnnnnnnnntttttatgagccgggccccctgtgcctctagtatacttgtattgactctcatagttacccttttagttttactgtgttctgtgaaaatttgtaattggttgagaatcactgtgggcgtccattcttattcaactaaatctccacaggttttttgagctggtgtggattagtttaactcttgtattcaaccattagtgctaccaccttctcacattacaatacaattactggaagcaagtactgcatttcctnnnaacaaaaaa

SEQ ID NO: 3364 - DNA, 748 bp, Macaca Fascicularis
  misc_feature (1)...(748): n = A,T,C or G
gcagtctagaggnnnnnnncgcggtcnnngcacggttgcnnnngacatgcccatcaacaccgccttcagggagtcccagagtaacctactannncccccatcgnnnnnctgcccccctcaccctgtgggcaccaacacctcccgcacacggnnnnnnnnnnnnnacagagcccttcctgggtccctcgacccagtggtgnnnnnnnnnnnnnnnnnnncaaccaggggccgcccctccttagatgtnnnnnnnnnnnttcacaggccacctgttggtttgagtttcatgtctgtctccttccctggcctggnnnnnnntgagcacacaactcgatctttcttcccctccatcaaggcagtgtgtgaggactgtgtgggaatgacatttcttgtacatacttagcacagcacctagagtatgaacttgtactattgttctgtaaagagggtgaaatagagcttattgtaaagcgtcgggagaagtatagtattgtatttgtaacaatatcgttctttgtatacacaaaactcaatgatctatatataaatataaataaatatataaataaaatatatctacacgtgagcctggaatgtggacaccgcacacccactgaatgtacttccttgacagtctggtcactggtccctccctccctcctctgtaccgtggccacagtcatccggtttggggttgtgatgtattttactgtgctatcttcctttatttaactgaacgctannntct

SEQ ID NO: 3365 - DNA, 782 bp, Macaca Fascicularis
  misc_feature (1)...(782): n = A,T,C or G
atgaggccannnngagatgctgggccctgggtttctaccctgcggagatcacactgacctggcagcgggatggggaggagcaaactcaggacaccgagcttgtggagaccaggccaggaggagatggaaccttccagaagtgggcagctgtggtggtgccttctggagaagagcagagatacacgtgccatgtgcagcatgaggggctgctggagcccctcaccctgagatgggagccatcttcccagtccaccatccccattgtgggcattgttgctggcctggctctcctagcagctgtggtcaccggagctgtggtcgctgctgtgatgtggaggaggaagagctcagatagaaaaggaggtagctactctcaggctgcgtctaatgacagtgctcagggctctgagtgtgtctctcagggcttgaaaagcgactactctttgtgacttgaagaaccctgactttctttctgcaaaggcatctgaatgtgtctgtgtccctgtaagcataatgtgaggaggtggagagaacaccccacccccgtgtccaccatgacccctcttccccatgctgacctgtgttccatccccattcatctttcctgttccagagaggttgggctgggatgtctccatctcagtctcaactttatgtgcactgagctgcaacttcttacttccctactgaaaataaggatctaaatataaatttgttttctcaaatatttgctatgagaggttgatggattaattaaataagaaaattcctaaaattgagag

SEQ ID NO: 3366 - DNA, 746 bp, Macaca Fascicularis
  misc_feature (1)...(746): n = A,T,C or G
gttatggatctgnnngtggaagtggtggatatggtagcagaaggnnnaannncagcagaaaagggctacagttcttannnnnnnnnnnnnnnnnnnnnnnnnaggaaagctgcaggttactttgagacagtcgtcccaaatgcattagaggaactgtaaaaatctgccacagnnnnnnnnnnnnnnnnnnnncagaaaagttnnnnnnnnnnnnnnnnnnnnnnnnnnnnnnnnnnnnnnnnnnnnnnnnnngtttgcaaaaagtgcagctattgattaatgcaatgtagtgtcaattagatgtacattcctgaggtcttttatctgttgtagctttgtctttttctttttcttttcattacatcaggtatattgccctgtaaattgtggtagtggtaccaggaataaaaaattaaggaatttttaacttttcaatatttgtgtagttcagtttttctacattttagtacagaaactttnnnnnnnnnnnnnnnngaaggtgtttccttgtgagttaacaagtaaagaagatcattgttaattactattttgtatgaattttgctaaagttaactgtaaagaaacacctgctgactnnnnnnntaaggggaatctatagtctccccatttccaaaccatgatatgaatgggcgctgacatgtggagagaatagataatttgtgtgtttgcaatgtgtgttttagataaataggattgggtatttaaattagcatttgtgaatttaa

SEQ ID NO: 3367 - DNA, 702 bp, Macaca Fascicularis
  misc_feature (1)...(702): n = A,T,C or G
tttatgaccaaaactgtgccttgtggnnnnnnnnnnnnnnnnnnnnnnatctgggacaccgctggtcaggagcggtttcattcattggctcccatnnnnnnnnnnnnnnnnnnnnnnnnnnnnnnngtgtatgatattaccaagcaggattcattttataccttgaagaaatgggtcaaggagctgaaagaacatggtccggannnnnnnnnnnnnnnnnnnnnnnnnnnnnnnnnnnnnnnnnnnnnnnnnnnnnnnnnnnnnnnnnnnnnnnnnnnggaatacgctgaatccataggtgcnnnnnnnnnnnnnnnnnnnnnnnnaaatgctattaatatcgaagagctctttcaaggaatcagccgccagatcccacccttggacccccatgaaaatggaaacaatgggatcaaacttgtgaagccaaccagtcaagccagccgccggtgctgttgacccaagggccgtggtccgtggtacgtggtacttgaagaagccagagcccacatcctgtgcgctgctggaggacgctatgctcggtggcctggcacctcactttgagaagagtgagcacactggctttgnnnnnnnnnnnnnnnnnnnnnnncggggcaggaaatgttcctgaaaatgattttagaaaaccnntgggaaaacccaccacaccaccacaaaatggcctttagtgtatgaaatgca

SEQ ID NO: 3368 - DNA, 743 bp, Macaca Fascicularis
  misc_feature (1)...(743): n = A,T,C or G
ttgtttttgagatgggggtctcaccacattnnnnnggctctnnnnnnnnnnnnaggctcaagcaatccctctgtcttggcctcccaaagtggtgggatcacaggaatgagtcattgtgcccaaacttgtcttagcttctgatagggccaaagtcagtgttgaatggcctgggctagtgtctggatactcccaagggagaaactgcttctaggtgccttcatgtcattggtagaactcactacttctcatgatttccagaacagtgactcaagtccttgccacactttgagtcttctgacttcctcttctgccacatctgtctacctccagccagggaatgttctctgcttctaagggcccatatgattagattagtcccattccgataatctctctcttttaacatcaactgattagtaactttaattacatctgcaaagtccctcttgccaggtaacagagcatatttatagtttctaaggattaagatgggacattctgggaaactgatattctgcctgccacatccaactcttctgatttgtcaccatgattagtcttccttgtccttgaaattcatataaataaaatcatacggtatatcctcttttgtactcaaaggtatatctgtgaaattcatctgtgtggttatgtgtagctttagttattttttactgcagtgaaattccgttatataccaaaatgtatttcttcattctaatggtgataaacatgcttgagac

SEQ ID NO: 3369 - DNA, 710 bp, Macaca Fascicularis
  misc_feature (1)...(710): n = A,T,C or G
tctaatccattctgaaggtctctgtcttttgtcagtgagtttaatacatttacatttattgtaattgttactaggattcatttatttctttatatttgattttttattgcatattttctgtgtattagtttaatttgcctgtcatactttccattcaatttcatacaagaagtttcttcttctcgtatgaaagttaatattgtattttatttattgtttggttaccagtaaannnnnnnnnnnnnnnnnnnnnnnnnnnttcttctacccatttcttagcttatccatattcatatcttctctctctaccttgtctcttattttcttctcccctgcnnnnnnnnnnnnnnnttctacatttttaactctgagctttatggatcttttatagattttaagtttgttttagcaacaagaaaatttactatgctgttttcttacctgtatatttcatatatttcatagatttttctagtttcaacttactattttgctacctgaaagtattttcaagagnnnnnnnnnnnnnnnnnnnnnnnnnnnnnnttgcctgagaatatgtaattatgtttcctttgcatgtaaattattgttagttgcatatagtatttcagatttaaagtccctttgttgactcttgaaaannngttgttctccntctattatgcatataacattaacaataattatattagtgtttcatttcttgt

SEQ ID NO: 3370 - DNA, 715 bp, Macaca Fascicularis
  misc_feature (1)...(715): n = A,T,C or G
cagccagcaggccccncnctgacgnnnnnnnnnnnnnnnnnggccccgacagcacaagtctcacacagccccgggcctggggccctgtcaagcgcccctggcccaaagcagatccggacggcaagcacaggcccggagctgctgctgctgcctccttcctccttcgtgccctgcggggcagctgcaccagccagggcgtcagcacagccggctactcctagggataagccccaggtccccccatccctggccagtgtccctgacccccatcgannnnnnnnnnnnnnnnnnnnnnnnnnnnnnnnnnggcctgggctnnnnnnnnnnnnnnnnnnnnnccttgaggctgaacttgagggnnnnnnnnnnnnnnnnnnnnnnnnnnnnnnnnnnnagcagaacctctggtcctgtcagcggcaagcgnnnnnnnnnnnnnnnnggctggagctgagcagagaggagccccgacctgaggaccaggaagtagagcagcaggtgcagaaagannnnnnnnnnnnnnnnnnnnnnnnnnnnnnnnnnnnnnnnnagctccaggctcagcgccagcccnnnnnnnnnnnnnnngctcgcatccaggccctgcggcaggccctgcgctagcgtgtttgccccagggatacaggtgctgggctgtcggggaggcctcaggccacctccaggaacagaacacaaagttataagttttattttt

SEQ ID NO: 3371 - DNA, 236 bp, Macaca Fascicularis
ctgagccaggagtcaccacggagcagcccgggccccagagccccccatcctccccaccaggcctggaggagcccctggatggagctgatcctcatgtcccacacccagacctggcgcccgttgccttcttctgcctgcgacagaccaccagcccccggaactggtgtatcaagatggtgtgcaacccgtggtttgaatgtgtcagcatgctggtgatcctgctgaactgcgtgaca

SEQ ID NO: 3372 - DNA, 694 bp, Macaca Fascicularis
  misc_feature (1)...(694): n = A,T,C or G
tcattgggaccccatccctccttcctgccccaacctggctctgtccctaggccacagaaccaggtttggtttccagccctcttctcaacagggctgcctgctctgacctagtcccagtttgtcatgatccagggcagcctggctctgatctaaagcacagccacctcttccttgtggcccctatcctgactgctcccgggaacaaataccaaannnnnnnnnnnnnnnnnnnnnnnnnnnnnntccttgggtactggcttcctccttcaggagctgcactgggcccactggtatcctatccctacagctggatctgggaggaaaccaaatgaagacgataggaaattccagcctctttctttggccactgctgtcctcaagaggccaatcttctggtttttttgcagagagggggcaggctgatctcacaggtcatgctcccctccacattgtcactagcctcccagccaacccgtgaggaagcatcattaggccaatgttacaaatgaggaaaattgaggcagagtgatgtaactggcccagcagttacatcnnnnnnnnnnnnnnnacagcaggcctgannnnnnnnnnnnnnnnnnnnnnnnnnnnnnnnnnnnnnnnngtcaaatctaggaagtgaggaaatgaggtttgggatgggcccaggcctggggcttccactcagctctcttgc

SEQ ID NO: 3373 - DNA, 721 bp, Macaca Fascicularis
  misc_feature (1)...(721): n = A,T,C or G
tcctgggagtnncggccctggcaaannnnnnnnnnnnnnnntgacattnnntagnnnnnnnnnnnnnnnggttttggaggcagaaatccagagatactggctctgccaagctgccatactgggctgtggcacagccttcgagacaacacaggtgcatcnnnnnnnnnnnnnnnnnnnnnnnnnnnnnnnnnnntgtctggagaaatgccctcaaagggtaaccagtaggtgnnnnnnnnnnnnnnnnnnnnnnnnnnnnnnnnnnnnnnnnnnnntgagtccattgccgttgcctgcccaagggccccctaagattacagacagtatcagcagggaggccgtcctggtgttttttnnnnnnnnnnnnnnnnaggaagggagcctcttcaggggcactggaatcttttgtgccaggggcttcttttcattagagccggggagtannnnnnnnnnnnttcttaaatatttgtgtgggacagacgagtgtgagggaggttttaagccaggcacaaagttagtttcaaatactagttaataaatctatttttcttcatttcctttttttgcacagaagctggtaatctaggacctacgtgtgaacaactttatatgaatattttttgtacttggtttacttgggttggtatgatacattatatttaagttccttgaacactgtggatcccctaatgtgtatgacatgactnnnntcatataaagt

SEQ ID NO: 3374 - DNA, 3182 bp, Macaca Fascicularis
  misc_feature (1)...(3182): n = A,T,C or G
attcgtaaatatgtgggcagttgaggtctttttcaccagagaagacaggaagaggagctgtcttgcagttggagccaacctctctccaaactgcagcccttctcaggcaaggactgatccctttctgtccccttgtagcttaattgcaatgctttcccattttattagtttccagattctgtgccaagtgctttaaaaggcaggtaggggagaattctctgcttgcctggcagcctgccatcacccccagaatctgttgcttgctgtttcagaaagggatcaacattgaaggcatttttctcagcagtgaaatttacatatcagaaccttgctgactgaggcagaaatgagggctctgggggcaggagtctgggagtggggactgagtctttgtagggggagggggagggaagagcttattttattacccaggaataaaaacattgtgagtaatgaataaagtccgaaagcagtaaatctgggaccccagagttaggtgtgtaacatgtcggagaacaatttaagccttcgcctcgtctgtggaggtgaggtattcaggctgcctttcacagcccaaatttcattaaatagacttttaagggttaggattacaagaagccaagtccggctggttcataatgatgatttatggctgtgttgtcgactcctcgacccttctatacaaggggatagagaaaatgcataatttgttgctcattcactctaaaatctgtcagggctgccccagaagccatgtggtcctggagtcacgtgtctgctaaatggcttcagcctgaccctctccttaaaaatctgcaattgctctcctacggtggaaattggttttaataacaatagaaataataaaattatctcaatgtagcgtgctgtgggtctttaagcttaagtcagaatacctgggctctactcttaactctgtcacttactggcctcaaatccttcagaaaagtcactatctcccagagccttagtatctccatccatagaatggaatatcttcttcacagaggttaaatgaaactacagtacaaaataaatgtaggagatggctgctgttaacattattattaagaatttgaggtactccaaaatgttcttttcatctgcttgtcttcccatgagtgaaggaaacatttcactttgcaatttactatcttaagactgacactaaaaatggaagttttagagatgggacattagagctgaaaagaatccctgaattgtagtcaaaccctgtctccctgaaagtgactagagcacgaaggtgactcatctgagattaatcagtaaattcatgcaagagatgctaatttgtagtggaaactcacatgttctttctcagcatcaaacaggaaattgtgttgactgatcctcaggccacgcctgcttagaaacagttccttaatctgtagcagtggctggttcagagaaccagggagcaatctgaggtcagggattttgcctggggccttggttctgctccctgcttctggtgtcatctctgagcaagtaactttcctctgctattgcttattacctgtgcttggttggcaggctagtggtggatggtgaacatagcccaggagagttgagaataaatgtcattgcagttatgaagtcatcaatcagtctagcaccctcattttacaaatgcagaaaccaatttatcctaatttcactaaacaagtagggacttgaaccttggctacttgactcctagttcagtgctcttcctgctgcataaaaaatctcgtatgacttataagtaaggaagaataaaaaagagtaagagaacacgattgtggtaataaacatctggaacttggttgcctgtgaggttacatagggtaaatgtataaacaggttcaaaaggggaattagatcatgaatggtaggaaagaatgctgggcagggagtcagtgcacctgggtttaatctttagatgggagctcatttggacctaagtttcttctaaatataatggtccctttcattaatgacttgccatgcttctcggagtttaatctctgcaacgtgttatcaaagcattcttggtaatgttgaggggatccttccaattttgtaataaggcaactttgaggactaccgtcctgctccctttcattcatttgttccttcaacttatagtctttgagcatctatgcagggtcacatactagttttactctctcaggaaacggctatgccaagatgctggctaaagtagcctttgactgtgttcctctaatacagaattgtactcaatatgatctgggaaaacgaaatgtagctcttatatataaagcatttataaacacagagtcactgtgtcaatgttggcagtgatagtagctgttctcgctgctgcacctgtttgtccctgggcccagttggtgtttccttcctacatggtcgtccttccccagactttggagcccttgaggatcttgatcagacctcatgccttgatgctttcctccactgtaaaagaatattgggagcctttgcaaaggagtgtccagatatgccagactattgcttcccttgtggttgtgcacatgccctcttccctctgaaagggcaagtgtagctcatcatcctgccctgggaggaagtgtgaagggacttttgtggtgagtgatgagttgaccatcactgtctctgggctgtggttacaagcaggaagtgcccatggctgggctgtggagttaagacaaaggcagcaggatgtgtcaggtgctggggacacagtggtgaacctcagcccaaccagctgcatgttgtctctggtcatgaaactcagcagcttccccacctcgaacagcaaataacacctttaatacatactgtcataggccgagcgcannnnnnnnnnnnnnnnnnnnnnnnnnnnnnnnnnnnnnnnnnnnnnnnnnnnnnnnnnnnnnnnnnnnnnnnnnnnnnnnnnnnnnnnnnnnnnnnnnnnnnnnnnnnnnnnnnnnnnnnnnnnnnnnnnnnnnnnnnnnnnnnnnnnnnnnnnnnnnnnnnnnnnnnnnnnnnnnnnnnnnnnnnnnnnnnnnnnnnnnnnnnnnnnnnnnnnnnnnnnnnnnnnnnnnnnnnnnnnnnnnnnnnnnnnnnnnnnnnnnnnnnnnnnatcaaaaaaaaaaaaaaaaaaaaaaaaa

SEQ ID NO: 3375 - DNA, 349 bp, Macaca Fascicularis
caggtgatccgcctgccttggcctcccgaagtgctgggatttacaggcatgagccaccatgcccggccaaaataaaatgtttttatctttcttcacttagaactatgaagggcttttcttgctctggtaatcccccacagtgtaattggtgctgaaaatagctttgtgcctgaggtctgttttcactcactcactttctgaccattaggtgagccacttcaggattttctagcctgaagttataaaaacttggcatctgtccttagataatcgtaaaggcaaaacgaaagcattgaggtgaacataggtaatatggcatttatatggtaatgtgtttcagaaaagtcag

SEQ ID NO: 3376 - DNA, 1436 bp, Macaca Fascicularis
  misc_feature (1)...(1436): n = A,T,C or G
aacaaacatggccgctctggcgcccgtcggctcctccgcctcccgccgtcctaggctggccgctggcctccggctgctcccgatgctggctttgctgcagttgctggccgcgcctggcctgggccgcgtccatcacctggcactcaaggtaaagcctggcaaggccgggccggggggcggaggccgaggccactcccccgggttttagggcaactttggcccattggggacctctgagccactggaccatctctttgtccctggccgcggcctttcaaactgacaggtggcagggtctgtggggaaggcgggtctgggcggcgctggggtcctgaggctgaccggcaggggcgggaagactcgaactgagggaggggaaggagctgaactgtggcgtagcccccacggactcggcaggctgctctaaaatccctgctgggttgcctgaattcctcactcatggaagcccgctcgcccttctcctttctcccctccagcttttatgctggctttccttgtccgcggtctccgctcttccgtgcccttgtactgtaccggcggtttgaaggtatttggaaccttagcctcagtttcctattttgatttagggcgctctctggagcaagactcttcggaaggaatttcaaatcttgcttaaaacacgtgactgagaatttaaagccagcattaaaatgtgtctctaatcaaagggcctgctttttcttcctctatcccgtcattgtctagggaagagagatttttgataaacctagaatgatcccctggatcttgctttataactagcagagaagagacctctaaggctgaaacgcaccctaaggtggttcagcaggttactatatctgggaaattgtccgggcgccctggctcatgcctgtaatcccaacattgagaggcctatgcaggaggattatttgagcccaggaattggagaccagcctggtcaacatggtaaggaccccctccccaaannnnnnnnnnnnnnnnnnnnnnnnnnnnnnnnnnnnnnnnnnnnnnnnnnnnnnnnnnnnnnnnnnnnnnnnnnnnnnnnnnnnnnnnnnnnnnnnnnnnnnnnnnnnnnnnnnnnnnnnnnnnnnnnnnnnnnnnnnnnnnnnnnnnnnnnnnnnnncctctctcaaaagatacagagaaacagaaaattagagacatagaaaagtaaattgttacgacccaaactcttgtacattatttttataccatacagtcttctaagaagtggaactgtaggccggacgccatggctcacgccggtaatcccagcactttgggaggctgaggcgggcaaatcacgaggtcaggagatcgagaccatcctggctaacacggtgaaaccctgtctttactaaaaaaaaaaaaaaaaaaaaaaaaaaaaaaaaaaaaaaaaaaaaaaaaaa

SEQ ID NO: 3377 - DNA, 724 bp, Macaca Fascicularis
  misc_feature (1)...(724): n = A,T,C or G
gcgggtggagaggctgtcagtgccgtgggtgcatcacacacttctagcatccgctccaccctgcatcccccaaatgctgctttgcnnnnnnnnnnnnnnnnnnnnnnnnnnnnnnggtgggggacagggnnnnnnnnnnnnnnnnnnnnnnnnnaatgtcacaaagccatggcagagggtcctagcagtgccaccctgccccagcctgaggaggagggagggggaggaacaaccctgggcagacggggcctcagggacctgtgtcctttctcctccagagctgcccagccggggctttcagggtgctggggcagccccaggtcccctcttgacctcagctggggccaggggccctcaaaatgaaggcaggccccaggcaggagcagcatccccctccctgacagnnnnnnnnnnnnnnnnnnnnnnnnnnnnnnncctgaacctctgctgnnnnnnnnnnnnnnnnnnnnnnnnnnnnnnnnnnnnnnnncctgcacctctgctgaggctgcctgcctgccgggcccagctcagcgccctctccactgcaaatcagcggtgatcatgtgatttcnnnnnnnnnnnnnnnnnnnnnnnnnnnnnnnnnnnnnnnnnnnnnnnnnnnnnnnnnnnnnnncgggctcagaggccttaccctgcctcacgcctgcccctaatcactgcaatgtccagaccagtgnnnnnnnnnnnttgtagcgnnnnc

SEQ ID NO: 3378 - DNA, 744 bp, Macaca Fascicularis
cccaacactcaattttacaaaatgcaggcacagtagtaatacctgcttttaatcagcagatgtgaaaacgctttgtaatctgtggatctgtggtgagtttgtcaaaatgtttgtgattattagttattctcatctttattaggattaatagacagcaacccgagagataaaaagtccctggagcaacactggggtaggaatgtagcaatggcagctggcaggagctggctgtagggcaccactgctatagcgactttctctaagtggttaaatacatccattaaggtaatttaaagacctttatttttctttttctgtgtaccattctcacccctagtaccttcctgctcttaggagttcgtgattctgaggagacatacactgtggacatcaatatacaggttgacgtccatttatcacttgtttaaaaattgttgactttttgttttctcattcaaaatgttattttctaatataatgaactgaaaataaacctcttggacaggccagagaaaggacggataataagtttttaaaacttccattttctctacctagtccggggaggcttcatggatgaagaggaacttaaaaacacccaaaagaacaaactcatttggttcaaattatgtaacgttatctcccccagagcatcctgagcaaatctgctcacccagcctgatttattcctttttctgtctcaagctaagctaatgagactccccacagacattagatttctat

SEQ ID NO: 3379 - DNA, 754 bp, Macaca Fascicularis
catctatacaattatgagtacctacctcagagggttgctatgagcattaaatgagttaatgaacataaagcattcatcacttaccatgcttggcacatggtaagtgctcagcaaatgttaaattgttgttgccagatctgtggtgggcaatgatatttacactacttggacaaaattggtttgatggtgccttagaggtcaggatgtctctagaacaacgctgtaagaaccaggatcaaagtacggtctgggagtcaaagtcatgaatgaaaatgaaacaagccagaacctcatcagtggtgtccatgaatctgaaggtacaggtgagggttggacctggagtctcaaaagaggagggtcagaaaactgaaactcagcatgtgtccagcactatttattcaattttatttcataatcaagcctccaaaatccaaacgcattgtcagcatctgctttgaaggtaagcactgcaggtaggatgaggcaacccaaagatggtattgagaaagaggcagagcctcttggacgctgtgcctagtgagtgtgggttggtgggggaaaaggcaggtgatcattctggtacagggccttggggttaactagttttagttgccctatgacgcttttggggaagtcttcaaacctttgtgagatttaattccttatctgtaaaatgtgggtaataaaaatatcaccccatagggcttgtgtgaagatcaagtgaaatcgagctttgtaaactatcaactatcat

SEQ ID NO: 3380 - DNA, 731 bp, Macaca Fascicularis
  misc_feature (1)...(731): n = A,T,C or G
tgatgcctcatgcccacnnnnncagatagtactgttatcattcccattttacagtggaggaagctgaggctcagagaggttgagcaacttagctgaaggccnnnnnnnnnnnnnnnnacctgagccaagatttggactcgagtccatgggacccccacgctcacgagctgactgctctgctccactggttnnnnnnnnnnnnnnnnnnnnnnnnnnnntagttccagggcgagtgccagcacatggccccgctgggagccgggggcctgacttaggtccactggaaaaagtgtcacctttggggacactcaaggacaggctggttggatttgttgtggattttatatactcatgccctccccctgtgttcctggtttctataaggtcccagggaaggtgcatggaatttgcaaatagggcctgtatgacttatttcctaggacacannnnnnnnnnnntacctccttcctaccctcttctccaacctgaactcccaagttccttctcccgaagatcttttgcactataagcgccaaggaagctgtgcgcgtggcagggacggctgggagggtatctggagannnnnnnnnaggcctctggcctagccagagccgcaataagcttggggatgttccgttccgggttctgacgttgttggttctgacgtcgttgtgctcttttgtaagaggaatttcataccttggagacgctttgtacatatttgtaatgac

SEQ ID NO: 3381 - DNA, 754 bp, Macaca Fascicularis
  misc_feature (1)...(754): n = A,T,C or G
gctgagannnnnnnnnnnnnnnnnannnngatctgcttcagtgcctccacaccaggctactcgtccttgtcggtgntnnngatgnnnnnnnnnnnnnnnnnnnnnnnnnnnnnnnnnnnnnnnnnnnnnnnnnnnnnnnnnnnnnnnnnnnnnnnnnnnnnnnntttcttccgaaccctcatagcggcaatcctctacctgatcnnnnnnnnnnnnnnnnnnnnnnnnnnnnnnnnccactccaaaatcgtcgcaggggtactgggcctaatcgcnnnnnnnnnnnnnnnntatgatgcctatgtcaccttcccctttcggcagccaagacatacagcagcccnnnnnnnnnnnnnnnnnngcccggtgtaggcgagctcccttcatttccctctgcaatctgcaaataactcctccattgaaataactcctccccaccccaacaacaatattcccagccaaccaactcccaccccctcatagaggtaaaagtgccttaattgggagacttttgtcttccagcctgccaatcaaccctcctgggtgtggccaccatacgcctgtgcctaggtcctccttctgcaggatccaataggagacaccagttctgcctgaaccatgcccccacctaagtcacaaaatgagggaaggggggagttagatttcagagtcaagtccccaggttgggacccactcgaaataatctcctcggtgtgggcggtggttctgtagagggataaatgaataataaaca

SEQ ID NO: 3382 - DNA, 726 bp, Macaca Fascicularis
  misc_feature (1)...(726): n = A,T,C or G
atccgagtgaaanntgacaagaccggtgnnnnnnnnnnnnnnnnnnnnnnntccatgaaccnnnnctgtgagatcgcagtggaggaggctgtgcggctcaaggagaagaagctggtgaaggaggtcatcgccgtcagctnnnnnnnnnnnnnnnncaggagnnnnnnnnnnnnnnnnnnnnnnnnnnnnnnnnnnnnnnnnnnnnncgnnnnnnnnnnnnnnnnnnaagcagaacgcttgggtcccctgcaggtggctcaggtcctagccaagctggcagagaaggagaaggtggacnnnnnnnnnnnnnnnnnnnnnnnnnnnnnnnnnnnnnnnnnnnnnnnnnnnnnnnnnnnnnctggatttctcgactggccacagggcacattcgcctcccaggtgacgctggaaggggacaagttgaaagtggagcgggagatcgacgggggcctggagnnnnnnnnnnnnnnnnnnnnnnnnnnnnnnnnnnnnnnnnnnnnnnnnnnnnnnnnnnnnnnnnnnnnnnnnnnnnnnnnnnnnaaagccaagaagaagaagatcgaggtgatcaagcctggggatctgggcgtggacctgacctccaagctctctgtgatcagcgtggaggacccgccccagcgcacggctggcgtcaaggtggaaaccactgaggacctagtggccaagctgaaggagatcgggcggatttgagcccctcccagagat

SEQ ID NO: 3383 - DNA, 702 bp, Macaca Fascicularis
  misc_feature (1)...(702): n = A,T,C or G
acaatgtgagaatcagctgnnnnncagctgctgtgtcattcaggaacacgattctgattggtccagctcagaccttggagacaccccgggccaatcattgggtccagtttgggcagactcttgggcccgcctcctgcctttgctgactcctcctcttcctctcctgaccatcttgcccgggattggtccnnnnnnnnnnnnnnnctttttgctggagggatgaattaatctcctggaagccagtaggcctgcactgtggcctgggcagaggcattggtgaggttgcttccttctgaggctctgatggagaatctggttcccacctcccacctacctcctggtggctgctggcgatccttggccttccttggttcatggaggcatcgctccggtctctgcttctgtctttgcattgcctcttcccctgtgtgtctctgtgtctcaaatctccctctgcctttcccctatacggacacctgtcactggatgtaagaaaccactctaaatccaggatgatgctgtttggagatccttgattacatcccagagacctttcctctaaataaggtcacactcacaggttccagggcacgggacatgggtatatctttcgggggccacctttcaacccactgtaaccgccttgaaaaannnnnnnnnnnnntcttataaaatgaacacaaacttaccatatgactcagc

SEQ ID NO: 3384 - DNA, 750 bp, Macaca Fascicularis
  misc_feature (1)...(750): n = A,T,C or G
gacaaaagctttatgaatgctatgagtttaaaatatgtcagtttaatactatgatttaaaaaacaatagatttcgtatgactgtggagacatggaaaaatcaagatcctattgatatgctagctctggctcacttattcttgggtaatgatactattggatatataccagtattctataagcaaaaagaaannnnnnnnnnnnnnnnnnnnnnntcttccgtatttctggtccccttactatagtaatcctagttactctcatcttattctgagaaaaaaaaaaaactttttaaacttattttttgatacagggtcttactctgtcacccagactgtagtacagtggtgtgatcttggctcactggagccctgaccttcnnnnnnnnnnnnnnnnnnnnnacctcagcctcccaagtagctgagaccacaggcacaggccacaggccaccatggcaggctaatttttttatttcttgtagannnnnnnnnnnnnnnnnnnnnnnnnnnnngtctcgaactcctgacctcaagtgatccacccgccttggcctcccagagtgctgggattacaggcatcagccacagcacccagcaaaagaaactatttattttcaggtttagaccatcagatagatttatagctatctacattcaaatattttcnnnnnnnnnnnnnnnnnnnnnnnnttaatactgtttaaaaacgtttaggaatactatagatttcaaatgcatcattaaaaataaat

SEQ ID NO: 3385 - DNA, 741 bp, Macaca Fascicularis
  misc_feature (1)...(741): n = A,T,C or G
gagtgtaagaagttcctggttatagaagaagttagaatccttnnnnnnnnnnnnnnnnnnnnnnnnncactgatgtgaaatgtgctgtgtatacctgcagaatgaaaatgcccatctaagannnnnnnnnnnnnnnnncagccttcctccatgggaacccggcaaggcaatgggaagtggacatgggagcacctgaaccttccggaggctatgaaacctcaagggaacaaattatgtggcagagagggatgatcagttcttcccgtctgagaaaagactgcagcaaagaccaactctatgttgaggtcattttatctgctacatcgnnnnnnnnnnnnnnnnnnnnnntttgcctgaatttgtataaatgacagttgaaagcagtaaaagtgggactgtttcacggaagtcagccacaccagtggttctcannnnnnngtgaaccctcagagctacccaaggacttgtttgcaatgcagaatcacagcccccagagactctgactcgtggggcctggctggttctgnnnnnnnnnncggagaaccacatgtgtgcacttggnnnnnnnnnnnnnnnnnnnnnnnnnnnnnnnnggcccatcttggttgtcaccatgannnnnnnnnnnnnnnnnnnnnngtacttcgtattatttccttctcttttagtatgagaagtggccaagtggtcaatagctttcatttttgtgtaactgaatcttgtgcttcatttccttctggg

SEQ ID NO: 3386 - DNA, 817 bp, Macaca Fascicularis
  misc_feature (1)...(817): n = A,T,C or G
ccgtggtcatcccgggctgtcttctcnnnnnncccccgtgagcccgagtcgcaggtggtcgtaccgtgctatggttatgactcacgctctccctatgtgtggtctttacccagtgatttcctggagctcctggtcccaggtgtttctaagaagccgtcactcgcagtgcagctgggttctgtcgtggcccctggggataagctgaccctccagtgtggctctgatgccggctatgacagattcgctctgtacaaggagtggggatgtgacttcctccagcgcnnnnnnnnnnnnnnnnnnnnnnnnnnnnnnnnnnnnnnnnnnnnnnnnngccctgtgaggggctcccatgggggccagtacacatactacggtgcacacaacctctcctccaagtgttcggaccnnnagtgaccccctggagcttgtggtctcaggagcagctgagaccctcagcccatcacaaaaccagacagactccaagactggccaacacccacaggattacacagtggagaatnncatcnncnnnnnncatggctggcttggtcctggtgctcctcgggnnnnnnnngtttgagactcagcnnnnnnnnnnnnnnnnnnnnnnnnnnnnnnnnnnnnnnnnncagcagagaggacaatgctcccttcagagtggtggagcctcagggacagatctgatgatcccaggaagttctggaggacaatctaggacctacattttctgaactgtctgcnnnnnnnnnnnnnnnnnnnnnaatccatatttgagtgcagggaaactgtctggggtgattcctagaagatcattaaa

SEQ ID NO: 3387 - DNA, 726 bp, Macaca Fascicularis
  misc_feature (1)...(726): n = A,T,C or G
acaaaagcctttggttgtagttcacgnnnnnnnnnnnnnnagagaactnnnnnnnnnnnnnnnnnnnnnnnnnnnnatgaatgtnnnnnnnnnnnnnnnnnnnnnnnnnnncttattnnnnnnnnnnnnnnnnnnnnnngagagaaaccctatgtgtgtaatnnnnnnnnnnnnnnnnnnnnnnnnagttctagccttatttaccatcagagaatccataaaggagagaagccctatgaatgcctccagtgtggaaaagcnnnnnnnnnnnnnnnnnngcttacaatacatcaaagggttcacactggagagannnnnnnnnnnnnnnnnnnnnnnnnnnnnnnnnnnnnncaaaactcaacccttttccagcacnnnnnnnnnnnnnnnnnnnnnnngccctatgagtgcagtgaatgtggaaaagccttcagccggagctcgnnnnnnnnnnnnnnccagagaatacacactagggcccagtggttttacgaatatgggaatgccctggaagggtccacctttgtgagccgtaaaaaggttaatactataaagaaactgcatcagtgtgaagactgtgagaaaatatttaggtgnnnnnnnnnnnnnnnnatacaccagagaattcacactggggagaagccttataaannnnnnnnnnnnnnnnnnnnnnnnnnnnnnnnntcacggcttaccnnngcatcnnnaaattcacacgggatagac

SEQ ID NO: 3388 - DNA, 734 bp, Macaca Fascicularis
  misc_feature (1)...(734): n = A,T,C or G
catgatgtganaaaaacagtcgatggtctatttaagtgtataatgtatactgttcagaactgtgacattattcttnctgggagaaaagtgatttacaacttttttgatgcatagttgaggnnnnnnnnnnnnnnnnnnnnnnnnnnnnnnaggctccaaggagctgcagtctccttcccgaggttttctggatataaatttgcatggtnnnnnnnnnnnnnnnnnnnnnnnnnnnatatgcatttggcaccaagactgggatccacaactttgtagacacnnnnnnnnnnnnnnnatattagctatactataaatagtgtttgtaactacacacacacacaaacacacacacacacacaaatacatacatatattctgtaaaaacaaaaagagaaaactttttaagatccttgggtatgtgtttgctttactccatttcagaagaaaattacttttcttctaacaaaattattttatagcttctccatttttaaaacttgtgagaacattgagaagagaactctgtgttaacagaagagagttgaattggagtctctgttgtgtacaaatgacctctcattactccacagtagttatttgagccagtgactgagccgcgttgaggaatcctgaacccggacctctgacgttgttgggaggtggctgctacccacacccagacctcttgcgtaaggagagaaacattatcattggggatataatgagatttcttc

SEQ ID NO: 3389 - DNA, 695 bp, Macaca Fascicularis
  misc_feature (1)...(695): n = A,T,C or G
gccccagccctgtgctgncagagacgtgctgtgttgactcaaggtttaatggatttagggctgtgcaggatgtgctttgttaaaaaagtgcttgaaggcagtatgcttgttaaaagtcatcaccattctctaatctcaagtacctagggacacaatacactgctgaaggccgcagggacctctgcctaggaaagtcaggtattgtccaaggtttctccccatgtgattgcctgagatatggactcctgggaagaggaagacctgatcatcccccagtccgacaccggtaaagggtctgtgctgaggaggatcagtgaaagaggaaggcctctttgcagttgagataagaggaaggcacctgtctcctgctcatccctgggaatggactgtctctgtgtaaaaccctattgtatgttttatttaccgagataggagaaaacagccttaaggctggaggtgagatgtgctagtggcaatactgatctttaatgcacccagatgtttgtgtaagtgcacatcaaggcacagcactttctcttaaccttgtttatgacacagagacctttgtttacatgttttcctgctgaccctctgcccactattaccctattgtaatgatcaataaatactgcgggaactcagatcagtgccagcacttgtccgtatgctggcttgtcctccttatgctgagcgct

SEQ ID NO: 3390 - DNA, 688 bp, Macaca Fascicularis
  misc_feature (1)...(688): n = A,T,C or G
tgtctgtataactttgtttttattttaactcttactagaaaatctaatcttgaaacatctgaattctaaacatgtaaaatgtgacacctgcaattttgtagacagcgaagtcatggctgctatttataaatggaacatctatcaaaataagtaactgtttataaaattcagtttttgtaggattttccaaggaggaatcacctcggttgaatgtttctcactcattaaactttgnnnnnnnnnnnnnnnttcagtagtttttaatcactttttaaaatacaaggaccgaatgtttgcaaggaaaccaaagttttattaataatttttatataaggaaaataaaatagatgtagagggatctgtgatcatataaaaagggagggttactgaaagaattttagcaatatattgattcaggaaaaggagctgttttataaatgatcattcactgttcctgtggttctatgtatctttcaaaactgatacctttactatttaaagagagtaaatagtgaaagtaagatggtcatacttaccgactttatctatttaagtttgatggagataaactatatcttggctagtggctactgtgtctgtgaatgtaaccagtacttctttaagctctattcagtagggttctagccactgcttttttgttgtttctagccacctgtttgtttttttt

SEQ ID NO: 3391 - DNA, 636 bp, Macaca Fascicularis
  misc_feature (1)...(636): n = A,T,C or G
cagctttgcagaggagccagtctgaaggaggaggagcagcannnnnagccagcagggggagtgatgattatcatttcaggtagcaagggtatgtatatcctatgtggggaaataaaccgcaactttaatttgtttgcaaagcatttcgataggcttccttttccgttaaaccaaaaaatgtttaaatgtttaagggtcatgtggagcagctgagcttctgacaggaccacagaactgtccactgagtctgagggctgggcagtgccacaggacagtccctgggcnnnnnnnnnnnnnnngcttgtcgtgggaggaaatgaggcccttcagaaacccagtcatcttgacatagggtacactcccaaggaaggcctgattggggaatcacatagcctctcctccaggcctctgggctcactgaggtgcccccagaaccctgattgccctcccctctttctctcttctcattcgtcacacagtagaagcactcactggctaaaagctcagctggggcagcagcctccaaggaggcctgcaagtgccgctcccaacgctggctccccctcaggagggaggccccaccacatgccatcactgcctcagctctacaaagtcaccagaggcttcttccttatt

SEQ ID NO: 3392 - DNA, 721 bp, Macaca Fascicularis
  misc_feature (1)...(721): n = A,T,C or G
gcaacaatgtttannngaaagataacgtcttttcaaaatcagaaactgcagtggtaattaaatgaatagaaaagagaaaaaaaagaaggtttagaaaaatggttttcatattcacctttcttccacctcattgaattgcatgctgtagttctagcttttctgctataatatgtaaatatgactgtagccctttaagcttcagtctcagcagagcatttcctaaatgtgtttgacctaatgaaaccgatcatggcttcccacttaggtttttcttcctatagctttatagaactatataataatatggacttgctgtgtaatggaaataaagtgctcttgcacaataagttctgcaaaaccctctcattcatgaaaaggtgctccttgctagacagaaacttgctgatttacagtattgttatttttgtctaaagttatgtaaatacatgctttaatgttatctttgagaaatctatgtaaataatatagttacaacatagagactgtataattctgtgttatatatgtgcctagtgctctgttggcactcaataaattttaagtaacaaaattgataatcatatagcgaaggcatatttttcttccaagctcaagtcaggattgtgactatatattaatgagactcagtaatccaaccaacacctgaaaactcgtctcattactttatagtcatgtcatgtatgttttnnaaccatgaaat

SEQ ID NO: 3393 - DNA, 699 bp, Macaca Fascicularis
  misc_feature (1)...(699): n = A,T,C or G
aggcagtgtcntgaacaggagactacacagaggcaaatcagccttagggaacacttgcattctgccctacggttagtgccaggactgaggccgtttctactgcagaagattgtgagattgaacttacctgagagctggagactcctgagaagcaggagtcaaggccactagaaaattgacagttaagagccaaaagtttttaaaatatgctactctgaaaatcgctgtaggaaaagggagaatcttccatgttggtgtttttcctgtaaagatcggtttgggatatgatattgggcaggtattaataaaaatagcacaccaaagagttctgtaaaacatgttttattgattttggtccccacttacattctatttctaggagttacctattttcatataagtaaaacattattaaagtgctgttttatgtgaaataacttgaatgttgttcctataaaaaatagatcataactaatacatttgtaataatggtaattgttagatttttatgaggaatgagtatctggaaatattgtagcaatacttttagtttaaaattttggacctgagacactgtggctgtctaatgtaatcctttaaaaattctctgcattgtcagtaaatacagtatattattgtacagctcttagtaatttttttaaagtttatgaagttatatttatcaaataaaaatttcct

SEQ ID NO: 3394 - DNA, 1709 bp, Macaca Fascicularis
  misc_feature (1)...(1709): n = A,T,C or G
agtcccagtgtctgggaccagtaatactttggggcctgaagagacaatgaacttgtgaaggagatggaggaagaacagtggcatagaagaaaacatggtatcgtgtgaaggaagacagaggaggcgaatgttctgggaatggtgtatagcatcagtcgctgctaaggagtctaataagaggaagactaaagaacaaaagtttttgaatttagcaacataaagatactcggtaaccttagtgggagatactccagtaaaatgatggattggaaccagccagctatggaatggaaggtaaggaaaaaggggatagtatatagatgactattttgagaaatttggctatttaaaggtggtggagagtaaagacaccgtaatatcaaatggccagataaatacagcagtgaacctatttattttaatcttgtttgtgttttatttatcgaggctaattctgctgtaatttaaatcagttttctaccttcatgaacgacttaaaagctgctgatctgtttgaattgttgtgcttcctttagttccacttggcctgcgttttgtagcaagcctccagctgggacatgcaccggttcttgtgagcaagctcaggggcgtgacattttattgcaccaggcatccaacatgtcttatctcagcttattcttcagaacaactgtatgaggttggtttcattacctccattttacagatgataaaactaagattcagaggaggctacttccctgccatagtcaaacatctaggaagagggagaactggaattcaaacccaggtgactcaggctacacatttcctgatttatcttcgacacaaagataacatcatggttgaaataaactgcctttcacaagagatttttcaactcaaaacccagatttgggggcttatttttattgcttttattcatacaatctgtcagtacacagccaattcaagatcagctccctttctttcccactgttgcctcatccagcgtgtctcttaactgtcttgctgctggaagtagttctgagaaatgaaaataataaaaccagtttatttcccagaggctttggaaacacgtacaggattttgtttctggtgcttcttaaacccactgattgtaatctcagttcttacctgggaccccatgcaggaacaaaacagatctgaatcctttcatatctcacccctattaagtcctgagtcaatgaggtcaagttggtgacatgtttggacatgtatagaaggaaaactgaatggatggaagtcgtcatcagcattgtgaccatgacaagttgatcccacgttaaaatagatatgttgaattggcggcgacagcatgggtttggaggttgccttttgggttatgtccgtaggatttcacagcatggtcaaggggtccaagatgtggacagctggatgggctcannnnnnnnnnnnnnnnnnnnnnnnnnnnnnnnnnnnnnnnnnnnnnnnnnnnnnnnnnnnnnnnnnnnnnnnnnnnnnnnnnnnnnnnnnnnnnnnnnnnnnnnnnnnnnnnnnnnnnnnnnnnnnnnnnnnnnnnnnnnnnnnnnnnnnnnnnnnnnnnnnnnnnnnnnnnnnnnnnnnnnnnnnnnnnnnnnnnnnnnnnnnnnnnnnnnnnnnnnnnnnnnnnnnnnnnnnnnnnnnnnnnnnnnnnnnnnnnnnnnnnnnnnnnnnnaaaaaaaaaa

SEQ ID NO: 3395 - DNA, 731 bp, Macaca Fascicularis
  misc_feature (1)...(731): n = A,T,C or G
gtgagacgcttctgtctcctgttcactttctatggtggtttctcattttcaaaatgcatctcatttgatcattactgtgaccttgggaagcagcaggacagggatttctttttagaggtgcaaaccgctcagaggggacacacctcggcctctcactgttgagtacacatggtgtgccatgagtggggaagagccacaggcgagacgtctcatccnnnnnnnnnnnnnnnnnnnnnnnnnnnnnnnnnnnnnnnnnnccctcttaaaatatttgtcccacaccgacaagagtccagtcaccaggcctcgaaggaacttctgcttgtagcagccacctcctctgtgccctagtctccttagcatgtgcactatcagacctgttgggggcacttggagggcccagctcatgagactgggtatgggggccaagtggcttgttcattccagcatctaacatcataaaggtgggcccagatttcttaatttgaccacagtgctgttcctaccacacaaatatccattcctgttttgttgaagcagccactggtcctcttgtctcccctgcagagggagggacctggcagcgcccattcattcagccccctcatgcatacttttattaggcagtagactagttaagaaaattgtttctatgtactgtatattttgtacctgtttacacttctaatattgatataactgatatttgaaaaataagagaaaacatcctg

SEQ ID NO: 3396 - DNA, 761 bp, Macaca Fascicularis
tgtcttaccagtggtccctgtctcccttcttgtacaatccagaggaatatttttatcaactattttgtaaatgcaagttttttagtagctctagaaacatttttaagaaggagggaatcccacctcatcccattttttaagtgtaaatgcttttttttaagaggtgaaatcatttgctggttgtttattttttggtacaaccagaaaatagtgtgggatattgaattacgggaggctttgactgtctcgggtgccagcttaacattccatagatggggggttagtttttatatcctataatacaaagcatattaaatggcaatatggagtcagtcctgcatttaatgtcttgaacattttattttacttctattctcatgttttttagtagaattgtttcctaaagcaaaccactcctcgatcatggcgctccctgtcggaattgtgtgcactctgtaacatgtttggttgtggtcgtcctgtttgcctactaacttcgttactgtgctgtgaaagattacagatttgaatatgtagtgtacatgctattcagttgtgaactggtgggccatacgtaacagctgaccaacatgtgaagatactggtacttgatagcctcttaaggaaaatttgcttccaaattttaagctggaaagtcactggaataactttaaaaaagaattacaatacatggctttttagaatttcgttacatatgttaagaattgtgtacaaatgaaatgtctgtactgatcctcaac

SEQ ID NO: 3397 - DNA, 740 bp, Macaca Fascicularis
  misc_feature (1)...(740): n = A,T,C or G
gacatggcgctgcgagttgcgnnctgcccactgaggccctggcagcttgggatgggcgccgtccggctgctgcgcatgggacccgctctgctcttgggaagggttgggagatgtttactgtagtctgcctgaagttgggacaaaattgaacaaacaagatgagtttggtgctttggaaagtgtgagagctgctagtgaactctgttctcctttatcaaaagtaactgaaattaatgaagctnnnnnnnnnnnnnnnnnncttnnnnnnnnnnnnnnttaggaagatggttggctgatcaagatgacactgagtaacccttcataactagatgaactnnnnnnnnnnnnnnnnnnnnnnnnnnnnntaaaaatctattgaggagtgaaaatggaacccctaaataaactagtgtgaaataacgcaacgcagcagagttgtcttaaattagtagtggatagaagacttagaatagcaacttttagcattaccgatgggaaaaaaaactactgttaacactgctaatgaaagaaaatgcattttaactttctaatgattgtagataaacataatatgtgtctgtttcacaatatcctatcattcttagactaagctttagtaatcagaattcatgaaattatccatggtaaaaattagttataaaaattacataattaaaagataacattgttatttttaagcctcatataatattgtaacttgtgtatgtccatacctggat

SEQ ID NO: 3398 - DNA, 772 bp, Macaca Fascicularis
  misc_feature (1)...(772): n = A,T,C or G
aaaagnnnnnnnnnnnnnnnnnnnnnnnnnnnnnnnctattggcaatgagcgnnnncgctgtnnngagacgctcttccagccctccttcatcggtatggaatctgctggcatccacgaaacaacctacaacagcatcatgaagtgcgacattgacatccgcaaggacctgtatgacaacaatgtcttatctggaggcaccactatgtaccctggtattgctgatcgtatgcagaaggaaatcactgccctggctcctagcaccatgaagattaagattcactacatgttgatgtacttattgtcttctatcctgtaggtcttttctatataactttatgccacccttaaatgaatcattgggtatacatgtcatgttggatcctgtgatcacagttttcccagctcatctttttctaagatctgttgaggaagggaaatatgggaaggagaaccatttgatcagaatacaaccaatagtctttaagcatttttaaagtatgaaactgaaatacattcaaaacacttaatccttgaggcttgtgatctgagtaattagcagatatgatgctgggaccagaaaatagaaagtaataactaaagggttaatgtgcaacgttattttttggacttgtgcatgattttatgttttcaatgtcctgtgtacatatagaattgttaaagttgttgtttccannnnatttatattagaaaaattatttagatactttataattttaaccannnntttttaaataatgacacttgcattta

SEQ ID NO: 3399 - DNA, 1898 bp, Macaca Fascicularis
  misc_feature (1)...(1898): n = A,T,C or G
aatatgcagaatggtgcaaaaggtaatgtagaactctattaattattacaaactgaatctttgtgtaaacaccaccttggtcaagaaaaagactattgccaacagcccagacacagccaaaccatatcaataattgtgaccatggtgcacatttgacttttaactcaatttttaatctaaatattttttattagtttactatggctgtgaaattaataaagactgaagctttaaaacagtacacatgtattatctccagttgtcatgcagtaggaatctaaacccatcttagctatgttcaaggctatgataaatgtattggcctgattgagtcttctgttcaatcagaacaatgtattggccttctgttctatgataaatgtattggcctgattgagttttcatttggaggcttaactagggaagaactcacttccaagctcttccaagttgttggtaaaattcattttctcactgctatagaattatgacagtttattttttcaaagccagcaattaagagagggaatcttctgtttggagtctctaacttcaggaaaaagaccttctgtcaaatgattcgcccaatatgacatcccccaagataactgtattagtctgtttacctgctgctaataaagacatactccagactgggtaatttaaaaggaaagaggtttaattgactcacagttccacatggctagggaggcctcataatcatggcggaaggtaaatgaggagcaaagtcatgtcttacatggcagcaggcaagagagcatgtgcaggggaactcccctttacaaaaccatcagatttcatgagacttattcactgtcatgagatctgcacggggaaaatccacccccagtgggtctatcccacgacacgtggggattattacaattcaaggtaatatttcggtggggacacacagccaaaccatatcaataactctctttttattaactcaaagtcaaataattaggagttgtacatacatatacaaactgccttttttactgacatttaatactgattggaagttaagacttttaactacactcaatggaataagattacacaaaagtgtatacaccagagagtagtaataacagggacatcttaaaattatgccaacatacattgtaacatattttatcattatttttaaccctcaaagattttttatgactgtgttatattacaaccaaccaggtatattataaatcacctaaatactagattaccagtacatgtttaggttgtatatgtcagtttttaaggtttgaaaaattccaataatatctgataaatatttgggccttgatattctcagctaggagtcggtgcttttaaaaactggaagaaaatgtgggatgggaccttacttaaaaaccatctgattctattttttaaatcctaggaacaaaagtagatactagatttatgtcattaaaaaagaaatgcttgcaccaatagccttgccagctgaaaaatgaaaaataataatcaaatcaaaagtaattattattttgtgtaataacaaataacagtaaaaaatactcccagatttaggccaggtgcagtgactcatgcctgtaagcccagcaatttgggaggccgaggcaggtagataacctgaggtcaggagtttaggaccagactggtcaagatggcaaaaccctacctctactaaaaaatacaaaaattggttnnnnnnnnnnnnnnnnnnnnnnnnnnnnnnnnnnnnnnnnnnnnnnnnnnnnnnnnnnnnnnnnnnnnnnnnnnnnnnnnnnnnnnnnnnnnnnnnnnnnnnnnnnnnnnnnnnnnnnnnnnnnnnnnnnnnnnnnnnnatcaaaaaaaaaaaaaaaaaaaaaaaaaaaaaaaaggccaca

SEQ ID NO: 3400 - DNA, 760 bp, Macaca Fascicularis
  misc_feature (1)...(760): n = A,T,C or G
gctttttagacttctgctccccccacacctggcactgctgtgctatgnnnaagttgtggtgctgacaaaacttagggaagcnnnnnnnnnnnnnnnnnnnnnnnngcacacagaagaggctggttcttacaatggcacccagtgagcactcccaagtctacagagtgatagccttccctaagccgactctcctggactgtcttgaatatcccctcccaatcacnnnnnnnnnnnnnnnnnnnnnnnnnnnnnnnnnnnnnnnnnnnnnnnnnnnnnnnnnnnnnnnnnnncagggtcatgggagtagcttctttccccccctagaaacgtttgaaacaatctaacgctttaaagcttgaaaaccaattgtaataatgctaaagaaaatgtcatccaatctaaccacatcaannnnnnnnnnnnnnnnnnnnnnnnnnnnnnnnnnnnnnacactctcacatgtttagagttgcagtcgtcatatacagatggttttataatctgatttgttttcttcttcacattagaccacaaatagtgctcgctttctatgtnnnnnnnnnnnnnnnnnnnnnnnnnnnnnnnnnnnnnnnnnnnnnnnnnnnnnnnnnnnnnnnnnnnnnnnnnnnnnnnnnnnnnnnnnnnnnnntttggcagtcttcatgtttgtataatgaatgagagaataagtcatgctccttcaagatcatgtaccccaatttactgccattactctattgataaacatttaactgttcca

SEQ ID NO: 3401 - DNA, 771 bp, Macaca Fascicularis
  misc_feature (1)...(771): n = A,T,C or G
tataaagatagaggaacacatcatgtttagtggtcttgaaaatgataaacttttgcagaaaagaaaataattatgacaacttgggtcctttctggaaatttccagatagttccccatactcagaagaatgattaagagagagaatctgtgactggttatgaggaaggatggaaaattttgaaggacgggttgattatgtaatttttagactgtgttgtttaaaactgttgctgtgatattttagttattaataacaatttggggaaatctagtcagttctggagaaacatttggcgctaataagaaagaaatgccactgtttgtgaattcccaagtggatgtaaagacccattcacttgctaagcctcttaggaaacccagnnnnnnnnnnnnnnntaacaagctgttgacagagtctgatcaaggtaccacctggaacatgttaacaatacaaaaaagtggatgtggagtcagacctgtttcaatccctttatgtcactcaccatgtgaccctggcagattacccatggaaaatttctagggtgtaaaggttgttttacacacagtagctatgattctcactgcttggatggtaggaactcagaactctgaatacttccagtactaacggcagccacaacagcctacagtcacagcacacttacataataccaggtactcttgcaaatgcttcacatgtattatctcatttaattcttaaaaagtcccnacagntnnncactgatattaaattagtcccattttatagat

SEQ ID NO: 3402 - DNA, 658 bp, Macaca Fascicularis
  misc_feature (1)...(658): n = A,T,C or G
agcaggcnnnnnnnnnnnnnnnnnnnnnnnnnnnnnnnnnnnnnnnnnnnnnnnnnnnnnnnnnnnnnnnnnnnnnnnnnnnnnnnnnnnnnnnnnnnnnnnnnnnnnnnnnnnnnnnnnnnnnnnnnnnnnnnnnnnnnnnnnnnnnnnnnnnnnnnnnnnnnnnnnnnnnnnnnnnnnnnnnnnnnnnnnnnnnnnnnnnnnnnnnnnnnnnnnnnnnnnnnnnnnnnnnnnnnnnnnnnnnnnnnnnnnnnnnnnnnnnnnnnnnnnnnnnnnnnnnnnnnnnnnnnnnnnnnnnnnnnnnnnnnnnnnnnnnnnnnnnnnnnnnnnnnnnnnnnnnnnnnnnnnnnnnnnnnnnnnnnnnnnnnnnnnnnnnnnnntgaccgagcgagacttcgtctcaaacaaacaaataaacaaaaacccagaaactctgaggataatctttatgagggagctggcaattgaatgtcattcatctaaatatgcacnnnnnnnnnnnnnnnnnnnttcctgacagattgtccttcctgagaagatagccctctgccttggagctccagagagagggagccctgtattcttggctgcagcagtctaatggannnnnnnnnnnnnnnngtttggagttgggggaggaaaggagtggtcttggttc

SEQ ID NO: 3403 - DNA, 693 bp, Macaca Fascicularis
  misc_feature (1)...(693): n = A,T,C or G
gatgagaagtttacannnnnnnnnnnnnnnnnnnnnnnnnntctcaaaggtnnnnnnnnnnnnnnnnnnnnnnnnnnnnnnnnnnnnnnnnataggatattttgttttcaagccaaaattatcattaatcaaatatgttttaattatgcctggcttactataagttttttattctgatatacagttcaaatatcattgcaacaaagaagtgcctgtatttagatcaaaagcaggactttctatgtgtttgttttgcatgataatatgaatataatttaagtgtatcaatagtcaaagcataaacaaaagctaatcaactggcactgttgtcacctgagactaagcggatgttgttggctaacacacaggctcagccagcagagaaagaattctgaattccccttgctgaactgaactattctattgcatatggttgacaaatctgtgtgctattttttttctacctaccatatttaaatgtannnnnnnnnnnnnnngacatagtcaaactttcgacgatgaacattcctgatttttcgcctgattattctctgttgagctctacttgtggtcattcaagattttatgaggttgaaaagaaaagtgaatatgacctttaaaagttgtattttgagtgactatannntnnnnnnctatgaaactgccaattnnncctaatgttaaagattccat

SEQ ID NO: 3404 - DNA, 724 bp, Macaca Fascicularis
ttaactacgagagcctaaagcatatgtttgggaaagcaccctctttatccttgaccaacttgcagataaatacatctctccattttaaacgaagaagggcaatcatgttggtgatccagatcactgagaaggcccaatgtatcccatcttttatctttgttggcaatagagcttttctatggcccacactttacaattctttatttgtcattctaatccatccttcccatccttttttctttctttgagaactgctaaatggaaaactagcctggaagcaccaagtaaatatattcaaggaatataagttgtttaaacattagaaaaatttttgcactcattttttagctgtattaggaatgtcgataatcctgtagcaaattttcacagagaacttttaagaaattcttgcattggtcaatttcaatttgaaagctttttggtttgtttgcttttaaaattttcatgttctaggaaactatgattctggttgttcaggattgttattattatagttgtgtaaaattatttgtttattttgtgtgtattgtgcacagctttagggggggaagtgcacaaattgtgctgttccttataaatggtacacattactgacacagacaaataaagtttctaattgtttctgatttaatcactagtgatacagcatattctgtatggaatgttttctcttttctcattgtcatctacttcattttttgtt

SEQ ID NO: 3405 - DNA, 773 bp, Macaca Fascicularis
  misc_feature (1)...(773): n = A,T,C or G
tagactgaatgataatctgtttttgatcagtatatggcnnngnnnnnnnnnnnnnnntgatatggtagtttttcactaccanntnntgacttttagcttttatnnnnnnnnnnnnnnnnnnnnnncagaccaaaatttctaattctgctaattctgaaggggaaatagacaaatctttaannnnnnnnnnnnnnnnacttgatttaactcagtaagaatgtgaattatttgttctacttgggtggtttaatttaatcnnnnnnnnnnnnnnnnnaaggttttggattttctaaagatgcagtgttgtttctgttcatcagggttaatatttctaactatattgcttgtagctgaccccattctggatttgtttggtttggtttggttccagttaaaagagaggacaggaactaaatggggctaaccacttcaggtgcagcttgtgcgagggtagatggttcctgcacacagaagttaccacaggggtcaggttactttcttcaaatagcagatttcagtactgtatcctcattgtggaaacaagccaaaccaaatgaactctggaaaacctaaaacaaatgtacattttcctttgtgtacgtttccgtggtccaaatgacaatataaatccagtctttattatacctttgttgtatttatgctgaatcctccctttgccttttcaggatttaggcctgtaagaaactatgcctgactctgtaaaataagtgtaaagaattatacgtacatctctggattnnngagaaaataaa

SEQ ID NO: 3406 - DNA, 550 bp, Macaca Fascicularis
acaccccctccccgatttagacctgcggtgagtatttaaaaagaatggaagccaggggagtgttggtttaaaaaatttcattctggcgggtcacggtgtcctatgcttgtaacctcacactttgggaggccagggcaagacgattgctagaaaccaacagttcaagaccctatgttttcaaaaaatatttagaaggaagccaagcatgatagtgcgaacctatagtcccggctgctcgagaggctgaggcaggagggtcacttgagcccaggagtttgaggttgcagtgagctacgattataccacttgcactccagccagggcaaaagtgagaccttatctcttaaataaaaaaaagttgcatcctcctgtggtgcaggggatataagattaaggtctctgcctcaggttaagctgtaaggcaggtgagacccacacctgaacatgcttagagacacggcagagtagtgttctccctccacctctaccagcttcccatgcatttgtagcttgaatacattgttagtgagaggatggtgatcaagttctt

SEQ ID NO: 3407 - DNA, 740 bp, Macaca Fascicularis
  misc_feature (1)...(740): n = A,T,C or G
gtccagtgagnnnntcactccccagannnnntcctcccacaccagagcacagcctaggtaggggggaaatcagtcctttcagctaccaccctccaacctttgggnnnnnnnnnnnnnnnnnnnnnnnnnnnnnntgtgttctgtctggacctggggaggcccctgaaggcaaagagggaacctgccccagctgttctgtcctagaggagggggacatagccctagcaggagcttgcagccccttttggcactctgacacacaagtatgcccatttggggcnnnnnnnnnnnnnnnnnnnnnngcaggcctgcagggtgtggggaaggaggacacaacctcaagaaaggaaacatgaatcccagggaacagcgggtcccttccctcctcagacacaagccacctcagcttgtggctcttggcccccagcccctcccacccacctgttcatttattcaacagacaatgacagctcatatttattggacatnnnnnnnnnnnnnnnnnnnnnnnnnnnnnnnncccatttgtttctcacagctggtatttattgtccgctcttctgtgccaggtgctgtgctctgggcacgggcactgcacgggccctggtggagcttgtggtctgacaggtgaggctgacccaagcccaccnnnnnnnnnnnnnnnncagggcgagggtacacacgggggcgtcacaccatatgtctaaatatttaaaagttatcaatcaagctaacaactg

SEQ ID NO: 3408 - DNA, 687 bp, Macaca Fascicularis
  misc_feature (1)...(687): n = A,T,C or G
tggatggtggtggcagaggacnntgtgtgcagtgtgatgctgtctcctgaatcccttagcgggtacctcccaggaggatcgcaggtgaggcctgcggaactcagcacaggacagcagcctttggtgggccgctgtggcccgcgcgtctctgctctctccnnnnnnnnnnnnnnnnnnnnnnnnnnnnnnnnnnnnnnnnnnnncccgtcttnnnnnnnnnnnnnnnnnnnnnnnnnnnngggaggtttctcctccctctgtcatggcagtctcttggtttgtgtctggctaaggccatgtgtgtgcttcggaccgagccctagcttaggcgagggagccaggctgacttcggccctcggttttcattcaagccagtctgcttatggcccttcctggccgcctgccacaccgcaagctcactggggggacaccagaagcaccnnnnnnnnnnnnnnnnnnnnnngctatccgcgggcgccagccccagcctcccaccacgcnnnnnnnnnnnnnnnncaaagttaagaagcccctcaggaagagaatcgaggccaagttcctgtgggccaagggccccgagcacatccgccaaggctcagctgcagtgccaggcggaggagggagatccagaaattgtgaacaacgtttgatttagtagcgtgacttgcctttccctttaaaaacatc

SEQ ID NO: 3409 - DNA, 794 bp, Macaca Fascicularis
ggacatagcggttgtgaatgtgtgcccctaatatcagagctcacttagacacgaaaccgacagggcggatggagacagacaggctctgcaccgcaggaggaccccacagtcccctcttgctgactgacgtgcaggtgggcggaggagcagtgcccagcacctgcgcccttggtgtctgaggctctccagccagagcagcggtggacgcagccacagacagaaggcacccgcgtgctgggccctggccagagcaggcctctcggtctgtccgagcctggctgggatacctgagaacgaggcacacatgggctggatggagggtcagcgtcatgctgtggttctgtttacaccaaaaacatctttccacagcaggacgaaagcctcagcaaaacctttaggcccccgagggccgtgactgctgtccacacctgccttgccgtccacacctgcctttcagggttttccaggtgggtccggagtggcctgtgcttgagggctcaggtccacccgagactgcctggtgtgcgtaactgggcatctgcacctggctgctgggcacaggccatgccagccccgtatgagctctggggttgttctcccttctttccaggggtcctccctggccctgggtggttccagcagaacagtcgccagggcacaagtctggttctcgaaagaacttgccctgcctctatgagacagaaatgatctaaacacgttctctcgccaaaaagaattaaattagaagtaaataaaaaagatttacggaaaagtctcaaaaaaaaaaaaaaaaa

SEQ ID NO: 3410 - DNA, 703 bp, Macaca Fascicularis
  misc_feature (1)...(703): n = A,T,C or G
tctaattcttcttaaactgggctggcttatttaataggaggatgttgtggctcttgctgaaggcagaattagcaaccattccattaccttttaagnnnnnnnnnnnnnnnnnnncccaaccataaaatcatttccattctccaaccatcaagttttcaaatggatttcgtaaannnnnnnnnnnnnnnnnnnaatctattttttagaaatgtcaggctgcaaataaggacaatcagaaagggagaagcgaacaccatccgtcaatgccccaccggcnnnnnnnnnnnnnnnnttcttatgattaacctagcatactccccataaagtctaaatcattctcaccttcccaggagtttgtaagccagacaattgtgaaggggaatgactcataatatgactgcaaaatttcacagttgaaagtcaaatagcaatgattttnnnnnnnnnnnnnnnnnnnnnnnnnnnnnnnnnnnnnnnngtccctgggcagtgaacatgctctgtgaagcgttggagtcatgttggtgcaagcagctccttggtnnnnnnnnnnnnnnnnnntggtcacagagggcatcgggcacttttttctccatcaaaattccatacattatgataactggggaattaatgccaaccacaacgacaacataaaacctccnnnnnngttatgctgtgtatgagtctgagtctccagaaaaat

SEQ ID NO: 3411 - DNA, 735 bp, Macaca Fascicularis
  misc_feature (1)...(735): n = A,T,C or G
cgtgcctgantgtcaatcttcacagactccctcccccatgcagagatgggattcaccagacaacccgcttctcctggccctcagggtcgccagtgtcctgctgactcagtgataagggccttggctgctgtggggtgtgttggctgctgtggggtgtgttcgcttcggtggacggggacaccttcgaatacgtgcccagaggcaccttgcagtgcagattccatattaatcaggtgcaaggtctcagagcacaggcttggggaaaccttgcccttgagggtgcttcctgcttttcatttggtgaaatgtgagctcatccctcactcagccctccaccctcattccactaaccccgggataaagctatttaatcctctcttgttcctcatagccgtcataaacggtgcaggatcgttcctattaccgactcatggcacaggatcgtccccgctccccttcaggatcttcgctgtcaaggcctcctgccctgggtggcagggaatcgcaggcagccctcaggagagcagagcccacttctgtaagcatgcactcctgcacagcactcgaaggctggtctactctgtggtggacacaagtcccttggccgccaaagaaaccagggctgacctcctctgtgtacttgtctcattctccattgaagagaatattctactcacccccaggtgtcccgacagcatgacctgttacgcagtacaatcgactgacctacatgaa

SEQ ID NO: 3412 - DNA, 788 bp, Macaca Fascicularis
  misc_feature (1)...(788): n = A,T,C or G
ccaagaaatgaaaacaaagtgcccttannnnnnnnnnncgaactagaagannngnnnnnnnnnnnnnnnnggagagtttcctctgccccccttttaaaaaatgtcttcaggcctaacaaatgataacatctattgttatgaattttttttccttccacagagtgaccttggagatacatcatgatagcacgcaaagagatgcagatggatctttgagcatatgtgatgaagagttatactcatttacagtnnnnnnnnnnnnnnnnnnnnnnnnnnnnnnnnnnnnnnnnnnnnnnnnnnnnnnnnnnnnnnnnnnnnnnnnnnnnctgttcaagcagaaacctgaaccaagtgaacaagttcaacatcatcagtaagaagaacnnnnnnnnnnnnnnnnnnnnnnnaatgcannnnnnnnnnnnnnnnatcatttttgtactgtaatggccaaaggtgcataacttcagtccaatcatggaaatacatcagacaaacccaaatcgaggaacatttgacaaatactgatcaatactggttcaaagtgtcacggttaggaaagataaggaaagactnnnnnnnnnnnnnnnnnnnnctacaaaatggcaagagactaagaaataactaaatgccccgtgatcctgggtggaatttgtgaacagaaaaaggacattagtagaaaaagtggtgaaactccagtaaggactttagtttagctaatatgttcattttaaattagttaaataatttaaatatgtttaaacattattgaaatgtatttaaattaa

SEQ ID NO: 3413 - DNA, 2335 bp, Macaca Fascicularis
ttgggggatgatgggggttttgtgaacagattcacagttaacagtgacgactttggaataaagcaggcaaaatccaaaagaaaattacaaaatcaggtcttagactcaaagaactttaaaagtgttaaaaggaagctacataatgactgggtcatgaaaattagatatatttcagccctaaattgttttggatcctgctccttagacagtaatcattcattagttttggaatccttgaagagactcgagggtaatttgcccgtccgagagttttccatgccaagaggagcgaacactttttgctactgtgttaaagcaaatgtgattgtcactggaggagacgataaagtcatccggttgtggcaccccaatatcagcaccaagcccgtggggaaacttgtgggacacatgttcagtatcactgagatcgtaaccaatgaaaaagaccaacatatcgtcagcctttcctctgcaaaggttttcagggtgtgggatatacaaactctctcactgttacaagtcttccatgacagccagggagggccaggagacatgcagattcactccatgatatatgatgccaatcacggcatgcttattacgggatctagtgttatggacatgtatcctttgactaggatgatacaagacaccaaacaggttcctcacactcatgaacgagaaatcaatgtcatgctttacaacaaatatcttcaccaagtactcactatctgctctgaatccataattagggtatgggaactcgagactgggctccaagtataccagattttagaccctcatggtttcaatattgaagtgacttctgcagctgtcgatgaaagtggatttttttttgccacaggagcatataacggaacagtcagaatctgggactttggcagtgggcaggagatgaaagtgttgctggaggggaaagactggaaggaggaggagcactgcctacaacgcctcgttttcctcaaagcccaagaaaaacaccagcacctggtcctggccttggagcgcaacgggactatcaaaatgatccagggcaaggaagatgatatttacctcatggtgatctgggagctgcccgatgttgtgcctttcctacaagatgggaaacatgctgtgcatctgagagtgtctactagagataggaacatggctattcctttcccagatgtcgagttaatagttgagaggaatgcttctcaaccttctaataatcccgccatggattcattacgagtgaactgcattgatttactacaagtagaagggtataatttgatagcagctggaaatgtggaaggacatgttatcctttgcaatattagctctttcctggatccacctcatgatgaaaagaaattcaagcagctgctttcctggcgtgcgcattctttggaaattattcaagtaatctatgtagaagaaaaacaagtggtaattactgcctccatcgatggctcagtaaggctctggcatgccctcaacggacattattgtggctattttggacagcgaaggctctttgaattatcacagacaagtgatttcattttgccttgtgatgttactgaatatcccattgaaataaaagaagaaagcaagttcacagagaagcaaaaatatgaatatcctctgatatttgaccgggaaaaatggagaaaaatgagctcaatgtctttgcttttcaaacgcacacctcccaaggcctttgaagtggaacaggacttcaagtttttcaagtctctttcttctcctaagattcgaagatatcccttggaaggttttgtgactgaaaacagagaggcagggattgtttttggctctctgcctatatacaggatatcaagccccactagtctgagatttcttccactgattggtgtagaagcccaaaaggactcttcagatggcattacaggaaagaagaagggaggtcatgttcaacatgaaaaagtatcacgaagaagaagtttgaaaaaaaatttagttccacaaataaatctggcttcttccttcttcccagctatacccaagtaagaagaaaaaatcagaaatggctgctgcacataaaatggcaacgtttggatgataccttctctttatttcaggatgagagggagaaaccagcagacactatctgctgtcatttctggtgtcattcaccagtcatttctggtgtcaggccatcctactgatggggaagattctttagggagttctggtgacctgaataccaagcaaggagcaagcagccagaagtttaggcagtgtttctcatttactatcagcagactgacacataaaaaaaaaaaaaaaa

SEQ ID NO: 3414 - DNA, 2788 bp, Macaca Fascicularis
attttatccccaatgagaaagctcactcatttaattgcctcattggcctgagaggcacagctggccatttttggcttccatcaggtccctcatttcccagtcgtgggttttaacgcagctacccaatatatggtggaaccaaatgcttaattttattatgtgagctagaaggtcatggtaattattagtttgatgtatgtctcttgatttccctagttttggttctgagattttaagtttcaattgctgctgcatttccaagttcttatgaagggatagtttgctttctgtttactaacaacatatgagaaggcttcttctcaatactccaagtcttcattttctgtttttggcaagaattatgtctttgatactccctgtaactgttatttcagattttggtatgaggaaaagtaaacttccggttgtgcgtgatgtatttcattaaggaatatccagcctgacatttaggtcttcagactttgattctgtagggagcattctgatgaccttcactatgtcagtcagatggaatttccaggggaaacccatcctaaatgattcagcactttgggttgctttggaagtgaatagggagctggtgaggatagttgccaggtcatcaggtattttaggaactcctcttccctgaagcatgtgagttcttgctgaaatctatataatttggagcctcaaaatagactaatatgcacttacccatattgaacgtgtcaacatccctaacctggcacacagtcctacatcagagcaagaaaaagaagtgtgttttaacttcttgcttaattttatgtgtgaaaccaaaataaaaagaggcatgacccagtttgagggaattataacaaaaccctaccttaggctccatgataagtaagaccctgtgcagactctgaagccaggccctgggctttagcccctgaggtgcaacaggcagtgtttactgagctctgtggccacagggtatctgctgtgacatgccattggttaccaaaggaactgggccaaggcatgtggttaggttagtataaatccttcaatgctagtagagagactgcttcaaacacatttccttgttggcacaatgctaccttcatataaaggaactgttcatcctgaaaacacattttccctgtaagaacacattcacgtactcaaagactttcatctgccaacaagatttaatagttaccttctgtttctatttggaatttctcctatctcttgactaccttgtttctggtgctaccaccaccagaattccttaagggaatgtggaggtctgggtttcccccatattctctggcatttctttgcccttcagagtgccaggctcagagagttgcacagtgtgattgctgtccgcctcggccacaccatccctcctctaacaagaatagaaaggttaagggacttggccttctcaggagaaccctttaaatgtacgtttacattcctgcaaagcctgttgatgctgaaagaaagataggaaatagctctcgtccttgttttgaaggacaggagactaattttcccttcaaacttgatattctggtgtttttgtgactgtttttgtaaattattcaaagttgttggaattttaagtctgattttcccattactcatcatgaaggtcatagaatatgctatgagttggaaggttttccaagtgggttcttgaccaaaaacctactttttaacaaataattttgatgggttagacatgttcttccatcctctccaactctggatatgggcacacacacaccccttggtacttcccagttctcaaaacgtaatctagcacttcaggcatccaaagtgcccctggttcaatagatagctgctttttgccggtctctgtgcacaaattgttttgactgaattcagtttaaatttccaaaaagcactgattctgttcaaactaatgttcattggattattgacccgtatgatgccagagttggtcgttggctttttttttcctaggagatattttgctctcctgcagaacaagcttaataacattaactttcaaggtagttttggaagatgagaaattgtgcttttgttttggcaactgaaagctttgtccaacggatactatgtgaggaaggtggtttaaggagttttagggccctcttgtccttctttaaggctctgcaaaccttattttggaaaacttctttttctcccttttatttgaatttcctcccagaaattatcatcttggtatcaccgagacaaatctagtatcaatatgcttgcctgagaaactaggattatgtctgtccacataaattgcaagggagaaggtattctgtttatttcctgctgatgctttcatatcaccatgtaactgcacatattaaaattataatgcaagtaaaaatttattctcttcaaaatcttattcttcaaatactattcagaaagccatttggcacaagtacagaatttaacttaacgctccaatctggaattcactgaatgcattcaaactgttagaaaggaaaataaaaatggaggacaaacacatttttgttttgtttctgaaaacaatatttaaggtcagaactgtttaaaaagaagcactgctaaaaagttataggattcagagaaacatagtatttttgtacagtatcttataaaatgttcagacctctctacattctctttacaatgtaatgtctcttaagtgactggtttcccaataaactgattttaatgcctcttcaaaaaaaaaaaaaaaaaaaaaaaaaaaaaaaaaaaa

SEQ ID NO: 3415 - DNA, 2307 bp, Macaca Fascicularis
  misc_feature (1)...(2307): n = A,T,C or G
ataatataactaacactttctttaaattgccagctcatttgttctaaaatcttactaaagatacctgttatggactaattgcttcatgctttgaaatctgtattgttaactggtgtcttgatattctttattaattatgaacttggatgaatattcttatgaaagtggatcctaaactttggatgggtgagaatcacattgggcatgtgctgaaatacagacatggctctactccataagaactgagtcacatctcagagaatcatgcaattccagcaaattgactgctagaatttgagaacaactaccttacaagttcaaggattattctttccttttaaggactttgtttttgttctttgctttgaagaactaggttggtttttttctttttagtcttcttgccttttttcttgtccccctcaacaagacttctaattcaacaaggacctagttgagagcattaccttagaaaactaagtaccaactgcaatatgcaaattttattgaatgttattttggatttgtttaatactctttgccctttaggtgctcaataagtgattttggtggactatcaacacttcaataaatatgtgttatttagatatatttatgagaaaaataacaaaggaagaaaagaagcacagcttttcataattgttcagtagggtcctgcttctctttttaaataccctagatatctagaccaatatgtttcctaatcagaactaaaaaaggactttaaatagtataaataatattaatgttaatttttacaattgtattaatagttattagaacatagagaagccagtgtgcatgctccacataactttcaaagcaaggattctcacacttgagtgtgtatcagaatcacctggcgggctggttaaaccagaatgcctggctccactcccagagtttctgatgctgttagtctggatggggtcagaggattctggtttctaaaaagttcccaggtgacatcaatgccactggtctgtggaccacatatttgagagatttactgtacagaggaaggaaactttttaaacagagcagcaagtgactccgaagataccttggagagcatcggaattccatagtttgcaaagtttctttttgctgtggtattctgcccatcctcacgccttcaatgagctccccagaactttgattttacaaataagtacgagtaataaatgactatcttgagcaagctaaatcttcattgttgatggagtgtacttctttctctgtaggcccctgaacacacaacctccctccacccgtagatacacacagaaaagggttgttagtacacttggggccctggagtacagtcttgacaaatcaaaggtaagaaaattgagtcccagagagagagataaacatgcccaagttatatagccagaaattgctaggaatatgtgagtgaacatttatgttccatgcttctctcttctgcttttgatagcctatgtttatatcttttacctttacctgtaattttatttcaagtctcacttcttcacgcatagactaaatatttagcagtttcatgactatgcaattgctcaataaaatctacagttgaattatggagtttctttgtagagaagtaccattgtgaacaaaaattattgaagaagaaaacatcactgaaaaaatatctgattagaatatctttgaaacttttttatttcttcttctcagccttatgcacaggtccccataattaccatacccattagccctgtttttatgaagaaatgttctctttcttcctcccacttagctccccaagttgttttggaaatgttcttctgggttatagaacagcatttcacagcaactaatagcagtaggtaaagtctctattatgttcattttatttctgtgaaagcataaaggaccccatggaaaatggaatcttttgtcctcctgtaagtcaagttcatgttctcatgttaaaaaaaaatgataggccnnnnnnnnnnnnnnnnnnnnnnnnnnnnnnnnnnnnnnnnagccgagacgagcggatcacggggtcagnnnnnnnnnnnnnnnnnnnnnnnnnnnnnnnnnnnnnnnnnnnnnnnnnnnnnnnnnnnnnnnnnnnnnnnnnnnnnnnnnnnnnnnnnnnnnnnnnnnnnnnnnnnnnnnnnnnnnnnnnnnnnnnnnnnnnnnnnnnnnnnnnnnnnnnnnnnnnnnnnnnnnnnnnnnnnnnnnnnnnnnnnnnnnnnnnnnnnnnnnnnnnnnnnnnnnncaaaaaaaaaaaaaaaaaaaaaaaaggccaca

SEQ ID NO: 3416 - DNA, 747 bp, Macaca Fascicularis
  misc_feature (1)...(747): n = A,T,C or G
actgtcataggtgggtttntnnngtgtgttagtgtttnnanctcctggctggacttnnncttctttttaagaagaggaggggagaggatgggagaggatgtctttaacagctagnnnnnnnnnnnnnnnnnnnnttcaggccacccacgtgaggacactctttcttctctgaggaatcgtggaattttaaagatgaacaagattcatgtccactgaattattcaatgcatgggtcagagaggggggtgatttgcctgtggtcaccaggcacgttcgtggaggagtcgggacaggaagatgtgtcctctctgtttcagctcactgctctctctcactgctcagctcactgctctctctgccccaactannnnnnnnnnnnnggaggttgctgagaagctgccctggggagaatgtccaggcgtcttgaaggtggatgcaagattggcaggctgctcagtcacccgtcctttacactcagtgtggataccatgcattcnnnnnnnnnnnnnnngtgcttctgcccaagccacttccttaaattctcaaaaatcagcatctggggtcctggcaaacaaggaagcttccaagtaaaaaccagaaagaagggcacacttttctttcttccttaggaaatcttattgcacaggaccgacccccagccccacaccttcccaaggcagcctccctgtgcagatagaatgagaaaggtcccagaagggggctcactcacctctaggcccagagagg

SEQ ID NO: 3417 - DNA, 2113 bp, Macaca Fascicularis
gtgctcttcagtggcagaggcggcggcgaggcctgagcgagttgaacttcctctctttttagaagaatggatttctcggaggccaaaaaatttatggttcttctctggaagaattttattttaaagaggcggcgatgtattgctttagttgtggaaatggtcctcacatttctgtttagtgccgcactcttggcagtacgctctgttattgttataaagaagaatggaccttttgatttcgctgctcagcctgttgatgaagtgcctttctgccctattgtgtgatttcatcatcttctttgcctcctgctgcttagtaatgggagtgataaaataccgcaaattagatatttatgtcacggattaccacattctggaaactatgctgatcttcacgctgtatggctggtctgccattccctttgtgtacctgataagctttgtgttttccggaagtacttctgcctacatcaaacttctcctactcagctacttttcaggcacttttggtttcctcataggcgagataatagaaaacaaaaagctaaccaacatctcaaacaccaccagaaccgtcgtacgtaattcattgcagctctttcccaattacaaccttgcaaagtgcgttagtcagtatacaactatctacgacgtgaagatattgtgcaccaccttaaagaagcatcctgtccacctaaattgtagcaaagcaaatactgagaagaatatttattctttgaaagagcctatgattggaaagtatttgattgacatgagtactgcaggctttattttccttgtgttgattttcttttgggagactacttcatggagactaagaacattcctcaatcaatacatttactttggtatctacaagcgatacaggaaagagatagtgtccaaggaattatctgggcaatctgaagatgaagatgtacaaaacgaaagaaagagaatcctggagcagcctcaggagttgctggattctatagtacttgttaaagaactcataaagatatattttaagtgcccagccattctggctgtaaaaaatatctcccttgcaatccaaaagggggagtgctttggattgcttggattcaatggagctggaaaaacaactactttccaaattttgactggggaagcgagccctacctctggagatgtgttgattgatggctttagcatcacaaaagatatcctacaggtaaggtcaagaattggctactgtcctcaatttgatgccttgctggaatatatgactgctcaggaaataatgattatgtatgccagaatatggggagtctctgagccccagattaagctgtatgtgaacaaatggttgaattcactggaactggagtctcatgctgacaggcttatcagcacctacagtgaaggaaacaaacgtaggctgagtactgctattgccctaatgggaaggtcttcaatcatcttcctggatgagccatcaactggcatggacccagtagcccgacgcctgctctggaacatagtgacaaagacacgcgaaagtggaaaagccatcgttataacctcccacagtatggaggaatgtgatgcgctctgtaccagtctagccatcatggtgcaagggaagttcatgtgcttgggcagccctcagcatctcaagaacaagtttggcaacatttacatcctcaaggtcaaggtcaagactaaagataaattacaggattttaaacgttttgttacaacaacatttccaggtagtgtcttaaaacatgagaatcaagggatccttaactactacattcctagcaaggacaatcgctggggaaaggtgtttggcattttggagcaagctaaagagcaatttgatttagaagactattccgtcagtcagatcacactggaacaagtcttcctgacctttgctaacccagagaaagtatccagtgatgatgaaaacgaggtgccatgagattcatttacaaccagtgaccctcgtgtctttcacagatgacacctggatgcatacggggaccttcctgtgcatgtatatcttggtgtaaatatatttacataataaagattttcccaaagaaaaaaaaaaaaaaagaaaaaa

SEQ ID NO: 3418 - DNA, 704 bp, Macaca Fascicularis
  misc_feature (1)...(704): n = A,T,C or G
atnnnnnnnnnnnnnnnnnnnnnnnnnnnnnnnnactataannnnnnnnnnnnnnnnnnnnnnnnnnnnnnnnnnnnnnnnnnnnnnnnnnnnnnnnnnnnnnnnnnnnnnnnnnnnnnnnnnnnnnnnnnnnnnnnnnnnnnnnnnnnnnnnnnnnnnnnnnnnnnnnnnnnnnnnnnnnnnnnnnnnnnnnnnnnnnnnnnnnnnnnnnnnnnnnnnntggcaaagtccgagttgttacactgtgctttaaaaaaaaaaatcttatctgcatgtattgttaacgnnnnnnnnnnnnnnnntatttatcaggnnnnnnnnnnnnnnnnnttcaggtccattgcaactgacttttttctnnnnnnnnnnnnnnnnnnnnnnnnnnnnnnnnnnnnnnnnnnnnnnnnnnnnnnnnnnnnnnnnnnnnnnnnnnnncacaagcacatacaagnnnnnnnnnnnnnnnnnnnnnnnnnaagatggaaaattgcaataacnnnnnnnnnnnnnnttagaaaatcatccttactaggtaaaatgtattatgatgcaataannnnnnnnnnnnnnnnnnnnnnnnnnnnnnnnnnnnnnnnnnnnnnnnagaaaaaaaaacagctccttctccattatttacattttaagatgtggtggggggagattgggagaaattaatnnnnnnnnnnnnnnnnnnattttaaaag

SEQ ID NO: 3419 - DNA, 868 bp, Macaca Fascicularis
  misc_feature (1)...(868): n = A,T,C or G
ggcagccaacaggtnnngatgtcagagccatcctttaccaggtgggcctgctcgtccccatnntcctggccacatcactctactttttggaaagccatgnnnnnnnnnnnnnnnncttgtagtttcccaaacgaaatggaatctagaagcagtgaaaaaaggtcagataactttgaattgcattcaagaagtacacttctttcccattgtccgtggcacttgcagtctctatgatgccaggctagagtctgatcatataataattcaaagtggtaactcccaaggtaatgctttcttccatttcatcaggttcttatatccccactgcactccctccccttctcccttgcctgtctgaatggcttcttggaagcttggctctagtcctccctgccttggcagggccagagcccactactgctgaggcagcactgctcttgtcagnnnnnnnnnnnnnnnnnngtgtcttcagagggttatgagttagagtagctggccgggggagagggtgcctccctgggtttgatctttagggtctgactttctgcagagaagatgttttacagatgtgtcaaagctgatgttgtaatgtggttgggggaggaaatccagacccaaagtgtttgtcagctgggtgtacaaatgactgtgtgatcctctgtcttaaaatgatttctgtctgtgctgggaaacaaaaacaaggtgaggtatttttcttttttgtaataatataaagctgtgtgtttctgattggatgattcactatgtgcattgttttctcccaagtnnnnnnnnnnnnnnncaatcaaatggtgtaaataaggatgttcttttcctgttcctttttttttttttctctattattctt

SEQ ID NO: 3420 - DNA, 598 bp, Macaca Fascicularis
  misc_feature (1)...(598): n = A,T,C or G
gtgtgctgtgaccnnnnnnnnnnnnnnnnnnnnnnnnnnnnnnnnnnnnnnnnnnnnnnnnnnnnnnnnnnnnnnnnnnnggccccnnnnnnnnnnnnnnnnnngctgcaggttgcacgccagggcctgtacttaccnnnnnnnnnnnnnnnnnnnnnnnaaggaggaatggcggccgtgggcagcctgcttggcctgctgaggcagagcaccatgaaggccaccgaacctgcactccgccacctgcacacatcctcnnnnnnnnnnnnnnnnngcagggcctcactcagtcgtgtgnnnnnnnnnnnnnnnnnnnnnnnnnnnnnnnnnnnnnnnnnnnnnnnnnnnnnnnnnnnnnnnnnnnnnnnnnnnnnnnnnnnnnnnnnnnnnnnnnnnnnnnncatagatctggacaccttgtnnnnnnnnnnnnnnnnnnnnnnnnnnnnnnnnnnnnnnnnnnnnnnnnnnnnnnnnnnnnnnnnnnnnnnnnnnnnnnnnnnnnnnnnnnnnnnnnagcactaccaacagttctggaacaggaccaagaagtgaccgtggctccagccaccnnnnnnnnnngataagatgggagggc

SEQ ID NO: 3421 - DNA, 732 bp, Macaca Fascicularis
  misc_feature (1)...(732): n = A,T,C or G
tagggcaacatgggggctgccaatgggacaggcagggcggtgtggcagggtggagaggtcctacagaggctgagtgaccccactttgagttcactaagctatgcaactttccttttggcagatattttttgacactgggcactgggctgtctacccgggtataggtaacccacaggcccagtgccaaccctcaaannnnnnnnnnnnnnnnnnnnnnnnnnnnnnnnnnnnnnnntgcaaggggccacttagggcgctgctggcagggcttctagctaacccaggaaggggtcatcaggagaggcttccctgaggacacaatgtgtaagagaggtgagaagagctcccaagcagagacaacggcagcacagaggtctggaggccatacaaaaagagatgctcgccctgggctagcctcagcggacctaaggcatctccactccttccggaggagccgcccagattcctgcagtggaaaggaggtcttctcccagcagcagcaggtnnnnnnnnnnnnnnnnnnnnnnnnnnnnnnnnnnnnnnnnnnnnnnnnnnnnnnnnnnnnnnnnnnnnnnnnnnnnnnnnnnccttttcccccaaatcctactccctcagcctcaggcagtggtgctcccatcttcctccccacaactgtgctctgcctggtgccagcctttcagaccctgatcctagggactcgggtggatgcgctgatagcacatgctcaagaca

SEQ ID NO: 3422 - DNA, 726 bp, Macaca Fascicularis
  misc_feature (1)...(726): n = A,T,C or G
gaaacagtcagtggccaacagcgtggagatagctgtgcctgtannnnnnnnnnnnnnntcccccagattcaagaccagtgtggnnnnnnnnnnnnnnnnnnnnnagagaaacgtcgtgatttggagtattaagtctttcccggggggcaaggagtacttgatgcgagcccactttggcctccccagcgtggaaaaggaggaggtggagggccggccccccatcggggtcaagtttgagatcccctactccactgtctctgggatccaggtccgatacatgaagatcattgagaaaagtggttaccaggccctgccctgggttcgctannnnnnnnnnnnnnnnnnntaccaactnnnnnnnnnnnnnnnnnnnnnatgggggctcgaacacggggcttccctacagccccagatgcagattttagagggagggaaggtgcgggctgtgtgtgtctgtgtgagggcaggtcnnnnnnnnnnnngtttcttgctcccagcacccgccccttcctcnnnnnnnnnnnnnnnnnnnnnnnnnnnnnnnnnntctctctgcttccctcgcccttggagctttccccgtccccctgattttatatgaagaaatagaggaggggcttgaagtccccctcgcgagtgccttcttgcaacgacctgccttagcgggtgttgcgtgtccctctttcacagctgctgagcccagaggccccgctggcccctcctcta

SEQ ID NO: 3423 - DNA, 764 bp, Macaca Fascicularis
atcacaggtattatgactccacatgaaccttcacattgttcgctcataatctacttactgcctaaaaactacaaaaccaggctaagaaacaccaccagttagagcatttacttctgcttctcctggattatgtgctacaaatgtgctttgactttagaaagggatggatgagaagacagatctgagaccaatctgggtagaagcaaaaagttgaacctttgaaagtgctgaacacaaatccaaattcgaatggttcaagtagccgtgaaatcgctcttcataaagtgggcttaattctctagtttaagttcttttgatggaatgaattaattaatgtgtcaggtggcttatttgtggatgccatgattgatgatgttcattttaagctcttacctatagtacaagtacatgatgctactgaatatttttccacttggaaactgtgagctggttgttgcattaaaacacacatacaaacaaaatcaaaaacactgcggactttcactcaagctggtctttcttccccagtgtaaggcaatcctgcctactaacaacaccaacaacaaaacactccatctgtgaagctgacgcagttaagggggctaggcagggcatttgtgccaactaagaatcaccagacacccaacataagtacctatcgcagttttgaagtcgtttctccccaactcccaactcctgaaggttgctgcctgcatatttactcttcattagtgctattttcctgtatgtcatgtgagcaagct

SEQ ID NO: 3424 - DNA, 688 bp, Macaca Fascicularis
  misc_feature (1)...(688): n = A,T,C or G
ataagattgcttgcattttctgctcaacaatgtgtannntctgtttgggaaagcactagtgatggattactttttaaagcaatacatttagcttgcaaattgtgcctttaaaaaaaaaaaaaagtaggcagacttttgagggccgagaaggaagctgtccagttttccaaaaatcctttttccctgctatcagaaatgtgaaaccaaatttagcaaccaagattaatgaaaagatgggttttccattagtgctgtccctatcttgtccttggctttgttacgtcctttcccctagactgtatcccgacaaaatgtcctagtaacaaattgctttttaagctcctgtctgggaaaagtaagcgttaaaattgattattctaaaacctaaagtggactaaagccatcctattttataattttctaatgcaaagtggtttagtatagagttaacacttagaattttatagtttactgtttttattcttatgtactgtaaggaccatatttgagtttttggtctattcctaccattgtttctttgcggggaggagttggggagatttgggggattgggttttttttgttttgttttgttttgtttttttaaactacaggtatttgtaaaacagtgtttgggttcaaacaaattagttgttaaacatctgtaatccagttttctgtaaatgtt

SEQ ID NO: 3425 - DNA, 769 bp, Macaca Fascicularis
  misc_feature (1)...(769): n = A,T,C or G
gcctcaaggtnnnnngacnnngaggctgatgaggggacccctgcccattgcccccatactgagttctagggaggtgctcaccccagactctcaggaagggtctagagaaatgagaggagcacaagctaggggccagctctgagaaagggtaacctccacgcttctctttcccaaattggaaatgaagacaggttttcaaaggcacaggcttcccctgccaccttctaggatcttccttggtgtgcagtgggccagttaggggtgggcagcttgcacccagttctcctttatctcaacttattttcctggggagaggtgcctagagggattgaggtaacttcaactgggaattctgaggaaggtgggcaagtagccttggctctctcctgccatggcgacccagattgagagtgtgtctagctcccgaccactttgtcttgacctactgaaaagttgggaactgaggggtgccttcattcccctttgttcactttctccagctcaacttgggactggggtggtgggactgcgccccctttctatcccagcctgtttccatgtagcagacccttcctagggagcagggaggggaagccacagattgcaaacccaggggctcctttttcattctttctaaaaccttgatatcctcagcccaaaggcgatgccccctgccacctccaagcctggaannnnnnnnnnnnnnnnnnnnnnnnctttgtataacggatgttatttgtacgaagggcagttcgtaacagcactgnnc

SEQ ID NO: 3426 - DNA, 3288 bp, Macaca Fascicularis
ctgggggtgtggagcagccaagatggagccggcagccggcggtccgggcccactgatcgtgaacaacaagcagccccagcctccgccacctccgccgccggcaaccgcacagccaccacccggggcaccgcgggccggcgcgggcctccttcctgggggcaaagcccgggagttcaaccgcaaccagcgcaaagactcggagggctattcggagtcaccagacctggagtttgagtatgctgacacagacaagtgggctgcagagctctcggagctttacagctacacggaagggccagaattcctgatgaatcgaaaatgctttgaggaggacttccggatccatgtgacagacaagaagtggactgagctggacaccaaccagcaccggacccatgccatgaggctcctggatggcttggaagtcactgccagggagaagagacttaaggtggctcgagcaattctctatgttgctcaaggcacgtttggggagtgcagctcggaggcagaggtgcagtcctggatgcgctacaacatctttctcctcctggaggtgggcacgttcaatgctctggtggagcttctgaacatggaaatagacaacagtgccgcctgcagcagtgctgtgaggaagcccgccatctccctggctgacagcacagacctcagggtcctgctcaacatcatgtacctgatagtggagaccgttcaccaggagtgtgagggtgacaaggctgagtggaggaccatgcggcagaccttcagagccgaactgggctccccgctgtacaacagtgagccgtttgccatcatgctgtttgggatggtgaccaaattttgcagtggtcacgcccctcacttccccatgaagaaagttctcttgctgctctggaagacagtattgtgcacgctgggcggctttgaggagctgcagagcatgaaggctgagaagcgcagcatcctgggcctccccccacttcctgaggacagcatcaaagtgattcgcaacatgagggcagcctctccaccagcatctgcttcagacttgattgagcagcagcagaaacggggccgccgagagcacaaggctctgataaagcaggacaacctagatgccttcaacgagcgggatccctacaaggctgatgactctcgagaagaggaagaggagaatgatgatgacaacagtctggagggggagacgttccccctggaacgagatgaagtgatgcctcccccactacagcacccacagactgacaggctgacctgccccaaagggctcccctgggctcccaaggtcagagagaaagatattgagatgttcctcgagtccagccgcagcaaatttataggttacacactaggcagtgacacgaacacagtggtggggctgcccaggccaatccacgaaagcatcaagactctgaaacagcacaagtacacgtcgattgcagaggtccaggcgcagatggaggaggagtacctccgctcccctctctcagggggagaagaagaagttgagcaagtccctgcagaaaccctctaccaaggcttgctccccagcctgcctcagtatatgattgccctcctgaagatcctgttggctgcagcacccacctcaaaagctaaaacagactcaatcaacatcctagcggatgtcttgcctgaagagatgcccaccacagtgttgcagagcatgaagctgggggtggacgtaaaccgccacaaagaggtcattgttaaggccatttctgctgtcctgctgctgctgctcaagcactttaagttgaaccatgtctaccagtttgaatacatggcccagcacctggtgtttgccaactgcattcctttgatcctaaagttcttcaatcaaaacatcatgtcctacatcaccgccaagaacagcatttctgtcctggattaccctcactgcgtggtgcatgagctgccagagctgactgcggagagtctggaagcaggtgacagtaaccagttttgctggaggaacctcttttcttgtatcaatctgcttcggatcttgaacaagctgacaaagtggaagcattcaaggacaatgatgctggtggtgttcaagtcagcccccatcttgaagcgggccctaaaggtgaaacaagccatgatgcagctctacgtgctgaagctgctcaaggtacagaccaaatacttggggcggcagtggcgaaagagcaacatgaagaccatgtctgccatctaccagaaggtgcggcatcggctcaatgacgactgggcatacggcaacgatcttgatgcccggccttgggacttccaggcagaggagtgtgccctccgtgccaacattgaacgcttcaacgcccggcgctatgaccgggcccacagcaaccccgacttcctgccagtggacaactgcctgcagagtgtcctgggccaacgggtggacctccctgaggactttcagatgaactatgacctctggttagaaagggaggtcttctccaagcccatttcctgggaagagctgctgcagtaaggctgttggttaggggactgaaacagagaaaggaggatctcaaggtacctgcaggactgtcctagttcatggctgcagtgctcccattccccaccaggtggcagcacagccccactgtgtcttctgcagtctgtcctgggcttggatgagcccagctttacctcctattggttcccagggtccagctcagaagcagtcatctctgcctgggatccattcttcctttatttctcccaccctcctctcttggacatggttggttttggctcatttcacaatcagcccaaggctgggaaagctggaatgggatgggaacccctccacagcacatctaaatttcaggggtcatgctgatgcctcctgagacacacaaatccttgctttgtcagcttgcaaaggaggagagtttaggattagggccagggccaaaaaaaaatacaacggtgtcttggttgtgctctggggtgggggtggggggtttctgttgttattccagcctcctgctatgttatatgcagaagtaattgcagaggctcctgcagctgcctccacactttgattttggacagggacaaggtaggaagagaagcttcccttaaccagaggggccatttttccttttggctttggagggcctgtaaatacctatatataattctgtgtgtattctcctgtgtcatgttggggtttttaatgtgtttgtgtattctgtttacattaaaaataagcaaaaatcaaaaaaaaaaaaaaaa

SEQ ID NO: 3427 - DNA, 476 bp, Macaca Fascicularis
aggttaacggtttctaaggatgattctttttgactgaaatattgtcagtgtcattgaccttttcgttatttctactattattatttcaggttatcaattctctgcctgaccattttcagcctgggcctgacttttttggaattccttggatagctatcattattgtgtttctgggaatttctacacttggcattttcctctggaaaactagctttggtgtgagtatactaactttctgtagagatatacttgtaatcacaaatgagaagaaattgtttaaaacaattaatgtttctggacttcattataaatatgtggttttacccaaaaaatcagggaaatgatttattagcataagaattatgaaaatatctgccatttacattatgaaaattaaataggttggtgtttgtttaatagaatgtcaggagagcttttggtcaaaaataagtttttttaacctttgtgctatttat

SEQ ID NO: 3428 - DNA, 759 bp, Macaca Fascicularis
  misc_feature (1)...(759): n = A,T,C or G
aggacaggcnnnnngatgaagcttctcagtgagcagcaggaagtaaaggcgtccaaggcagaatgggatacggaacagtggaaaactgagaactatatcaatgagagcacggaagcccagaatgagcagaaagagcagaggttgagtgagctcacaaaagaagttccnnnnnnnnnnnnnnnnnnnnnnctcatcaaggcattatttgtgaccgaaatactcacgactttgattataattttctgcctcattgagatttattctcaccgaaagtcatcacaagaagatgaagaaggattctcaaggggcattttcagatttctgccatgtaggagatgctgttcgccaagtgagacnnnnnnnnnnnnntnnnnnnnnnnnnnnnnnnnnnnnnnnnnngatatgtgcaaacctctcagtgccacaagagtaaataaccaggcagagaagctgcacaagaagtcatctaatgaggaggagatcctcagcagggaacctggggacagcgaagccccaacagagatgggggaggagagtgaagcccagtcataggaggagaaagagtgaccccagcccgcctcaggcctcctgcaaaaatacgtagcttaaacaacaagggccatcagaaagaaaagcaggactgaagccagcggtccacgcatccacagaggcagcgggcagaggaagcacagcgccgtcgttccctcccttgtttcccagtcttactagtcacccagacctgaaaacatatcctcaggg

SEQ ID NO: 3429 - DNA, 763 bp, Macaca Fascicularis
  misc_feature (1)...(763): n = A,T,C or G
aaagcaagcatgactcaaggattnnntnnnnnnnnnnnnnnnnnnnnnnnnnnnnnnnnnnnnnnnnnnnnnnnnnnnnnnnnnnnnnnnnnnncttgaaaaagctgtagggccaagatgagatacagagatgactcaaaacagagaatccaggaatgcatagatcctggtaaaaaaggtgggagatgagtaatgaattcannnnnnnnnnnnnnnnnnnnnnnnactaacaattgtattctagaacataacataaatatcagaaatcttgacattaaataataaaatgaaaactaactaaaatttggagagatgagctagatgatatagtttggctgtgtccccacccaaatcnnnnnnnnnnnnnnnnnnnccataattcacatgggttatgggagggacccagttggagataattgaatnnnnnnnnnnnnnnnnnnnnnnnnnnnnnnnnnnnnnnnnnnnnnnnnnnnnnnnnnnnnnnnnnnnntaaggggtttcccttttcacttggctctcattctgtcttgcttgctgccatgtaagacatccctttgcccttccttcatcttctgccatgattgtgagacttccccagctatatggaactgtgagtctattaaacctctttcctnnnnnnnnnnnnnnnnnnnnnnnnnnnnnnnnnnnnnaacatgagattggactaatacagtagaggaaatgtaagtgtgcttatttcctcatccttcttagtagcaagtcagtaaatactctcctaagt

SEQ ID NO: 3430 - DNA, 725 bp, Macaca Fascicularis
  misc_feature (1)...(725): n = A,T,C or G
aggaacaagcaaacttanttnntacaaataaacgaggggataataactgatcagagtcacagtcgtttcaatataaacccttccgaaagcaaaagcagggaccacatgagcacacaagaagccaaagtttgtcagtgaccttaataaattaagactgagtaacatcctgcctttagaaaaaaataaccccacggtggagaccagggcaggggaggtggcagagaagcatcgggccagatcaaccgctaataacatgcttctaagctatgtggatgtgtaaatggaaacacccccaactaggtattgtagaggctggaaaaagatgtgatgggattatacaggtgttgcatatttttgtgttgagactcaacaatgtgctacaaatgtgatacttaaccctgaactgcatgtattggggattgttttttaaaaagaaaaaaaaactttgaatcaataaattaacagtttttcacttgctggctcttcttgctgtaaatggtgactaagaggttgggacagaaatcttgacaactagtggaaaacttggataatcttcaaggaccatggagccttctgtttccttctgtttgcagaaaagcaacactgcctgggttatgatcctttacaagtgactacttcagacacaattggccacctctttgtatcactggatgactgatgtatgatttatgtgctgctgcccttagagggaagaaaaatgccat

SEQ ID NO: 3431 - DNA, 715 bp, Macaca Fascicularis
  misc_feature (1)...(715): n = A,T,C or G
cgtgttgtnnnctgcctgactgnnnnnnnnnnnnnnncctggacaggtcccttcccgcctctgggcgctggtcccttcatctgtgagtatggtgttttaactggatgttatcaatgtcccttttagccctgccatcctagagtaagatggccctttggaaaaattacaggagatgtggtcttagtgttcttctaaaatggtattccctcagaaacaaattccattgctttaccccagggtgtggacagctggctgtagctctcctattcctacctttttcccttttaaggagacttagttttaggtgggatgctttaccagactcaggagcaccttggctggatctttggagaccagagcatccatttgttagcctagcattctctttttaaaaaatttttttgagacagggtcatgctctatcannnnnnnnnnnnnnnnnnnnnnnnnnnnnnnnnnnnnnnnnnnnnnnnnnnnnnnnnnnnnnnnnnnnnnnnnnnnnnnnnnnnnnnnnnnnnnnnnnnnnnnnnnnnnnnnnnnnnnnnnnnnnnnnnnnnnnnnnnnnnnnnnnnnnnnnnnnnnnnnnnnnnnnnnnnnnnnnnnnnnnnnnnnnnnnnnnnnnnnnnnnnnnnnnnnnnnnnnnnnnnnnnnnnnnnnnnnnnnnnnnnnnnnnnnnntatgcctggcttagcctagcattctctaaaccaggtgg

SEQ ID NO: 3432 - DNA, 742 bp, Macaca Fascicularis
  misc_feature (1)...(742): n = A,T,C or G
cccagggatgttaacnnnnntgatgctgatggtagatgagtggagtggaggtaatcctgtgagaaaactccttaaaaacccttaagctgtgtggagactacacatcacagctgagcaaaccaaggtggggcctcactgccacctcagagcccatccctgaccacgtcattggataggatggaagacaaagtctttgaaatggaggctgggcnnnnnnnnnnnnnnnnnnnnnnnnnnnnnnnnnnnnnnnnnnnnnnnnnnngaagtctccgctgcaaaactcaccaaacagcacagaggatgactctggggtcctctcccacttgctccaagttaggtgggtgccctgatgaaggcaaggctgagtcactaacatgcacagctccacatcctggaagcctctgcagcctcgaggagacaggctctatccaacaggactccgaataaatgcctgccgcctcaactgggcagtctgacctcttccnnnnnnnnnnnnaaacagaagggccatctgcattatttaatcaccgtccaataatgccctccctccccnnnnnnnnnnnnnnnnnnnnnnnnnnnnnnnnnnnnnnnnnnnnnnnnnnnnnnnnnnnnnnnnnnnnnnnnnnnnnnnnnnnnnnnnnnnnnnnnnnnnnnnnnnnnnnnnnnnnnnnnnnnnnnnnnnnnnnnnnnnnnnnnnnnnnnnnnnnnccaggtatttcctttaattctaaatccacccttg

SEQ ID NO: 3433 - DNA, 690 bp, Macaca Fascicularis
ctttatatggttgggattaaacagtaagaataatccaactgtccattagctgtgtgagtttgaatacttttagtaacaggatggtttatcttttttggtaactaggatctcactacacttttaggtatgccatgcctttttaaatagatagcaaaataaaaatgtttttccattatgaagtaatatatgcttatctagaaaatatgcaatattaaaaactgtaacgctttatatcacccataatccaactgttcagaaattaccactgtgaatattttggggtattttcttcgagtattcttctaaaataatgtgcattttaaaaacaaaattggaattacaccatatacaatttgaatcttgctgactttatttatgaaatcatggacgtttccatttccacctcacatttattgggtacttagcatgaaccaagctatccaaagcattttacccatattaacttacttaatccttacaacaactttttgagataagtgcaaatttttaatctcgctttcacagacaaggtaagaggcacagaaagtaggatttggagacaaatagtctgactccagactctgcattcctgtccacaatactgcctctccaactggtttttagtgaagcttccttctaccaatctgaccggtgttccactagtccttgttcaacccctcgaagcccccc

SEQ ID NO: 3434 - DNA, 650 bp, Macaca Fascicularis
tccataaatctcaggaatgtgtaggcagaaaactggttttaccctgttataatcagaaggagtgtgctataggacttattgcataatactgttctttaattgcaatcctaggtatctatagcatgagtggctttagtgagtttgttgaagtgcacatgtttttcaagagtaaaatttaagattaaaattatatgctatatatagatatctagaaaacttggtttgtggtgcacagttaagtgttggatcactaaataaccattgcaggtactgtttgtgtaacattactcatttctgtatattccttttatgggaagatattttgccatggtaactaaaacttttcagtttagttctacttttatgatgtgaatgaatgctacattttattaaatattaccaggtcagtactatttttatactttattaagcatcaggggattttagtttaataggctcaaaattaaaagtttttaatgtaacagttaaaagcaaaacactaacaatctttacgtgaaaatccccactaatagtgccacaataatttctatagaaatatctaaggtcattaaatagatttttgaagacagttcttcattgtgtcaggatgacctttcatatcattctcaccaacttgtgcccaccgttat

SEQ ID NO: 3435 - DNA, 721 bp, Macaca Fascicularis
  misc_feature (1)...(721): n = A,T,C or G
ctttggtagattgtgctnnnnnnnnnnnnnnnnnnnnnnnngcctaatccaaggtcacaaagatttttctcccactttttttatcacaacttttatgttttcaggttttatatttaggtctatgatatatttgagttagtatttatgtaagatgtgaacctttatataacggaggtccactatttgcatatgagaatccaattannnnnnnnnnnnnnnnnnnnnnnnnnnnnnnnnnaatccactaaccatacgtgtatgggtctttttctggcctcagtgcagtttcattgatttatgtgtctatcattttgccaaatattgcacatcttgacttttgtatctgtatataatgtcttcaaaccagatagtgtgagtcttccaactcattattttattttggctatcaaatnnnnnnnnnnnnnnnnnnnnnnnnnnnnnnnnnnnntcatctgtaaaaataatttgccgggatttttattgagattacaatgaatattatagatgagtttggggacaattgacattttagcaatactgagaatnnnnnnnnnnnnntacacagtatctnnnnnnnnnnnnnnnactcccttatttcttcagtaatttgtagttttaacctacagatcctgcacatactttgttagatttatacctacacattccttttttgggggttctaaattagtactgtttttcaaatttcaattttcaattgttc

SEQ ID NO: 3436 - DNA, 724 bp, Macaca Fascicularis
  misc_feature (1)...(724): n = A,T,C or G
aactggtatccaacttctatcttcagccnccacagctgtcccctaagcctgtcctccacattgcactctctagagtgatcctttaaaaacctaagtcaaggccgggctcagcggctcatgcctgtaatcctagcactttgggaggccagggcagatggatcatttgaggtcaggagttcaagaccagcctggccaacatggtgaatccccgtctctactaaaaatataaaaattagctgggcgtgatggcgcacgcctgtaatcccagctactagggaggctgagacaggaaaatcgcttgtgctcgggaggtggaggtttccgcgagctgagatcgcgccactgcacctcagcctcagtgacaaagcaagactccatctcaaaaatacatacatacatacatacataataaaaacctaagtcaggacatgtcccttccctactcaaaatcctcccacgacttcctatctcactaagagtaaatgacaaatcctcagaatgacccaacctggctgctttactgctctggtctcctgccagtgtcacctgtgctcaccacactccagccacactggcttccttgctgttcttcaaacacagcaagcatatgctgcctcaaggcctttgcactggctgttccctctgcctagcctcccttggtagttctcaccatttcttcaggtctctgctaaatctcaactcatcagaggggccttccctgcct

SEQ ID NO: 3437 - DNA, 725 bp, Macaca Fascicularis
  misc_feature (1)...(725): n = A,T,C or G
agagggcagctcagctcctgtcccatctgctttggatatcattacccaaaggcaggtaatccgaagagccagcctccactgcccacagagccaggcccagttgggttggagtataggtcaagagctgtggaaggaggcagtctgtgagnnnnnnnnnnnnnnnnnnnnnnnnnnnnnnagactgctgcaggacattgccaggcctctattcccttcctcagaatacagacttcatgctnnnnnnnnnnnnnnnnnnnnnnnnnnnnnnnnnnnnnnttctgcttctccattttggggacaaacgccttgcccaatacaaatctagccccccatcccacagacttctggatggtatannnnnnnnnnnnnnnnnnnnnnnnnnnnnnnnnnnnnnnnnnnagatttgggtcagtgccctgttacgggttttaggattggtaaggacaccacagctaaatctgacgtgtaaaaggataccctttccccgtcccagtgcgggtggactgtatccccacctcttcagatcccatagattgccgggtgacattgggcacagggctggatggtgtgctgtttgagaggacagcatgctcaggagatttcaataggaatgatctctagactgatgtgtatttggggaagtgggggtggggaagaggtaggtgcctgctgcctcaaaccaccttgtgtaaaatctgcaatacagcttcttccatgtacctgtg

SEQ ID NO: 3438 - DNA, 763 bp, Macaca Fascicularis
  misc_feature (1)...(763): n = A,T,C or G
catcagcgtgnnncacnnnagagtttggtaccattgttaagatttgattccattgcgcctgtcccaccaatgtgttttttatactggactgataaaagatgcagtgagccattattcccttttagcaggtagtctattaaaaattggtgttgatttttaaaatatnnnnnnnnnnnnnnnnnnnnnnnnnnnnnnngaccttgaacagagctggatgggagtgggaggcaaacagatttgggannnnnnnnnnnnnnnnttgggagccccatattctacctcagttacccaaggctattagaacctctgaacttttcctcctctgaaatcctaagcacaacttcgggaacatcatgtccgatagcagatgtctgcctgctgtgaggagctgctcgatgtggagaccaaggtgtgggtgtgggcagaatgtgtcctagtagaaatagtgaacctcagatatgaataaataagcaagagaccgaaagttaagtgtgtgacaacctcagtactatagttaagctacatcctttacattggcttttgtgaactaattgggaacctattctcttttataactgtttctttgagaaaaactcctannnnnnnnnnnnnnnaacaaacttatggtactttactcgtttgtaagttggcaatctagctggctgtattattgctttgataatttcttttcttttaatttacctaatatatataaggaaggggtttggatatattaaaataggtgttaattttatctattacc

SEQ ID NO: 3439 - DNA, 724 bp, Macaca Fascicularis
  misc_feature (1)...(724): n = A,T,C or G
gctgatgtccaggctacaggcctcgggnnnccccggcagcacggannnnnnnntgggcgcggcggtcgcctgcttcctggcgctggagggcgccgacgtgagctacaccaaccaccgcggccggagcccgctggacctggccgccgagggccgcgtgctcaaggcccttcaaggctgcgcccagcgcttccgggagcgacaggcgggcgggggcgcggccccaggccccaggcacgcgctcgggacccccaacaccgtgacgaacctgcacgtgggcgccgcgccggggcccgaggctgctgagtgcctggtgtgctccgagcaggcgctgctggtgctgttctcgccatgccagcaccgcaccgtgtgcgaggagtgcgcgcgcaggatgaagannngcatcaggtgccaggtggccgtcagcaagaagctacgcgcagacggctctgaggtggcgagcgccgcccccgcccccggcccgccgcgccagctggtggaggagctgcagagcnnnnnnnnnnnnnnnnnnnnnnnnnnnnnnnnnnnnntctgcatcgacagccacatccgcctcgtgttccagtgcggccacggcgcatgcgccccctgcggctccgcgctcagcgcctgccccatctgccgccagcccatccgcgaccgcatccagatcttcgtgtgagccgcgccgcccgccacgcccgagctgccttcgcgagcccccgcc

SEQ ID NO: 3440 - DNA, 696 bp, Macaca Fascicularis
  misc_feature (1)...(696): n = A,T,C or G
aattcagtagagggcgacaaatgtacatnnnnnnngatagtagcgggtctaaataaagactcatgacacctaaaagggcagcacctgagtctgattgcacctgtttctattgctgtttctgcctctcttctctctgtctgccatttcattctcaattgttactttacttataagatcatattagaacctgatatttgataaatgatgcatcagatctatagtgaaggaaaaaatgcaattaaagttgttgtaacagctagtcttcaagtggggagaaatcatttgagtaccttaggtcacaccttacatcaaaacagaaaatcagagctacattaaagagtgagactttaactatatcaaacaatagaaaaaaaacggaagaaaattgaatacttactaaatcttagcatgaataacaactgcttaacacttagatgcaaggcccnnnnnnnnnnnnnnnnnnnnnnnnnnnnnnnnnnnnnnnnnnnnnnnnnnnnnnnnnnnnnnnnnnnnnnnnnnnnnnnnnnnnnnnnnnnnnnnnnnnnnnnnnnnnnnnnnnnnnnnnnnnnnnnnnnnnnnnnnnnnnnnnnnnnnnnnnnnnnnnatctcagctgcttgggaggctaaggcataagaatcgcttgaacccaggaggtagaggctgtagtgagcccagattgtgccactgcactcagc

SEQ ID NO: 3441 - DNA, 778 bp, Macaca Fascicularis
  misc_feature (1)...(778): n = A,T,C or G
catgttactgaatgtannntatagcagatttgactatgttacaggactgtttaaattaaggattatcaggcatgtgagatcgccnnncagttatctttaaaacagatgtatattaagggcttagagttaggctctacatattctgggcagtgaataggcagtaacttacaaataagttttgcttaccttttgttttagggactnnnnnnnnnnnnnnnnnnnnntatttttaactaatctgttattaagaaagtcatatttttgcatttcagccaaaataaagaccatctctgataatctgttagaaacagataatacatgtctgaaatccatgtttcatatgatctaaactgtattttccaatttaaattaaaatgtaatatagattcagaaaggttcatatttttctaatgacttcattttatattattttgttagnnnnnnnnnnnnnnnaaggaattgcacttgtattaaaagatgaagaaagctattaggtatatttgtacatgactgcaaatgagtctatgcctgtttaaaagaaaagatggacactattttaaagtgagctttaatatgcttttatataaacaaatttgaagtacagtttagtttggttgtgtttacctaacaagtactataagccgtgtatttgttcttatttgtataatcctagcctgtgacttaatgttgacgctttgctttgtctnnnnnnnnnnnnnnnnnnnnnnnnnnnnnnnnnnnaacattttacaacttttttttttccaaaagtcataat

SEQ ID NO: 3442 - DNA, 753 bp, Macaca Fascicularis
  misc_feature (1)...(753): n = A,T,C or G
agagtggccgctacatcaacagcnnntacacagcgagannnnnncagaagtggaaacagaaacagaaaattgatgatcgtgactcggacgaagannnnnnnnnnnnnnnnnnnnnnnnnnnnnnnnnnnnnnnnnnnnnnnnnnnnnnnnnngcnnnnnnnnnncggccccacaccccaggcacccctgcaggctgcgtccgcccggaactcaagaccaagcagcagatcctgaagcagcggcgccgggcccagaagctgnnnnnnnnnnnnnnnnnnggcctcaagcagctctctgcccgcaaccgccgccgcgtccaggagctgcagcagggcgccttcggccgggtcgcccgctccaagaagggcaagatgcggaagaggatgtgaggaccgggacccagctccgtggcnnnnnnnnnnnnnnnnnnnnnnnnnnnnnnngacgttcctgtgcaccactgtgtgcctggcccagtgctgggcactggggnnnnnnnnnnnnnnnnnnnnnnnnngtgaaaaggagcactgtatggccacggaagggcnnnnnnnnnnnnnnnnnnnnnnnnnnnnnnnnnnnnnnnnnnnnnnagggtgtgtaggagtttggcagcaaagccaggcaagccaagannngannnnncaactcagctgctgctgcttccatgtgttctgggttcagaggtcatggctgcaccagtcagagccctgagtgcctcagggttggcgatggagtttaaaatataat

SEQ ID NO: 3443 - DNA, 761 bp, Macaca Fascicularis
  misc_feature (1)...(761): n = A,T,C or G
aaggagaaatggactccatgatgtcgatttgaacactttcatatcagaagaaatggcactccacttggacaatggtggaactagaaagcgtacctcagcccagtgtggcgatgtcattacagactcaccaacccataaacgcaacagaatgatctaaactgcaaacattttcacacccaccatgctgcttgaaagccacttgatcctcaacatatactataattgcaaaggaaacatgaggccatcttcccttgttcactgtttaagacaagtgaattctannnnnnnnnnnnnnnnnggaagttctaggtatttatagtagatgcctcttgtaattatggctttcttaaaactataatcctagcagaggacatcagatactgtgtagtcgttagcaagatcatcataggcaaacatatatccgttccaaggctaaaagtgaccttaactgtatttattctcaaagggaaaggaaatatcagatgtttatttggttatagaatgctttttttttgggggggggggtccatttcctgctgtgttgagtattnnnnnnnnnnnnnnnnnnnnnnntcctaannnnnnnnnnnnnnnnnnnnnnnnnnnnnnnnnnnnnnnnnnnnnnnnnnnnncacctggtttctatatagtaacagtgtgcaattctaattattggactgtgccctgtttttagttttcaaagccagtttctaattctggtgattgtgtgatgtaaannnggtgctatgatggtcatgcaa

SEQ ID NO: 3444 - DNA, 736 bp, Macaca Fascicularis
  misc_feature (1)...(736): n = A,T,C or G
tttttcatcagttaaaagtagtgagaatctgtgttagttatacctataccaaagtaaacattaaagagacatatcatgcaatttcaaagaattctttcatgctatttcttaacctgacacttctaactttattgcaggcaatagacaaagattggctcactactccataggttaattgaattcctggttgagaaactaacttgttttgtnnnnnnnnnnnnnnnnnnnnnnnnnnnnncatgacttctctttaaaggatctagacattgctcgatttaaaatatggcaccataaaaaaaannnnnnnnnnnnnnnnnnnnnnnnnnnnnnnnnnnnnnnnnnnnnnnnnnnnnnnnnnnnnnnnngtagaagttactgagttcaacaaatagacaggtctggcataatatatgcccagtcataattgtctgattatattcttttgacaacagacagcatttnnnnnnnnnnnnnnnnnnntgagagttttggctatcaagatgtgttgattcgaaatataattgaatgagacctgattaaagtctgactttcctggccccagtgttttgcaggttggctatttccattatcaacccatcactccataaggttcttagctgcaccaagtgattggtgaacaaggacaacaacaaaagcagcatacattgtatggatttnnnnnnnnnnnnnnnnnnnnnnnnnngtgtttaatgtgacctatctggaaaatgaggac

SEQ ID NO: 3445 - DNA, 674 bp, Macaca Fascicularis
gatcacagcagtcactgatatagcaaaagtttaggcatttttctcaacacaaagactatcaccgcaagtggcacttgctacctggtgcatctttgaaaattgtgcctttagaaacaagacacccctttgaagtaatatgccttcaaatgttgtgatttacataaagtagctctttcattacttatatcatttttattaaaaatcttaagttagattatttttatgtctgttgagcgatttatttattatgctttaaaactgatgtgtcagtgtttcacataatggtttaaagggcattgaattcagaagtttagaaaagaattgtaaaaattcaatttttttttaaataatgaaggttggaaatagcatatgtatcgttaagtacattacctgctaaatagattaccatacagctaaccaattggtcattgtagagactttaaaattctttattttatataacatttaataacatggaaaattatattattgtattaaaaactggcctaatatgccatatatagtacaattttagttgtattaaaaagttacatatgcataaagatagacaggaaggaactataccaaaatgctgacagggctatttctggagatgagattatgggcgtttttcattctctttttagtatatttttctgtatctgtaaattttg

SEQ ID NO: 3446 - DNA, 2394 bp, Macaca Fascicularis
accacattggccataggatgcctcactgaggggatgcggtcaatcatcaagaccacgcagtggtttgtgtgcagaggcagctacccaagggaacaaaaaataagaaaagacctaaaagtgggcctgccccaacctacagacagggaaccaggtctttgttccgcttcctacagggaagcatgccctcgggggtgggtctgcggtgtgaagacagccacctcgccactccagggtctgcggctgcaggtgggggaggaggctgggaggaggcccttccgcacttccaagctgatcagcgcagcgtgagcgccagcgtgcgagtgggcgccgcatccagacggtttccatttccccagataaccacggaaaacatgaatcaggccggccccgcgctggcccagctgcagtgtgggggcacacgccggtgagtcacaggctgtgctgccagcgctgtttttcacatttctgtccagggaacagtttctcactggacgttcagtttctttagtcctctcttcccccagaaagttgctcagactctgtccaagggctccctgtgcccgcagtgagataacagctttcctgctgccggtaacactgaagaaggctgattgcacagcttaggggacaaggtccctgcaaatcagggacacggagtgactcctggtcctcagcacagcccctagaagagggcgccttgcagacccatttcacacatgaaggaagcaaggtcaaagccctggcccggccgctcatcagcttccagggctttgccctcggagtccacactcttaagcagggtggcatcaggcatcccttccccagctcaccgagcacagttcccaagccgccgtatgccgcacacgtcccggcttcttccggtggcgatggccacggagacgcgagtgttgtcactactgaatgcagcagaagggctaaaagtgtccactcagcccagggcagaagagcacaaggtttccccaacctcgaacaggcttcatagcgtccccagaccccgtgccctccttagagagggaaggatgccacctccctcaagagccactgccaggcctgtttctgtactttgcacatattgtcacctccagtcctacaacagccctcggcgatgggcacgctcgctctccccactttacaggtgaggagactgaggatcagaaaggataagtgagcgggctgtgatcactcagctactgagcgacagggccaggatctgaacagagagctggtggctccaggatctgcagtcctgctgaattctggcgttcctccctcctctgaccctccaaggctgcctgcacctgtggcagagaacactgagctgcctttgcataaatgcactcacaccgtgctctgcttttccacggggccgttttcttgcttgacttggcacaattcacatgcacatgccacacaatgacagaccatatataaggaggtggtcccacagattatagtggaactgaaacatttctattgccaggccccccggggctttctgagtacaaaagggctgcctattttttttatcagagccattgcaacattgtagcacaatgactgtattttttaaattaatttaacctaagtgcacagtggttgggttaaaatctacagcactgtacagtcatccccaaggtcttcccattcaccagccactcacttgctgacttacccagggcaatgtccagtcctgcaagctccactcctggcaagtgtataccattttttatcttctataccacatttttatagtactttttctacatttggatatgtttagatacacacacacagcattgagctacagttgcctacagtgttcaggacagtaacatgccgtaggactttgcagcccaggagcaacagactacaccatatagcctgggtatgctgtaggctacaccactttttggcaccaggaaccagttttgtgaaaaacaatttttccaaggcccagggagggtaagggggaatggttttgggatgaaactggttcacctcagatcatcaggcattagattcccataaggagcgcacagcctccatccctcacaggcacagttcataatagggttcacgctcctatgagaatcaagtgctgctgctgatcggataggtggtagagctcaggaggtaatgctcgctcaccccctgctcacctcctgctgtgcggcccagttcctaacgggccacagactggcaccagcccgggggttgcaaaccctgggctataccacctaggtttgtgtaagtccactctaatgttcacacaatgatgaaattacctaaaatgcatttctcaggacacatccctgtctattatttatgtattaaatctgaatggtgaaatactaaaaaaaaaaaaaaaaaaaa

SEQ ID NO: 3447 - DNA, 259 bp, Macaca Fascicularis
  misc_feature (1)...(259): n = A,T,C or G
agaagaaaagtannnnnagatggtggtgannnncaacacaggtggatggatttgcntgattgggatggtacattagtgagctgcactttctataaccaaagcttagcagnnnnnnnnnnnnnnnnnnnnnnnnnnnnnnnnnnnnnnnnnnnnnnnnnnnnnnnttttaacatggtatttnnnnnnnnnnnnntgaaacactggacatatcattgatttaaacataaggggaattaagtctttgtagtttgtcattttt

SEQ ID NO: 3448 - DNA, 487 bp, Macaca Fascicularis
tcagagatcacatgtggtttgagggaggatagggaggacagggtgtcaagagacagcattatttaccaagtttggtataaaaatgaaacaggatccaggcatgggtctttacactgatagttacagtaagttttaaaatctgagcagcaatttgaatcacttcttgaaaaccaaacacaaaaaatatattttttgtagagttgggggtcttgctgtgtcacccaagttgttcttgaactcaagagattctcctgctttggcctcccacaagtgctgggattacaggtgtgagctactgcacccggcctgctttctttttaaggaaaaggatctgtgggagcttttatccccatgactgccttcctcaggtcgacctctttccccagaaatggaatcatctctggactgttgtttcaccttgttccttcttcctttctcctccccctctcctcctcctccgtattctccttctccccgcccagccccg

SEQ ID NO: 3449 - DNA, 605 bp, Macaca Fascicularis
gggatgagattgtttgggatgcagtgctggctgttgctgagcaggcgatcacagtgcgtactgtgtttctttccttgagaatatttgaatctcgcctgagtactcataacagatgagaaacacaggttttgatagcatagattcacactatcattagtcatgagctcttgagagcaaagtaattggttttgtcctctttagagttagaccctgtggttgggtatgaaagatgagtgtctgtaaaaatctgtcttagaaatgtatttccaagactctgtctcaaaaaaaaaaaaaatgatttcctagttctgtaaaagtcactatattgagtgttctctatcacttaataatatacttactttgttattaagtggacttaaagatatgcggtgtataaaatcatgctaattatgttaaaccatggtgtctccctttattgtgttaggctgaatagaacaaactttaaaataattttttaaagaaaatatttgaattcattttgtttggtgttatgtttttattcagaaaagcattttattagtgctaggtgtgaaccggagccttttgctaaataccagcagcaatcatgtcctagagttaaatcc

SEQ ID NO: 3450 - DNA, 767 bp, Macaca Fascicularis
aaaaaaaaaacactgtgaaacgctgttccccatcttcatggatagattggcctcaaggagaaggccttgaaatcgtctgtctcatgtcaagacagttattcttcttaggatggctgccagggaatagatgaaaggcagaagtggcgatgggtgactgatgtggcacacttatgaagaaaagcctctttttccatgcttgtttttcctccccaaggagccaacagagtttctgttctccaactctgctcttcaccttacccgagaatgaagctatttgcttgtggattatttgaaagacacaggcttatgcaaaagaaaaacgaaatcatcatgagagtctcaataccttcacagaagtgaagcagcagcaaccaaatgaattaggaacgtgattcctagagaatggcaagaccaatccttcaacgacttcttcagcatttctgaaacatatggaagatggcccattgtgttctcttaattctttgataatctggacattgacttttccattatatgacctggacttgtgggcatcatgttgtaatgcacctgttcagaaacctccctgtaccaatatgtatcatttcaagagactcctttgcctccacaaaaaaggacacagttgtgtacctcttcccatttacagtgcctaaaattatttgagcagtttttcacctcttctctgataaacactttattcgtctttaaaaagaaaagaaaaaaggaaaataaaacttttattgagatcctaaaaaaaaaaaaaaaaa

SEQ ID NO: 3451 - DNA, 886 bp, Macaca Fascicularis
  misc_feature (1)...(886): n = A,T,C or G
ataaatgtgcaacaattcatagagtggcagaaaaggatatagagagaccacgttgtcgaggacaatanntggagtttagttttccagaagtatttttnnnnnnnnnnnnnnnnnnnnnnnnngccaccagcaccggataagagattctagcatttggctgcttctccaagacaagcgaggttagaagggagttgagaagttatgtcatcttccactgcagcagataccctttttttttttagtacttgaggatcccctgaatcacagaatttctaaatcagtcctggattccacaagtgaagcagcggaggaaccaggaggtcagcggtgcccctcaaatccgtggcaatcaagagggagttctcaaaaggctatcaaaggaagggggttatgataaggaaaggctcaagacctgcctcagaaggattgagcagggaaaagcagaactgacnnnnnnnnnnnnnnnntccagtacaaaatgaacatgtggggcttttgtgcatacagcaggaaaacattgcctttacaggtactaaaatgtaatgtttttcctttcttccatagtgtctttctcaacttgttatggcgatgttttttatttgctacttaatgctgttctaactaaaaacttaaatgttaaattcctatcatgcattttactattcatctttatattatgcaattccagttttaaatgaaaatatgagcatttacttaactcatgcagaatcaccaaaattacacaatttgcattttatagcttatgtttacatactgtatgcatatgtatttcattcttaccacaannnnnnnnnnnnnnnacaaaactaactcaactgttactgtttcacttcttggtattttcagcatnnnntggttgactaac

SEQ ID NO: 3452 - DNA, 750 bp, Macaca Fascicularis
  misc_feature (1)...(750): n = A,T,C or G
cgcagaaggaactgcctggctcnntgtgcctgggtgaagccgctgctgggttttcctcccggagaggggannnnnnnnnnnnnnnnnnnnnnacagagggaaacgcagcagctcctctccactgaaggaagtgggacttcctgtcgccggagagcctgtgcggcctatgggagccagcgcagcttggatggagattccgtgagaagccgtgggtggaaccaggagcctcaccaaatccactccacaccagcgctgatgcccagtaaagatgtccactgaggaatgatgaatctccctttatggattcacttattatttcaatgtgactttaattttttnnnnnnnnnnnnnnnnnnatggtacaaaaatcaaaaagcattcaagagcgtacagtgaaaactctccctttccagatattcaagtcacctccttaaaggtagtcacgcttgtgttttgaggtttccctcagattccaggcnnnnnnnnnnnnnnnnnnnnnntgcacacacatacaccacacatacacacacacnnnnnnnnnnnnnnnnnnnnnnnnnnnnnnnnnnnnnnnnctgtatcttgcttttttcactaatgtttctcaaacatcggttcatattgacataaattactttttcattcttttataccgctgcatagtattccattgtgtgagtgtaccatagtgtatttaaccaagtcttcttttgatatattattttcagtctcttgttatgcatcaatgctgag

SEQ ID NO: 3453 - DNA, 706 bp, Macaca Fascicularis
  misc_feature (1)...(706): n = A,T,C or G
caggaggctcaggtgggctcacctcggtttgcgagtgtacccatttagcatgcacagagctagcgcctgctgtctgccaggccccgtgctggaaatctttccacttccaaagagcaaaagcaaacaggctgtgtgaccttcggtcagtcctttcccctctttgagcctcagtttctctatctgcagattggggttgggtaatgagctcttggagggccctttagttnnnnnnnnnnnnnnnnnnnnnnnnnnnnnncaagctgaggccctggggacccttagatttactattgccatctgaggggtctacccatagtcccagagcttatgatcttggagcccagggcaacccctgctacgctgtttcctagctggaggtcccccggcagagtcccttcgcctctctgtgccttggttatcacatccaattggcaataagaaaagaagggaggccgggcgtggtggctcacgcctgtaatcccaacactttgggaggccgaggcaggtggatcacctgaggtcaagnnnnnnnnnnnnnnnnnnaccaacatggcgaaaccccatctctactaaaaatacaaaattagccagacgtagtagcacgtgcctgtaatcccagctactcaggtggctgaggcaggagaattgcttgaacccgggagacagaggttgcaatgagtcgagattgcaccattgcactccagcc

SEQ ID NO: 3454 - DNA, 714 bp, Macaca Fascicularis
  misc_feature (1)...(714): n = A,T,C or G
actggtgcataaatgtttcccaancntaactgaannncactcacccaggccccccgcttcccctcgaatctgctcagctctgccgccggtctccatgaacggcaaggggannnnnnnnnnnnnnnnnnnnnnnnnnnnnnnnnnnnnnnnnnngcaaaaatcggaactgaggacagcagcacacacaatggtggatcgtacatttgcacccagagcaactaatcgctcaataagtgaccccagagaccatgaatttcccggagtgaagggaacgggggtagagctaattagagtttttattatccaggattcatcgtaagaagaatgtcagcctgtcttcatccctggcttagccgtcaggtagaacacttactcatctgacaccgacttcttagagaagcgagtcttttgagtggaggagcgatggtaaccccactggggggtggcccataatcgggtcccnnnnnnnnnnnnnaggggtaagaggactgtgtatctagagtctatgatagtctgtgtctacgtaaggtctaaaannnnnnnnnnnnnnnnnnnnnnnnnnnnnnnnnnnnnnngtaccctcttatgttaaggtttacataataggatttttaaacaaatgtgtttaattttttaagatctcttgtattaaaattttcttttggaataagctgtggaaattttgttacagcctggttgannnnnnnnnnnnct

SEQ ID NO: 3455 - DNA, 682 bp, Macaca Fascicularis
  misc_feature (1)...(682): n = A,T,C or G
aagaagtacaagcagtacacaagaataccacctatgacctcattgcnnnnnnnnnnnnnnnnnnnnnnnnnnncgagggctcctaccggatccatgtgcnnnnnnnnnnnnnnnnnnnnnggtatgaattacnnnnnnnnnnnnnnnnnnnnnnnnnnnnnnnnnnnnnnnnnnnnnnngaggcttacattcagatttggaagaggcgagataatgatgaaaccaaccagcagggggcttgaaggaggcgtccagggctttgcttccgagggctgtgnnnnnnnnnnnnnnataagannnnnnnnnnnnnnnntattcagnnnnnnnctgactgggggcctccctgggccagcccagcttgtatggattctggctacaccagagcaccaggagcccacttgcctgggatggccccacactgtcnnnnnnnnnnnnnnnnnnnntttttttctagattaatgctccnnnnnnnnnnnnnnnnngctcccnnnnnnnnnnnnnnnnnnnnnnnnnnnnnnnnnnnntgtgtaacttatgtctgagtatctgggagtagctgaagaacagataatttcttccaaacatcnnnnnnngggattcttggagcaagcagaaagccagtaacctcactcttgtctgttagaagtggaggattttcctatggtttccttcatttcctgat

SEQ ID NO: 3456 - DNA, 731 bp, Macaca Fascicularis
  misc_feature (1)...(731): n = A,T,C or G
gctgccctgtagacaggctggggagatctcagagttcacacctcgcctgttgtagtggaggtggggggtagggtttggnnnnnnnnnntgcccttggagcctcccacagctatggccgtcttgacctcatcccaggaactctacggtgacatcaagaaccatctctctgatgaggtctgtaggagcccttctcagggtggaacagcccacagtgctagtggctcctggtctttcctgtactccgcggaccttggtgaagcaaaagcttcagggcagagggaatggggcaacccagtggcagccccactgggccccgtggcttccactctcctattggatgtagaggcaggggaaagacttctctatacaaannnnnnnnnnnnnnnnnnnnnnnnnncagaagggatgatccttgctgctctgccatagggtttttgatgccgagctatgctgcagatgacgttaacctaaagaacttggactgagcttttaaaaaaggacagcaaacaattttataatccttaaagtgtaatagacggttnnnnnnnnncagggtattgggggggctcttcgggggtggaggctgtcacttgtatttattgtgactctaaatctttgatagtaaaacaaatgtaaaaagannntgtttgccaccagatgggaatagaagttctcagtaagcaggctggaatgggtggctatacgttgtatcacgaggaagttttagactc

SEQ ID NO: 3457 - DNA, 275 bp, Macaca Fascicularis
  misc_feature (1)...(275): n = A,T,C or G
gccctnnnnnnnnnnnnnngctctggaaacaactgcaagacccaaggctccagtgctgactctcggtggggagggcggaggtgctgacctggcccgggccctggcctgggcctctggggcctgcccctggctcagcccctccttccaggtcttgatgggagggaggagggcctagaagctggacaacttaagccactccttggcctccccagccaggggcctgggcgggaaagatgggctggtgggctgtttttgcctacttttgtttgaaaaac

SEQ ID NO: 3458 - DNA, 743 bp, Macaca Fascicularis
  misc_feature (1)...(743): n = A,T,C or G
gtagttacacagacagacnnnncnngttagacctgtgtgtnnnaaagaatcatacgttaacaaatacccatgcaaagagcttcaaaaagtgaaactgtgttaaaggaacatgattttactcactcagacatatttgtttattgaattgcaaagttttattttaaatcagcatttccccaaagaatatatcatatgacgctaggttccaaggggcttgaccgagtggtgttttgctggggggaggtaggggtttgttaatacactttactgagctgaaaaatgttaaacagatttcacaattgcctccttgaagattttaaagttcattgtgattcttcaaggggaaatctggtgagccattcctcacacttacctacgggactcctttctaatggagcatcttgtgaagctagtgggttttgttttgtttttttaatgctttagaaaacacagctttaggatattgactttttgtttgtttctattttcaaatgctgaaaagtcaagtcccagcttgaataccatagaaaagctttgatgcatttgtaaattatattgcactttcactatatattttcaaaatcactggaatgttgttatacaagagaattataattgtgtattgtaaataacatattaaaatacatatattaatgccaatagttaaattcaacaatatgtaatctaaggtgctcggttctacatgaagtatgagttaactgctcataattaagttgccaaga

SEQ ID NO: 3459 - DNA, 803 bp, Macaca Fascicularis
  misc_feature (1)...(803): n = A,T,C or G
tttcnnnnnnnnnttcagacttaaannnnnnnnnnnnnnnnnnnnnnnnnnnnnnnnnncttacttgtacctcaggcactgagataaaggaggaggtccagggcaatgcagtgatatgtnnnnnnnnnnnnnccccctccnnnnnnnnnnnnnnnnnnnnnnnnnnnnnnnnnnnnnnnnnnnnnnnnnnnnntacctccgatccacctgagtgctaggtggnnnnnnnnnnnnnnnnnnnnnnnagnnnnnnnnnnnntctgattgtgggctttggaggaacgggannnnnnnnnnnnnnnnnnnnnnnnnnnnnnagctttgccactcaaatataccttnnnnnnnnnnnnnnngagccagggtccagagctgctgggctggggtccctggcttacttccacataggccatcacatannnnnnnnnnnnnnnnnnnnnnnnnnnnnnnnnnaatccatccccaggtactgggttagaactggcttggctccctggcacttctgagnnnnnnnnnnnnnnnnnnnnnnnncttgctgccgtaacccccatnnnnnnntcatttttgttgccttggttggagtgaggcagatttctagtttcnnnnnnnnncacctcctcggtttcttcagccttgaggctatccccacagacctgcttcttgggaggaccatccttagcttccccagaggtctgtgtccctgcnnnnnnnnnnnnnnnnnnnnnnnnnnnnnnnnnnnnnnnnnnnnnnnnncgcttgtcctctgctgcagcctcatcagtgtcaatgataaggtcaatatc

SEQ ID NO: 3460 - DNA, 750 bp, Macaca Fascicularis
  misc_feature (1)...(750): n = A,T,C or G
ttctgttttttataaaacacctcatgcagcactgcagtctcccgtctgctcgtgggctaagcatccccatttccacatgtgttgtgttggttggcagtgaggctgatccagaccctttccgcccccaccaccctcatccaggtctctgaccagtagcctgagaggggctttttctaggcttcagagcaggggagagctggaaggggctggaaagtttcttcagactctgtgagcctcagtcctgagaccagagtcaagaggaagtgcacggcccaaccacctgggtcaggattctctctcaggagctgggtggcaggggaggcaatagcccctgcgccaatttcaggaccacctgcagcagggctgcggtgtctctgcggtgctctggccctacccatggccgccacgttctctgatctccaggaaccccacaacccctctccacctcaccccacgttgatgcccagggtcgttcttgctacttgctgggcccccaaagctccactgcnnnnnnnnnnnnnnnnnnnnnnnnnnnnnnnnnnnnnnnnnnnnnnnccctctctgggcctgcctgccgggatctggggtccctaagtgtctctcttnnnnnnnnnnnnnnnnnnnnnnnnnnnnnnnnnnagttcctgtgggcgtgcccggaagcagagcgccacacttgctgcttaagctcccccagctcttccagaaaacattaaactcagaattgtgttttaagcatcctgcctcgtc

SEQ ID NO: 3461 - DNA, 754 bp, Macaca Fascicularis
  misc_feature (1)...(754): n = A,T,C or G
gcaatcagtagagattcaggatagttttgttaaattcttgcagattacatgttttacagtggcctgctatgaggaaaggtnnnnntccatacaacttgttttaacctttgagaacattgacagaaattatgcaatggtttgttgagatgcggacttaatggtgctgtttaatcagtttgcttccaaagtggcctacccaagaggccctaagactagtagaaattaaaaggatttcaaaaactttctattcctttcttaaacctaccagcaagctaggattgtgatagcaatgaatggtatgatgaagaaagtttgaccaaatttgtttttttgttgttgttttgaatttgaaatcattcttattccctttaagaatgtttatgtatgagtgtgaagatgctagcgaacctacgctcagagattcatcgtaagtctctcttcacctgttacagaatttcagattggtcattgatagtatgtatttctttagtaagaatgtgttaaaattacaatgatcttttaaaaagatgttgcggttctatatttattgtgctgtgtctggtcctaagtggagccagttaaacaagtttcctatgtatttttccagtgttaaatctcacacattgtacttcgaaaatttccttccatcctgaataacgaatagaagaggccatatatattgcctccttatcctcgagatttcactatgtctatggcatcatcacactcatacataaacattctaaaggaataa

SEQ ID NO: 3462 - DNA, 164 bp, Macaca Fascicularis
aaagaagaccacaggggccctgctggagatgaaggccatgctggaggcccaccctgaggtggtgtcccactaaccggtgggggtgcgcttcacccaagggatgacatcatactgagcccctgcttccagcaggacagctgctacctggacatcaacctgtacag

SEQ ID NO: 3463 - DNA, 420 bp, Macaca Fascicularis
cctcccctccctgtggtccctctggcatcacataaaccagaacccagctgcctcctgggactggctgtggagaggagggcatctctgagctagcctgtggccctaccccaaggcacacttcctcatgtgggaagatcctgaccaggagtcccgggtggtctcccctgggccacagcacatcaccgtgtggcctggggctgtgggacagtgagccctgtaaccactggggttttgtgacagatgacaagaccccagagaccgtggcagagctgcccctaagagagtggaagcccctacatatcctggacacatgccttccccagggacaagaggaatgtgtctggaggggttttgtttgtttcgaggcatgtatcatcttggaaataattgtcaggatgtataaaataagaagaaaagtat

SEQ ID NO: 3464 - DNA, 665 bp, Macaca Fascicularis
  misc_feature (1)...(665): n = A,T,C or G
gcacactcattncngnntcaattgttgccnggagacgtaaggaaatgaaaaagttctggaaaggtaacagctatcagacgatggaccatnnnnnnnnnnnnncaaatgaagaaaaccccgcattgactggtgaacagattgtccagcaataatatgtggagctgctnnnnnnnnnnnnnnnnnnnnnnnnnnnnnacttggactttttaaatnnnnnnnnnnnnnnnnnnnnnnnnnnnnnnnncaatgatatgcttgnnnnnnnnnnnnnnnnnnnnnnnnnnnnnnnnnnnnnnnnnnnnnnnnnnnnnnnnnnnnnnnnnnnnnnnnnnnnnnnnnnnnnnnnnnnnnnnnnnnnnnnnnnnnnnnnnnnnnnnnnnnnnnnnnnnnnnnnnnnnnnnnnnnnnnnnnnnnnnnnnnnnnnnnnnnnnnnnnnnnnnnnnnnnnnnnnnnnnnnnnnnnnnnnnnnnnnnnnnnnnnnnnnnnnnnnnnnnnnnnnnnnnnnnnnnnnnnnnnnnnnnnnnnacctcgtgatccgcccgtctcggcctcccaaagtgctgggattacaggcttgagccaccgcgcccggccgcaaatatatattnnnnnnnnnnnnnnnnnnnagttacatcataaataactataatgctttgcttttaatg

SEQ ID NO: 3465 - DNA, 741 bp, Macaca Fascicularis
  misc_feature (1)...(741): n = A,T,C or G
ccaagaataagatnnnnnncttttatatagagaggattatatgaattgattgagtaaatttagttttaaagaacacacctgaaattattgaataatttttagactaagctttttttttttgagacaatnnnnnnnnnnnnnnnnnnnnnnnnnnnnnnnnnnnnnnnnnnnnnnnnnnnnnnnnnnnnnnnnnnnnnnnnnnnnnnnnnnnnnnnnnnnnnnnnnnnnnnnnnnnnnnnnnnnnnnnnnnnnnnnnnnnnnnnnnnnnnnnnnnnnnnnnnnnnnnnnnnnnnnnnnnnnnnnnnnnnnnnnnnnnnnnnnncaaactcctgacctcaggtgatccgcccacctcagcctcccaaagtgctaggattacaggagtgagccaccatgcctggccagattatattttttaaaaatttgaaaattgttgttccttcaaacatggaattatattctttattccattgtggcaagggacttttattcaataaattgatttcagcataaaaagcaattcactttaatagatatttggctcagtttaaggcttagctgtgttgccagtactgaagtactaatatgagtgttgtttagtaaaatgaagtnnnnnnnnnnnnnnnataccaatataaaatttcatattaaaaagccataaagtgaagacagagttttcaaagtaaaagaatattttatttgtggaatttgatactgtgataaataattaaagtacgagcc

SEQ ID NO: 3466 - DNA, 795 bp, Macaca Fascicularis
  misc_feature (1)...(795): n = A,T,C or G
aaaaaaattatttttnaactgaaaaatacaaatgtatttcactaggcntcttannnnngattnncttttnntncagttctttttatcagaaaataaggttttagtctatagcaataagttggcaatcttttctgtaaataccagatagtaacaatttatggcttcgcaggtcatacagtctctgtctgaacnnnnnnnnnnnnnnnnnnnnnnnnnnnnnnnnnnnnnnnnnnnnnnnnnnnnnnnnnnnnnnnnnnnnnnnnnnnnnnnnnnnnnnnnnnaaccaggtggcacccataagccatcgtttgcagaactctgttttacagaaacattggtcaaagttttacatacctgccttgtnnnnnnnnnnngtataaaaatcatatggatgaaattatatatattagaatcttgaaaaaactatgtggttattcaaaagaacataataagaaaaaaagcagggaagcaactaatgccattaaatccacattaataatcctgtctttcctaattgctttgcttagaggccttttgttaccttgaactacctctaattcaatcacatggcaaatgcctcctttcacaatagagcgtggggctgccgagcactgtttcttcgttgaactgaaacttcatagaagaccagatgagaccacagaatactagatgaaacattcatgtagatatgcttgatattttcttccaagctccattgctacaaaggtgtaaataaaatacatttttatgagttgaagtaacnnnnnnnnnnnnnnnnnnaactcgnncttcaaa

SEQ ID NO: 3467 - DNA, 742 bp, Macaca Fascicularis
  misc_feature (1)...(742): n = A,T,C or G
atcatnnngtgtnngccagaccatgactgtgtaggaggaatgtttaatttgtgcttccttagtaaattgaaatatcagctgagagattatttgctgctattgtcaaaaggccatttatgaagttagtatttgagccccatannnnnnnnnnnnnnnnnnnnnnnnnnnnnnnnnnnnnnnnnnnnnnnnnnnnnnnnnnnnnnnnnnnnnnnnnnnnnnnnnnnnnnngcttggatggaaagtctgagctgaggttggtctcttgccaaaccctggctgttgtgtgttgttcttcatgtcttcgagttcttttttttttcattnnnnnnnnnnnnnnnnnnnnnnnnnnnnggagtccaccagccttcttgtatttnnnnnnnnnnnnnnnnnnnnntggctctaaagtacttgtctgttgagattgcaagtctcttgtcaccatcctcacacatgacaacaaaacccataatgcataagtggcctttttgaaccaagactttgcaaactgatctctccccagtgaaggagttgagcacattagcaacaatgtacattattaattttggattttcattttcatgttttattttgtaaatattatctgatgtttggagcttgagtatacagactgtaaatatagttcttgtatttgtactaattctgattcttttgctgtatagccttagatgtgcaatgcagacattatctaactctgtatggtaaccctgcatcacggaac

SEQ ID NO: 3468 - DNA, 692 bp, Macaca Fascicularis
  misc_feature (1)...(692): n = A,T,C or G
caggaagacgttgagaattgnnnnnacacaatcccagcgcnnncctcacaggagcctttcacttcacagtggcaaggggctggttctggggaactggccgaggctcagaatttcttcatataccccacgtttgactttggcttacacggtacnnnnnnnnnnnnnnnnnnnnnnnnnnnnnnngcaatcagatcaagcgtagcaagcattgccaatgggaaactcaaaagaatttacttatttttccctttccccctaccccatccccggccaagaatttctnnnnnnnnnnnnnnnnnnnntcttaaacaacactcttaacccccagccggggtcctcattttagtagatgtcattgcttcaagtctaatggcaccgggaggcctgtttgagggaaaacattagtttgaaaaatccctgtttccttcatccactgcccttgnnnnnnnnnnnnnnnngtatgcctgtggcccctcagaaagtctgctagcttctaggggttggaatgggggacacacctnnnnnnnnnnnnnnnnnggtggcaatgtaaaacatctaagcaaagttttaaatggaaaaaaaggaagcacatttaaacatcctgataatggagggaagggggcacatttacacacagcccagaacttgtagaattctgcgaagtgaatgtatattgaattagtctcctgcct

SEQ ID NO: 3469 - DNA, 733 bp, Macaca Fascicularis
  misc_feature (1)...(733): n = A,T,C or G
cagacatgagtgccacccaccnnngggcagcaccaagatgnnnnnagtccgggtgccttngtctcacccccatgcctttgctcggagtgtgctcctcatttttctgccactttgaccctgtnctctgatttggtcctnnnnnnnnnnnnnnnnnnnnnnnnnnnnnctctcaatttcctctgnnnnnnnnccagcaggagtcatgccagagatcatatctgagaaagcaagacaattttgtgtgtgtgtgtctgtgcccatagaggagtgctggttgtgttgatatagttgtagattggttgtgtttacatcgttgtatatattgacatgcttgagtgttatgacttcttttgggggtggtcgccttttaaatcatgacttttgatgggattgaattttagtctttgtgaagacataagtaggcatctgtctctgggagcatccaagcagaaaagactaagactcccttgtagacagatcactggcctccattggagtgtgtctgcatggcaccacagggctggaagacccttggaggcaggaattcaaggaaatgtatgatgaatttnnnnnnnnnnnnnngaagcagaacaggcatggaaaacttgggtgagtggacnnnnnnnnnnnnnnnnnnnnnnnnnnnnnnnnnnnnnnnnnnnnnntgatggagggatttgtgtccactgcagtggggaannnnnnnnnnnnnnnnnngggtnnnnnnnnntat

SEQ ID NO: 3470 - DNA, 552 bp, Macaca Fascicularis
aaatcagtagcaaacccgctgccatattagttattctgaatatagtaaaacagtccagctagattgcagtgtaataattaaactgtacatactgtgcatataatgaatttttatcttatgtaaattatttgtagaacacaagttgggaaatgtggcttatgttcatttcgtttaattaaagctgcctcctaaagtatagtggctgccagtagcagagtgttaaattgtggtttatatacttttggcattgtaaatagtattggtggtacagtgtcaatgtaataaaaacggaatctttgtatatcaaaatcatgtagtttgtataaaatgtgggaaggattgtatttacagtgtgttgtaattttgtaaggccaactatttacaagttttaaaaattgctatcatgtttgtatagttacacatgtgataaatattaagtcataacttggtaagaaactcgtaattaaaaggttttttccaaaattcaagttattgaaaatttgtcattttattcacttaagatgtagaataacagatatataaaatgtgtta

SEQ ID NO: 3471 - DNA, 657 bp, Macaca Fascicularis
tcctccttgagcttagccccaccctctcagcctgatttctgtttcccaagtccagctgtgccatgggataggtgggataggttttgctaacttttgctgtttccatcgtgcttacacctccctgatcctgggctcaggggactccccatggtttccttacttcggcaggcccaaaatgatggcctctcctaacccaaggcaggggatcttcctcccaactctggaccaaggtggcatttcctgcacacccctccaggctgagatgatgctcgctgtcaactctctaggccaaggtggcatctcctcctgactctccagacctaaagtgacacccttcaggtactttgggcccaattcagccttgccctggtgctttgggctccagatgacagcactttgcagataagaacgatatgacgtgtggatttcactacatttggctcatggatgctataaaaggacttggatttctgacttggctcagggactggggttagcagccactttctgctccttctcacctgcgctttcttctgatcccagctctggtccctcaaccgtattcatatttactctcccctcccaacctgataccctgtcccttatcccaacccaaagccaagatctgagcccccaagatggagaatggggaggagc

SEQ ID NO: 3472 - DNA, 738 bp, Macaca Fascicularis
  misc_feature (1)...(738): n = A,T,C or G
tcaccttccggctttgccgttcagatggcgctcctaggctgaggagtgaagatgccacagagctggggtccgctaggctgcgtcgggcacgcttggaagctggcctgctgggactttccaccctggggcctgtgtcagccactggccctccgtaccctggaagcatacgacctctgggaaagacagccctgagcttcggttttccaagcacggtgttccccaagaactctgggctggcggcctggtggcagtgctggagatggccccgagcccctccccatggggcacccnnnnnnnnnnnnnnnnnnnnnnnnnnnnnnnnnnnnnccggctggtgtccctgtcgtggagttggggtgcgtgacctggtgcccgtccacgcgggtgtgcggtgtgaacatgtatgnnnnnnnnnnnnnnntgcgtgtggagagagccgcacgcgagtgccacgcgggagaggcggagcggccaccagtgttttgtgtttatttttcatcaagacatttcccctgttttcctataaatttgcttcatgtaagcaagtatataaggaccctcctttggtgaaatccgggttcgaatgaatatctcaaggcaggagatgcatctattttaagatgctttggagcagacagctttagccgttcccaatccttagcaatgccttagctgggacgcatagctaatgctttagagaggatgacagatccataaagagagtaaagataagagaaa

SEQ ID NO: 3473 - DNA, 709 bp, Macaca Fascicularis
  misc_feature (1)...(709): n = A,T,C or G
ctactgaaagtcctcctcttaaggnnnntagctataagatatgcttgatacatttttaaatatttaaaatacattaatttcactaattcttagtttcaggcaaaatttgcattataatcttaataattaatgtcaatgtcccatgtaccatatggtatattactataaaggagatttataagtaatctctaagaagattactgaatgtaattatcaatatttatatagtggcatttcgacaaaagctcagagagttgtaaagtggctatcacgtttaaagataaataacataacatacatttgacgcatattatgataagacttattattgtttttataagcctatactgtttccttagatacagcatgaagctcgcaattacctctttagctataatatgctaaaggataactataatacttctgacaaagtaaaactttttatgaataaactctcatataagtacaattttttttttttagatcgagtcttgggtttttttttttttagattgactctgtcgtgtcacccaaactaaagtgcagtgacgcgatttcagctcaccgcaacctcagcctcccggattcaagccattctccttcatcagcctcacaggtagctgggactacagacgtatgccaccacgcctggctaatatttgtgtatttctagcnnnnntggggtttcacnntgctggtcaggctgctc

SEQ ID NO: 3474 - DNA, 559 bp, Macaca Fascicularis
agtgagtttcttggtgtgatgccatttttattgccatttctgtgatcgaatctcatttatgtacattttcagtggtagaaaaaaaggttttaaaaattgtatcctagggaacagtttgccataagtcagaattttgcagtttagctcataggtcttaattggtttttctctaaaatatgaatgttataattgaaggaccacaatttgtttaatcaagattggcaacgctgcagttcctttatgaagaggcttttctgtcgtcccaggctagcagagatggatagcttctttgtcagcaatgtgatttcactttgtcttattttaaaccctgtctccatgacttcatttgcactttgacagagcagaggcagagttttgtcttatatttctcagactataatgaatctctaatgttaaaaaattataacaatttattttcattaaagaacgtgagtctttttatcattcctttctgcttatccttctttccttactctttcttccttttgtttccattggttttctttcgtcttgtattctttgcaatgtttttttattt

SEQ ID NO: 3475 - DNA, 785 bp, Macaca Fascicularis
  misc_feature (1)...(785): n = A,T,C or G
ataaatgttatggtntnnnaagnnactggcatttaatannnactaagccattnnnnngacagcagtgatctttatccctttctggagagaaaaggaaaatgaagggtaattactgtcaccatggagactgtagaggtaaggttgggtaggtcaggcctggcctttctttgtcatctccttatagcctaatgctaagtatgccactaagtttcagatatatggaatactttattttttaaaaagtatataaactctgagttattgagaattaaatattcactgtatattaagaggaagcttttgccaagttgtggtcttcaaatttatgtttactcttcctattggcagaacaggcgctgtttaagagtaaaccaaaggataagcagagggagtccctgtaaccaaagatggacagcatagccctggatagccagataaactactctttgtattaaggaatgtttctttcctagtggtgaagggtgggtaactgtgaaagaactttatatcttttctattcatggtattatagctgtatattcccagcataataagcttgattgaaatcctgtatttagtcatatattatttgcactgcttcatttgtgttatgtgcaatctctagaccaagcctatttttaaagtctggtatagcatcattttgtacatattcccagctgcagaactagtatcacttatctcagcaaaagagattgtttgcatggaaagattaatagcactgattagatttctaatattttgcacttttgaaatgtttgtttttt

SEQ ID NO: 3476 - DNA, 803 bp, Macaca Fascicularis
  misc_feature (1)...(803): n = A,T,C or G
atgagtatgannnngnccagcccgnttcctcagggaagcaatgtcagatgaaagacttagagttgcccaaactggctagccacgtgtacagtattggtgataactgagaaaggttagaacattgtgtggcattttgaatttctaccattgttggaaccaggtctagtattataagccccagacccaacctgtgggtgaggcctaaacaaagcctgagcacttcagctaagacgacccaccaaggtgccacctttagcctaacccctttgataagctggcccaggtcccagtaacnnnnnnnnnnnnnnnnnaccccatcccttctagtggtgctgctgccttttgagcacagaatccagcccacagaccccctgcatggtcccctttttgccatcctgtggcatgggtaataagagggaagcatttggctgaggcaacttgttcattcagaataaattcacagctgcttaaattttgtcaacaggccgggcgcgtnnnnnnnnnnnnnnnnnnnnnnnnnnnnnnnnnnnnnnnnnnnnnnnnnnnnnnnnnnnnnnnnnnnnnnnnnnnnnnnnnnnnnnnnnnnnnnnnnnnnnnnnnnnnnnnnnnnnnnnnnnnnnnnnnnnnnnnnnnnnnnnnnnnnnnnnnnnnnnnnnnnnnnnnnnnnnnnnnnnnnnnnnnnnnnnnnnnnnnnnnnnnnnnnnnnnnnnnnnnnnnnnnnnnnnnnnnnnnnnnnnnnnnnnnnnnnnnnnnnnnnnnnncaaaaaataaataaataaataaataaaaatgtcaacagaggc

SEQ ID NO: 3477 - DNA, 711 bp, Macaca Fascicularis
  misc_feature (1)...(711): n = A,T,C or G
ctgatgtctgaggatgcaactgccccaaaatgggtctaaagtaacatcccatcacgttctgtgaaaagtaatactgcactttaaggtaacacttatggaatgtatgaatgaatgagtcagtttggatcaagctgcctcaaatagagtctaaatataagatttcatacttaatagtgtcatttcaggatcaggaaaaattaggtgactcccnnnnnnnnnnnnnnnnnnnnnnnnnnnnnnnnnnnnnnnnnnnnnnnnnnnnnnnnnnnnnnnnnnnnnnnnnnnnnnnnnnnnnnnnnnnnnnnnnnnnnnnnnnnnnnnnnnnnnnnnnnnnnnnnnnnnnnnnnnnnnnnnnnnnnnnnnnnnnnnnnnnnnnnnnnnnnnnnnnnnnnnnnnnnnnnnnnnnnnnnnnnnnnnnnnnngcgatcgcactccttccccgaggaattgcaatttcatggttcctaatgatggtgcgattacattatgtggatcacttaggctgtgggtgtnnnnnnnnnnnnnnnnagcctctctcggcggggatgggagaagtcactcctaaaaccggggagannnnnnnnnnnnnnnagaatgtctgttactaatttttgttgacgtgctgctgtttcctacatctcattcannnnnnnnnnnnnnnttccattttcccccagcaccgcgtggcaccttccccagaaccctcacatg

SEQ ID NO: 3478 - DNA, 742 bp, Macaca Fascicularis
  misc_feature (1)...(742): n = A,T,C or G
tatgtgacagtannnagcaannccccatcttcatttgtgaccaaacagaaaaatttgtgtagatcaacttagcagctgtctaaagtaccaaaataacagatttttcactgttgataatttaaaattaaatgtccacttgtatatcttatgatatagaattaatggattgcttcaaatgtttttcagaatatgcttttaaatagtactgatttcattaagatgttttgttctgaatatttctgagaactgtagtgtcatttagttttcctatttgcatttttggttttttggagtaggggataattttnnnnnnnnnnnnnnnnngaannnnnnnnnnnnnnnnnaatgagattacagttacatgcagctacattgacatttcatttttaaaacctcttttaaactttttgaaatactaagaatataaaatttttattttttaagtttagatgtcctgaacaagtatgtctaggcaaaactgagttatttaagaatttacaggctgggcacannnnnnnnnnnnnnnnnnnnnnnnnnnnnnnnnnnnnnnnnnnnnnnnnnnnnnnnnnnnnnnnnnnnnnnnnnnnnnnnnnnnnnnnnnnnnnnnnnnnnnnnnnnnnnnnnnnnnnnnnnnnnnnnnnnnnnnnnnnnnnnnnnnnnnnnnnnnnnnnnnnnnnnnnnnnnnnnnnnnnnnnnnnnnnnacccaggaggcagaggttgcagtgagctgagatcgcacca

SEQ ID NO: 3479 - DNA, 1887 bp, Macaca Fascicularis
gccccggcagcggcggcagcagcggcaatgactccttggctcgggctcatcgtgctcctgggcagctggagcctgggggactggggcgccgaggcgtgcacatgctcgcccagccacccccaggacgccttctgcaactccgacatcgtgatccgggccaaggtggtggggaagaagctggtaaaggaggggcccttcggcacgctggtctacaccatcaagcagatgaagatgtaccgaggcttcaccaagatgccccacgtgcagtacatccacacggaagcttccgagagtctctgtggccttaagctggaggtcaacaagtaccagtacctgctgacaggtcgcgtctacgatggcaagatgtacacagggctgtgcaactttgtggagaggtgggaccagctcaccctctcccagcgcaaggggctgaactatcggtatcacctgggttgtaactgcaagatcaagtcctgctactacctgccttgctttgttacttccaagaacgagtgtctctggaccgacatgctctccaatttcggctaccctggctaccagtccaaacactatgcctgcatccggcagaagggcggctactgcagctggtaccgaggatgggcccccccggacaaaagcatcatcaatgccacagacccctgaacgccagaccctgccccacctcacttccctcccttcccgctgagcttccctcggacactaactcttcccagatgatgacaatgaaattagtgcctgttttcttgcaaatttagcacttggaacacttaaagaaaggtctatgctatcatatggggtttactgggaactatcctcctggccccaccctgccccttctttttggttttgacatcactcatttccacctgggaatttctggtgccatgccagaaagaatgaggaacctgtattcctcttcttcgtgataatataatctctatttttttaggaaaacaaaaatgaaaaactactccagttggggattataattcccacccctcttgcttcttccccacctcaccatctcccagaccctcttccctttgtccttctcctccaatacataaaggacacagacaaggaagtggctgaaaggccaaccatttcaggatcagtcaaaggcagcaagcagatagactcgaggtgtgtgaaagatcttacacaccaggagctgccactgcatgtcccaaccagactgtctgtctgtgtctgcatgtaagagtgagggagggaaggaaggaactacaagagagtcggagatgacgcagcacacacgcagttccccagcccagtgatgcttgcattgaccagatgttcctgagtctggagcaagcacccaggccagaataacagagctttcttagttggtgaagacttaaacatctgcctgaggtcaggaggcaatttgcctgccttgtacaaaagctcaggtgaaagactgagatgaatgtctttcctctcccttcctcccaccagatttcctcctggaaaactctttggtagatttggccgggagcttgcttttatgtaaattggtgaaatacacacatcttacactatccacagatatagccaagtagatttgggtagaggatactatttccagaatagtgtttagctcacctagggggatatgtttgtatacacatttgcatatacccacatggggacataagctaatttttttacaggacacagaattctgttcaatgctgttaaatatgccaatagtttaatctcttctattttgttgtcgttgcttgtttgaagaaaatcatgacattccaagttgacattttttttttcattttaattaaaatttgaaattctgaaaaaaaaaaaaaaaaaaaaaaaaaaaaaaaaaaa

SEQ ID NO: 3480 - DNA, 680 bp, Macaca Fascicularis
  misc_feature (1)...(680): n = A,T,C or G
tggatgcccagcctggnntcaccatcccagcagtgagcttcccagcccctagccccgtggatgagagcaccctgaggctccatggntatgcctttcgcccaagtctcccagctcctgagtcccctggccttcctgcccaccctagtagcccccagcttccagaggccgggcctggcatccctggcggcacttcctccctcctggagcccacttctggtgcactcggtctattccagggcagccctgcccgctggagtgagccctgggtgccggctgaagccctgcccccatccccccttgagctgaacagggtggggaacatcttgcacaggctgcagaccaccttccaagaagccctcgacctttaccgtgtgttgatctccagtggccaggtggacaccaggcagnnnnnnnnnnnnnnnnngctggtctccactttcctgtggatccacagtcagctggaggccgaatgcttggtggggaccagtgtggccccagcccagaccctgcccagcccaggacccccctccccaccaacgctgtgccctctggccagcccagacnnnnnnnnnnnnnnnnnnnnntactcggagctgctggtgcaggctgtgcggaggaaggcacggggacactgagggttcagcccctccaccgcagccctgctgcttctaaggacttag

SEQ ID NO: 3481 - DNA, 745 bp, Macaca Fascicularis
  misc_feature (1)...(745): n = A,T,C or G
aatgaggtgactccaaccgaggctgcccaagcaccagaggtgacctatgaggccgaagagagctccttgtggacgttgctacnnnnnnnnntggatgggcacctgctggagccggatgctgagtacctccactggctgctaaccaacatcccgggtaaccgggtggctgaaggacaggtgacgtgtccctacctcccccccttccctgcccgaggctccggcatccaccgtcttgccttcctgctcttcaagcaggaccagccgattgacttctccgaggacgcacgcccctcaccctgctatcagctagcccagcggaccttccgcacttttgatttctacaagaaacaccaagaagccatgactccagccggcctgtccttcttccagtgccgctgggatgactccgtcacccacatcttccnnnnnnnnnnnnnnnnnnnnnnnnnnnnnnttgagttcgtacggccgcccccttaccaccccaagcagaagcggttccccnnnnnnnnnnnnnnnnnnnnnnnnnnncggtacagggacagtcatgagcccacctatggcatctactaaggagccagagtgtgcccacttcagagcatgggattgatcggcagcaggagtaaagacacggctccagaggcccacgctgtggggtctgggccctgcctcaggcagcccctctgtggccccctcccatcaggcccagggttggagtgaaagggactctcaggtggtggggggg

SEQ ID NO: 3482 - DNA, 732 bp, Macaca Fascicularis
  misc_feature (1)...(732): n = A,T,C or G
cagagatacatacaaagaattacatataaagaagggtgtttaataatgatagttataataacaaataattaaaacaatctgaatacccagcaattggaggcaaattatgtcttagttataattagattgtgaatcagccaactgaaaatcctttttgcatattttaatnnnnnnnnnnnnnnnnnttgctctatatatgaaatgaaaaaaggatgcggtagcattttatagtactagttttgcttttaaatgctgtgtaaatatacaacaaaactagaaagaaatatatatataatcttgttattgtatttaggggagggnnnnnnnnnnnnnnnntattttctttgaatctttctgtgtcttcacatttttctacaatgaatataatcaaatagtaaagttgttgtaaaaataaaaatggatttagaaagatccagttcttgaaaacattgtttctggtaatgaagcagaatttaagacggtaatattaaggtgaatgtcatttaagggagttacatctttattctgcaaaagaagaggatgattgatttctgtacagtcagaacaatacttgggtttgcaacagctttctgagaagagctaggtgtttaatagtgaggtagtctaaaagcaaactatttaaaagactaaaggcacattttatggtgtctgatattttaagaagtaatgtttgattctcctttttatgagttaaattattttacacaagtt

SEQ ID NO: 3483 - DNA, 2489 bp, Macaca Fascicularis
actacaaccaaattaatccagcaagctaaggctcaaatgactgcggatacctccgaatcctccaggagagtttgcaacaactaatctgagagagaaaaagaaaacctatgcctgtatccccattgccttatctacaatgggttttatgagcacattattattaatttaaggaatagtttgtttaaccttattctccatttattccatggagataaaatgtattatgaaaacatgaatggagtgcttttaaaagacatttttcatggcaagtgaggaattgatttgagccaatctttcttgtatttgactgtgaaatatataatccaatataacagcaatgtcattagatctctcatctgactgtgagtgtcctaattgttcagagcgtcctcagaatgagtctgattggaacccctgttcccatgagagtggtaatggctctttacattcaagatcaaggaagaaatccatgctttcttctagcatgcagtactttccttctcagtgttgtcccaccaagccagagagtgataacaaagaagactcagcagttcttccctcagatgaggaaagctatgtgggttcttctcaaaacaatcatcccatttggagccttgaggatatcaaaaggaaaatcaagccgttgagagagcggactatccaagagttactgagagagtttggggatagtgggaagttccagccaaactccatgtccctgagctactttagagatcaggtggttatgaagttcagaagagctctgtattattctggaatttgggtgacgcatgttcgaggctacaaacctcataagcactttacggctaattattttaaaagaaaccctggttgcctacaccggctggttccatggctgaaacgggaactaacagctgtttatggaaattatggctacacagtgaagaacatcctaaccaccatcctccatcacatgacagaatatgacttggacagtgagtccttcattcacctcctggaaccttatctcttacaacacacccaccatttcctacatgagtttattagttttgttcattcaccttacaacatggatacctatgaccagcgagccatctatcaatgctctgctgcttcaccatatgtaaacaagaagccccttgtatcagctcttgtttcacctctgcctaaggatcacactctactgatatctcaacataatacaaagcagtctaaaaacacccaaggtcaatgggataaagaggagaggcccctgtcaggcttgaaacagtttccaaatggtaacttttccttgaagaaatctgaaatcccaccagtctatgatgaaacagtaagcaaaatctatggtggaatcaaagacaaagcagaatcaagtgaccacaaaagcaccatttctatgaataatatactccagaagtgggctactccaagggaaaggtgcccaggcttactgaattgcaacaaaaaagttcaagagaaaaagacagaagggataaagttgtttcctgatcatgtccacgatctgggaaagagtgacacaaccgcacacaccttcagtacccccgcaatttctaatcaggttcatccacagaaatatagtttgagagaaagaaagggtttgagccttggccagaagataaactttcagaaaaaagaagaagaaaataacgaatactcagatccttcaccaaagaccattcaaagactgtccagagaaagatccttgaaaagttgcaaatccagagagagagacccctcttggagttgcatttcagaaaatgccttttctcctgagagagatggcaggaaactgagttctttcagaaaaaagaggatgaagtgtagacaactctcccaatctgtagaaactggttcacactccaggagaagaatccaaagacgatcaaggtccaatactcacagatccaaatcctggtgtgttggatctagaaagagatctgtaagcagagaatcgagtaatctctctctgagaggaagtcacagaagtgaacactttacccagaatatatgctgtgagccctcaaaagaaaagcacgcacatggcaatgaatcaaactatgggaggccatcttcaaccacagtccaatatgtgaagctttcttcaactgctgggaagagacccaagtgtccttctaaaagtgaaggtgcttcccaagcaggaagacactgtaacagtcccacatgcctacatctccaggaacacagatccccaagtaaacaggagataaagcaaaaaacaacatttcctagaactggaagaaccagagcagctaggcacagaaaaaccaaatgccattattcagacatacacatcacagaggatgtcaatgatgaactggtcaatctggatgatataagacaaatgagtggtctgagtgtgcaccctcctgcaggaggcaaatccaccaaaaacagcatttgaatcttcagaatattcactgggtcaagaaaaaaaaaaaaaaaaa

SEQ ID NO: 3484 - DNA, 2444 bp, Macaca Fascicularis
aagtcggggggaggtggcggtggctgcagcggctgcgggcagcgcgcggggcgcggggcgcggggcgatcgccgtcggggttagggaggcgggcagtgggcgcaggctccccggtgcccgcccctccgctgcggaggggggccgcgagcgggcggccggggaggggccggcactgccgccgcaaaatgagcctgctgtcggccatcgacacgagcgccgcctcggtgtaccagcctgcccagctgctcaactgggtctacctgtcgctgcaggacacgcaccaggctagcgccttcgatgccttccggcccgaaccgaccgccggcgccgcgcccccggagctggccttcggcaagggccgcccggagcagctgggctcgcccctgcactccagctatctcaacagcttcttccagctgcagcgcggagaggcactgagcaacagtgtgtacaagggcgcgtcgccctacggctccctcaacaacattgccgatggcctcagctccctcaccgagcacttctcagacctgaccctcacctccgaggcccgcaagcccagcaagcggcccccacccaactacctgtgccacctgtgcttcaacaaaggacactacatcaaggactgcccccaggcacgccccaaaggcgagggcctgactccataccagggcaaaaagcgctgcttcggcgagtacaagtgtcccaagtgcaagagaaaatggatgagcgggaactcctgggccaacatggggcaggagtgcatcaagtgccacatcaacgtgtacccgcacaagcagagacccctcgagaagcccgatggcctggacgtgtccgaccagagcaaggagcacccgcagcacctctgcgaggagtgcaaggtcctgggctactactgccgtcgcgtgcagtgaccagctgcccgctcgcacccagagccgcccccgaccagcccaaggagacgctgcttccctgtgctgctccaaggggctgcgtgtcgccctgtgcgtggggtgtcctcgcaggcctgcggggctgggccgggggctcttagcgtccttgtcttgtgtgtgttgacaaacagtgttactgacatcgctgcccccacaggccagggaaagcagggagtccggggctctttaggcgggcctgaggtctctgtggaggggacaaaagcaagcaaaagcccatgtccaggagccccgggtatccccacagactctcctctgagagcctctttggggtgagcagccttgtattggccacaggtgcactaaatttactgtgaatcccaaacttcccccagaccagccaggccgcctgcccccacccacaaccttccggtttgcccggtatggaaagccactctcggaaatccctgtttctttcctgagtcagcaatcttggcaaggggacatgtgttctagcagctgctggggagtggacctctctgtcccttgcccactttaagccccaaatcctgaccccctctgacatcactggcattgcacctgggtgtgcccccctccctaccctatggacccagataggaggggttaggcacaggggaggcacgaaacgctggacggatctgtcctggggaacgtgagcagcccctcccacgacccccaccagactgccttaggttttgtcagtcccactccccttccttcccctgtgcctcccacccacgctgggggtccacatcaaggtagtttggcccagcgtggaagcccagcgtgtctgttctagcagaaaggacgcaagcctggcgttctggagacctgggctcaagtccttgccctgctgctgacgcattctgtcaccttgggcaaggaattcacatctccgggcctcggtttctccattagttaaatgacagcataacaccagagagcagagggcccatttcaggtctgttgttctgggattcatgctggccggtgctgtgtcctggagctttatttggggagtttcacccagaatggtgggagaagcctcccaggtgccaggtaccccgcaccgtgacccttcacttggtgtcttaggaagtcaggctgagggatgctgagtcctcccctgctggcccctacagccccagccttgcttttcatccccaacccctgcaaacatggaggagcctcctccttctcacctcggtctcctagcccctcacgtggggaaccctgagacaagccacagaacccctcttttctaaaatggggacaataatttcctacctcccaagggagcagagaggcctcgtggcacgtccctggccagggagcccactgtcctgactggcagcgggatcgtgcgctcttctgtctcccggatgagaagccccgtttccatagtcatgacccttcctttctcccggctgtcagaactgggtttcttgattttgcccctacatgatgcctctgtgggaaaaaaaaaaaaaaaaa

SEQ ID NO: 3485 - DNA, 1649 bp, Macaca Fascicularis
  misc_feature (1)...(1649): n = A,T,C or G
atgaaatactagagattgtgcaggcacaagataacggttgggtggatgagggtggttttggtggagggagtagagaaaggtcagattctagacatatgctggaagtagacttgacaggaatcaaagatcattccagtaattttggcttgagcaactgggcagagagagttatcacttactgagtttgggagtttgtgggaagatacctggcagttgggagcagatgtctgggttcagacatgcaaaatttaagaagcttttcagagacgtccaagtggaggtggtgagcagacagttggatttctgaatctggaatttggggcacagggtgagggttggggatgtaaatttgggaattgttagcatatgagtccatggctccacctggaaatcagtgtagataatgacgaggcctggtttggagccagaccattgggcacgctgatgtttacagcacagggatttgaggaggagcctggaaaaacatccgatgggaggaataagcaagtgtgattcctgaagccacatggaagagtgtttcaataaagaatactcaaggagaaaaactgcctgctcttaagcaggcagtatgaggaaggatctagggtataggtggaggggaggccctatctaaaagtctggacattttgacaaaagtaacagaaaggaagacagactgtctggacgcagaggcaggtggctgtcagatatggtggtgggaatgtgttcttccaatgacacttcccttctttctcagtgaaggcagaagtaaaaccattatctgagagtaaagggtgtgtgtgtgtgtgtgtgtgtgtgtgtgaagtactcaaagatatgagaagaaaggaggtatagaatgatctccagggaatactgtaagattgccttccagtactaaaggcccacttgaggttagtcatcatagattgaagaaaagtgtgcttgtggatctgcctgtttccccccaggtgtgctcatctgcacgcatgcagaggtggagggtggagtgggtcctgactggtaagtgcaagttcaagagggaaggggtaaagcaagatgagagggcaaaagggaaaagacagaagctcagaagtcaaagccttctgtttttccactttgtcatggattataatccaccnnnnnnnnnnnnnnnnnnnnnnnnnnnnnnnnnnnnnnnnnnnnnnnnnnnnnnnnnnnnnnnnnnnnnnnnnnnnnnnnnnnnnnnnnnnnnnnnnnnnnnnnnnnnnnnnnnnnnnnnnnnnnnnnnnnnnnnnnnnnnnnnnnnnnnnnnnnnnnnnnnnnnnnnnnnnnnnnnnnnnnnnnnnnnnnnnnnnnnnnnnnnnnnnnnnnnnnnnnnnnnnnnnnnnnnnnnnnnnnnnnnnnnnnnnnnnnnnnnnnnnnnnnnnnnnnnnnnnnnnnnnnnnnnnnnnnnnnnnnnnnnnnnnnnnnnnnnnnnnnnnnnnnnnnnnnnnnnnnnnnnnnnnnnnnnnnnnnnnnnnnnnnnnnnnnnnnnnnnnnnnnnnnnnnnnnnnnnnnnnnnnnnnnnnnnnnnnnnnnnnnnnnnnnnnnnnnnnttaaaaaaaaaaaaaaaaaaaaaaaaaaaaaaaaaaaaaaaaaaaaaaaaaaaaaaaaaaaaaaaaaaaaaa

SEQ ID NO: 3486 - DNA, 1765 bp, Macaca Fascicularis
tatttacaaaaacaggcaggaggctggatttggcccttgggctgtagtttgccaaggcagacctctgttgtttgtgtgaagaggagaaaagcttagtaagagaataggcatgggtgaaggagactttgtgtgcacatgtgtatgtttttagttaatatctttcctttttatggaattgaaggatacaccctggcaatcttcctggaatctcaactgcactagaaacaatttgtttgtggtaagaaagctaaacacaaagctgaatgagagaaattagagtcagaaaaagctcatgagaggcagagagaaggggaaagagggaaggaaagggaagctttatgagaaggcttaatcataggggctcttgggtgctgggattccatcacctgtggatgacttccaaaagccaaagcaaagcctcctcatacatttaggagggcaaggccttctcatttacaagctcctccagatggttttcagagcccgtctggagaagaggaaaaagactatcaatcatggcattgtaaactccagacagttgtctcaaaataaaattacttataaactctctctctatatatatatatattaaaatcacttaaaattcgacaataagaaagcaacctgatttaaaaactggccaaagacatcctaagaagatatacagatggcgaataagcaaatgaaaaggctgtcatcctaagtcactaggaaattcaaattaaaacaacaagatactggggaacatgttctcaggacctcctgagggctgtgtcatacgcaaaaacaaaaaacaaccaaaccaaaccaagataccactacacacctattagaacagccaaaatccagaacattggcaacaccaaatgctggtgaggatgtggagcaagagaagctctcattcattgcgggtggtaatgcaaaatggcacagccacttttaaaagaagtttggcagtttcttacaaaattaaacatactcttaccataaggtccagtgatcacattccttggcatttatccaaaggagctgaaaactcatgtccacacaaaaacccacacatggatgtttacagcaattttattcataattgccaaaacatggaagcaacaaggctgtcctgcagcaggtgaataaactgtggtatatctacacaatggaatattattcattacttaaaaaaagaaaatgctgtcaagccatgaaaaaaaaatgaaggaaactaaaatgtattagatgaaagaagccagtctgaaaaggctacaaaccatatgattccaacttcatgactgacattctggaaaaggcaaaacaatggagacaataaaaagatcagtggttgccaggtcttaggggcgatgcaaggaggaacgggtggagcacagaggatttttagggcagtgaaactattctgtatgatactataatggtggatacatgccattatacatttgtccagacctacaaaatgcacaacagcaacagtgaaccctaatataaactatggactttgggtgattatgatgtgtcaatgtaggtttatcagttgtaagaaatgtactactctggtgggggctgctgataatggaggaggctatgcatgtatggggacagggactatatgggaaatctctggactttctgttcaatttcactgtgaaactaaaactgctctaaaacaaaaaaaaaaaaaaaaaaaaaaaaaaaaaaaaaaaaaaaaaaaaaaaaaaaaaaaaaaaaaaaaaaaaaaaaaaaaaaaaaaaaa

SEQ ID NO: 3487 - DNA, 756 bp, Macaca Fascicularis
  misc_feature (1)...(756): n = A,T,C or G
cagcacttgggagcnnnnnncgggaggatcactggaggtcgggagnnnnagaccagcctgaccaacatggagaaaccccatctctactaaaaatacagaattagccgggtgtggtggcacatgcctgtaatgacagctacccgggaggctgaggcaggagaatcgcttgaacctgggaggtggaggttgtggtgagttgagatcgtgccattgcactctggcctgggcagcaagagcaaaatgccatctcaaaaacaaacaaaacatgccacctcatgnnnnnnnnnnnnnnnnnnnnnnnnnnnnnnnnnnnntcctgagttaaggaggaaagggaaaagatatagctggaagtgagtggaagagatgctgagggctggggctgcannnnnnnnnnnnnnnnnnnnnnnngtgctcgagccctactggggatggatggggagtggggcagtggcatttgctaccttaggaatcagggccannnnnnnnnnnnnnnnnnnnnnnnnnnnactgcactgggtacttaaagaaatacttaaagaaattatttcctgttgcaattataattactgcttattaaggaaattttgggaattttannnnnnnnnnnnnnnnnnnnnnnnnnnnnnnnnnnnnnnnnnnnnnnnnnnnnnannnnnnnnnnnnacatttctgtgcatagatttttggtgtgtttacatagtcattattctactgtatatacaattttatgtctcttttgtacttaacatataa

SEQ ID NO: 3488 - DNA, 727 bp, Macaca Fascicularis
  misc_feature (1)...(727): n = A,T,C or G
gagatgctaagataatgcaattttaaatgcccacgggttttacttgttttggagacagacagggtctcattctgtcacccagactagagtacagtggaacagtcatggcnnnnnnnnnnnnnnnnnnactgcctgggctcaagggatctcactccagcctcccaagcggctgagactgcaccaccacaggtatacatcaccatacctggctgattttttaaattttttctagagataaggtctcgctatgttgcccaggctggtctcatactcctgagttcaagcattcctcccacctccgcctcccaaactgttgggattacaggtgtgagccaccatgcccaacacccactgatcttcaactctcacatgttgggcataagaagtcactatgtaattgttactggaaagcaagatttaatgaacaattctgactatgaaaaatggctctttgtttgttctgtaaatactcatttagaaaagtgacaattgtgaacctcaaaagtatttctaaaaatgtaaatatgtattaatccttgtatcttttatggtaattttgcatattgatatgaattatataaaactgtttaaaaggtatnnnnnnnnnnnnnnnnnnnnnnnnnnnnnnnntgttaccaggttttacaatgcaaattttctctaatacctgggtttaatacagctcacatcactgaattttacaagagtttaaatgggttaatataca

SEQ ID NO: 3489 - DNA, 734 bp, Macaca Fascicularis
gaagcgtgagacagcatgatgaatctcaaaaaccacatgctggtgatgaaaagagtgcattctgtgtgtcatcgaggtaaatttctagaacaggtgaaactaacctgtatagtgacagaaactacatcattaactgctggggtcagggtttgggggggatagactgcaaagggcacaaaaggactttctggggtaatacacgtgtcatcaaacttgaaatggatgcattgtatcattttcaactcacaacttaatctgtttgattgtaaaagtaataagaaaaccactacaaatcataatgccttctacttaatttaatgtatgtttagccttagaaaagtgtctctaactgtgacagggagttcaggaattccttcatttctgtttctgtctctgtctttagttaaattcatgcagtattaaatggaatattttttaaaaaccctgtcaattaggctctcataaaatagtttctactgagggtaagacttgttaagaacaggatgctctgggtgcattccaagatgactaccttcgccctcttcctacagaaagtactagggaactttttttttttctttctgatcttcactgtgtgaagtaaaactggatataaaactcacaaaagtgggaggagaggttcttcctaagactgggcttccctggatgctcaaaaggtcttaatatgtctgaaggaaagctgtatgacatactgatacatttattctgttttc

SEQ ID NO: 3490 - DNA, 744 bp, Macaca Fascicularis
  misc_feature (1)...(744): n = A,T,C or G
atgcaaatgaaaccacagtgaggcnatgacttncnnnnnngaatggctaaagaaacaatagtgaaaataccaaataccaatgaggatacaaactgaatattttatacattgctaacaggaatgtaaaatggtaccgccactctggaaaagagtttataaatttcttatcaagttaaacataattttttaatcaagttaaacataagaccccgcagttgtgctcctggacattcattccagagaaatgaaaatctatattgtacttgtacccaaacattcataggagctttatttgtaattaccccaaactggaaacaacccagatgtcctacaacaggtacatggttaaacaaaccatccataacttgcaatactactctggaatgaaaaggaactaactgttgatacaagaacatggttgtacctcaggggtattatggtgaacaaaaaagccagtctcaaatggtcacatactgtatgattgcatttatataatattcttgaggtgacaaaattattgaaatgaagaacagattaatggttgccagggataggaattggagggggtgtgggatatgtatgactgtaaagagatgacacaaggagttcctttnnnnnnnnnnnnnnnnnnnnnnnnnnnatgatgattgtgatgatgattatagcatttgattatgaagttaagcacatgaatctatacctgtgctgaagttgtatggacctacatacacacaaatgaatgca

SEQ ID NO: 3491 - DNA, 748 bp, Macaca Fascicularis
  misc_feature (1)...(748): n = A,T,C or G
caggctnnnnnnnnnnnnnnnnnnnnnnnnnnnngagtngtgtcacnnnnnnnnnnnnnnnnnnnnnnnnnnnnncgtaccgagcagaggtggtccggctnnnnnnnnnnnnnnnntcctggcctgcctctttgtggagctcttccagagctggcagatcctggcgcggccctggcgtgcctnnnnnnnnnnnnnnnnnnnnnnnnnnnnnntcttcacctttggactgctnnnnnnnnnnnnnnnnnnnnnnnnnnnnnnnnnnnnnnncagtggcctcttcctctccttcgccttcttgccctatatcagctttggcaagtnnnnnnnnnnnnnnnnnnnctgccagatcatcatctttcaggtggtcttcctgggcctcctggctggcctggtggtcctcttnnnnnnnnnnnnnnnnnnnnnnnnnnnnnnnnngttcctcacttgcatccccttcactgacnnnnnnnnnnnnnnnnnnnnnnnnnnnnnnnnnnnnnnnnnnnnnnnnnnnnngctccgggggtcgtgcgctccagcaggccagagccagacacgacaactctgagcctcacagnnnnnnnnnngtcacctgctccatgtggggactggcctgttnnnnnnncacagacctctttcttgtgccttgttcacttctgttgaacccctcgtactgctgggcatttattatactacttcccgtgataaccttctaacttgtttctgacgaccacctcatgtggcc

SEQ ID NO: 3492 - DNA, 767 bp, Macaca Fascicularis
  misc_feature (1)...(767): n = A,T,C or G
gactgaatnnnnnnnnnnnnnnnatatgttgtgtgaatgaatgncttagttgggtaaagttaaatccaaatacttcaaccggctttttcttcagtttgtttgtttttaactttcaagatgcatgttttgttttgtttccctttgtttttgttttgcaagccagctcatttttctaacagttgaaattcttttaatactaaagaaacagnnnnnnnnnnnnnnnnnntttaagtgtttatatacctgtttatatgcatacattaacaaaattagtaatagcagtgcttagaatttcaatgctgagtcatactgatgattaactccatactcctagtggtgatgtnnnnnnnnnnnnnnnntggaagnnnnnnnnnnnnnnnnnnnnnnnnnnnntaccactcatgctacttactagtaatattaaggtgttgtacttagcaattcttcacatgtgggttcctgaggagatctaaaagttaatacaaaaccaagctgtttattgattttcatgagaaaacttagtttaggtctacctgatttattttaaaagaaggcagaaaggaaatttggtnnnnnnnnnnnnnnnctaaaaggttatttataaaatcaatagcactgaatgataatttttttaatgatggtcatatatnnnnnnnnnnnnnnnnnnnnnnnnnnnnnnnnnnnnnnnnnnnnnnnnnnnnnnnnnnnnnnnnnnnnnnnnnnnnnnnnnnnnnnatatttaaataatttnnnnaaccataataacc

SEQ ID NO: 3493 - DNA, 665 bp, Macaca Fascicularis
  misc_feature (1)...(665): n = A,T,C or G
aaaaaggtnnnnnnnnnnnnnnnnnnnnnnnnnnnnnagaccttggtatggtcctccgagcatgtgtgtatatatgcatgtgtgtgtgtgtgtatatatatatatttcctgtttttactgatttttattgattttattcaaagatatctggggatgggattggggaatgcttagtttgactattgaaagaaacacggatccctagagtatttcagatacagnnnnnnnnnnnnnnnctgcctcccaccagcccacattatttctcgttttccctcatgatggtgaaaaacagtggagagctagtaaagggtttaatgcagaaaacaaggagaagagaatgtgaagtttgaagtgcctatgaaacatccagctgatactcctgccgtaagagaaaaagaagccaagagaacaccaatgtttaaggagcaggtagagaaaacccagcaaaggggcagaggaataagaggaccaaagaacagtgtgaagaatcaaggagagaggtcaggcacgannnnnnnnnnnnnnnnnnnnnnnnnnnnnnnnnnnnnnnnnnnnnnnnnnnnnnnnnnnnnncctgggcaacgtggtaaaaccacatctttactaaaaaatacaaaaaactagccaggcatggtggcacatgcctgtagtaccagctacttggg

SEQ ID NO: 3494 - DNA, 676 bp, Macaca Fascicularis
cacgtcgtcgtgagctatttctgcaggagtggtggtgtgcccaagggaaaggaagaggttggggacgccacggggagaaggcagaagtgggaataagtagggtataagcgagggccgcctagcacagcgctgagggcttagccagtgtttcacactcgcacattagagtcacccgaatccctaaaagaaacacagatggctccaccccacttcagattaattgagtcagctgtggggcgtgcgcacctcagagccctagtacaggagagagcagtgcggtacaagttcagtgagtcagggacgccgctgatccgctcctgccgcctcccggattcagcttcctgacagccgtgggggattgattcaagggctttccatcctctttcggggcgccgtgtatgtctgcttcagcaaaggggccggtggggaggctggcctcccgtcctacattcagtgaacgacggcagcccctcacctgtaggccactgaacacagagggacatcgaggaccagtggaagtcccagctttcctcttcccctaagatggcgtgagacatgctctggggacagaaataagaagggactcccacagggcccccacactgactttgaagtggaagagtcgggatggggctcagaagaaagaaatatgcactgttgttatatttaatatatg

SEQ ID NO: 3495 - DNA, 2008 bp, Macaca Fascicularis
attgttcataaacctcagaggaacatgcaaattagagcatgctgaaatgctttcatttggccaagaatgttttcagagagctccctgctgctcagaaagagtcctaagcagctggcttcactgaactgtagaacaagcaaaaagatgttaagtaaggattaagcgctttagacagtaagtgtaagatgttaaatgttttccctggctcatttgtgggtctttttctcaattcagcatgcaagcttttggggaaagagcagcttcatggacttctgtgtcttgagtttttttttttccatctggagggaaagataagcatttaatatcaaggaagataagagccagcaataaaacacgccatactaaattttggttgcctgcccatttgtaagtcccattctcctccggcccaatcagcacaaattgatgttaactggaattttattttttgagtgaaatgggccttgaaaatgaggctgctttttttcatttccgaacccaacagtgtcttgaatatgggctgttttcattatgtggcttctaatcacggagttggcagccccatggagtataggcccaagacaaatgcttggcacctttctttctctcaagccccttgggtgtccttgggatatcagattcctcagggcacagaggttataggggaaagaagagctttgaagatggacacgcatatgctccaatgccagtggtggcccttgggagcctgggtgaactttcttaggaagttgccccctttatcaatgataaaatgggaatttcctctgaccaagcggaatggggttttggatgggggtggctctaaggacaagagaaacctgaagcacccccttgaagtggagggcatgactcagttggagacctcggaggacaagagctttcctctgtcgaaagcctgatgaggcctgaggagcatttttagtgtctaacacatctccctccctccacctaggatgacattgtttagacctgttggtttttcttctttgtagcagccttcttgggcatctattatgtgggaggccatcctagggacattgcaaagggtccttctcttaacagccttgcacatacacaaaaggctctttggagtttctctctctcaaaagtttgctcagtctaagcctttagcactgtccagtagatgctcactttgctagagaaaaacctagaagagggagagcaggtctccacccataaggagaaagaaatgcacagagattgtcctgtgaggcagagtaaagccagacaccccagagatttacaaacacacagccttgtgtaggttcttctgttgtgtaatctaacaagttacgttctcattttcagttagaacctttgtgacggagtttaaattaaagagaacttttcttaatactactgtggaaaaacattcagacctacaaggagttgaaaatgagatcaccaaaacggtaagtgtcctgaatggcatctttctactagtcttttgtttcctagaacagattttattccaagagggaactgcctaggggtcagctctatctcctgggctcttcacttttgttatatttggaaggaaaacttcacggtaaaataaaaagcctttcagaaatggaagcaaggtgtgggtgcccagtagaagagtttcttcagatgtgtcctcatgcacagtctttatctgcaccttggtgtttcttttccatgtgcaaactcatagtcacagacatgcagatgacaggcaccagcaggagctgttggtgaggaagaaggacccagaaaatcttacggtcccatctgctgttgacaggctgtgtgactttccccttgtattttggagctcgggggaatgatactctttcctcaaaggaatgccaaaggtgcaacagttaatcctgatgccctagggtttgagaactcactatgtagatgactgaggggcctttgattctgcttctttccctctttgcctgctttagatcagacattaaaaaaaaaaaaaaaaaaa

SEQ ID NO: 3496 - DNA, 466 bp, Macaca Fascicularis
  misc_feature (1)...(466): n = A,T,C or G
atcaanttgccgatcgtcgccaacaaatgcgcnnnnnnnnnnnnnnnnnnnnnnnnnnnnnnnnnnnnnnnnnnnnnnnnnnnnnnnnnnnnnnnnnnnnnnnnnnnnnnnnactcgaccatcagcctccagatgggcacaaacaagtgtgcgagccaggtgggcatgacggctcccgggacgcggcggcacatctannnnnnnnnnnnnnnaaccgacaagtgtgacaactcctccatgtccctgcagatgggctacacgcagggcgccaaccagagcggccaggtctttggcctgggccgacagatatatgaccccaagtattgcccacaaggcacagtggccgatggggctccctcaggcgccggcgactgcccnnanncaggggnnntccctgaatatnnnnnnnnnnnnnnnnnnnaggccggctactganncnnncancacgctctcttcccacatcatc

SEQ ID NO: 3497 - DNA, 742 bp, Macaca Fascicularis
  misc_feature (1)...(742): n = A,T,C or G
ctcatgcagtagtgnnnnnggctcatggcannnnngagaaaaggtaaatggaccaaacttcttcggttggatttgtgccatgttataaggaaaaaatttcagaaggaaaaagtagcgtgagccactgtgcctggccgaaaaaggtttaaaaaatttaaacgtcacatactcctcaannnnnnnnnnnnnnnnnnnnnnnnnnnnnnnnnnnnnctaaatcaagaaagagtaagacacagatacagcaaacaggagcctaacacagaagacatggcctgggaggcccatgaggatggcgagaaggatcctggggtggcagctctgcgccagacgtggagggtgacagagccatgctgcagcagtgcgacccactgagagctgaaggcaggccagggtgagctcagaagcaggaagtacagggcagccccctccctctgactgtatttccactgtaggtccagtgcctggtccccaccttcgccctcgcaggtgcctgactgtgctgagccctgtgtttcccaaaactccaagaccttgctcacgacttcctcaagaggggccttgtcagctcccggagaagcggaagtcagatcacaacctggaaactgatctgctcacctcctggagcctccgtcccgcaggggcagtgctgctctctccttgcnnnnnnnnnnnnnnnctgctgtccgctttaatactaatcatctttgatattcatttatatgtagttataatagttgcg

SEQ ID NO: 3498 - DNA, 2025 bp, Macaca Fascicularis
aaagtaattccacagcacttgcaacatttcatattccgttcaggtcaggggaaggatcttgactttcacaaattagaaaaccaaggaagaaggaaaattctgtttgttaccaaacaagatgtcccacaacaacttcagcctgcagagccaatacaaggagaggagacaaagaaatgcctctggattcaaaatggcacagtatgtacattaaattcaaaacttcttcctctaaaatcagaggacccactaaacagtgaagttttaattggtgcaataaaacgtggtgtaccaactcataggaaaggtgtgggggaacagcccaattcaggtaaagggggaaaggcagagtttaataaagatctacgagcaaccatcctggagttacagaaatcaccacatggtgaggaggcacagaaggtcaatttgactgatatggaaagcgaatctagcaatgcaatgaacatgaatgtacaacatgaaagagaagataaaaatattcaaaaaatgttaccagaatcagttccatgctatagtcaacacctcagtttcagtacatatcaaatgaaagaccctgacccttgcaaatcaagatctgaaccgaagagtcctgaaggcagaagttcttggaatttgtctcatatagtgcaaaaaacagagcaagaaacacactttagagaaagtgttttagagcctatttctggttacatgatgaaacaaagtcctcatatgcaagaaggaataaaatgtgtggtaggtctaaagacttcatttcccaaaacagggaaatcagagattggttcaatgccacatgataccccttgggatgaaaatcctagaaggaaatgggatagttctatttcagagaaaactgcatggaatccaaaaaacttacaaacagtcttaaaacctttagatttctccagtctcatgtcatctgaatatgaaagtcggagctatacattagagtttataggcaagaaaagtataacgagtcccaaacatgtaactttgaagacaaagcaactaccaatttcgcagttgtttaatatcataagatgttctacagaaaaccacagaaagaaaaaacagcactgctttaagtacaagatgaaagggagacaatggtacacaagtataggagaggcattacgcagtgccactgaatatgctaagagtccaccatccaaatcaatgattgataaactcttattcaatacagcagcaaggggcactctgtctaacagaacacaccatcaaaatgtgtatggtcatactacagaggaaaaggaagaggtacaagaaaatgtagctgcaagttccttgggtcctttggatttctttatgcctgttttatctgactctaaaaaccagacaaacacaatacggttatcagaaaggaaaactatattgaatcccaaatgtttaactatgaaggaaaagaaatcaccaatttcacagatacgtaaaatcaatagacactttactacaaaacataagaagaaacttgaatccaatttaaaaaccaaactgaaagcaatgtggcaaggtgaaaatgtgactgatacatttccaaataccatttccttcactccagatacctctgacattaaaaggcaaagcagattccaaacagagatagacatgagaatatcagggttaagtcatacacaaccaacacaaatagagtcactagctgaagggatagcaaggtgttctgacaagagaaggacttccaacttggtaaagggaacaaaactacatgatagagaaagtggggaaaagaagcaagaacatcttacaggaatggatccattctatgcagaaaacttcatgacaaatacacatcttagaaaggatcctcatcttggtaaatcagaagatgtgcttttgggagaaccttttatctcaaaaagtcagttttacaaagggaattcgaaaaaaaaaaaaaaaaaaaaaaaaaaaaaaaaaaaaaaaaaaaaaaaaaaaaaaaaaaaaaaaaaaaaaaaaaaaaaaaaaaaaaaaaaa

SEQ ID NO: 3499 - DNA, 746 bp, Macaca Fascicularis
  misc_feature (1)...(746): n = A,T,C or G
tttcgatctgatctcacgttagattttgtcacaaccggatttagtggaagcagaggaatcaagttcactattttctgaaacactgacacaaaaaagggatgggaannnnnnnnnnnnnnnnnnnnnnnnnnnnnnnnnnnnnnnnnnnnnnnnnnnnnnnnnnnnnnnnnnnntacagttaatggtaactggcaagggatttaatacatttgctggtattaagtttcttatggaatgagtgaatgaacgaacacagcagcattttgagagagagctgccagaacatcccatagaaaaacaattttgtaagaacgtgatggcaacaatcagcagccagtattctcagagttcctaattaccaaaagcatatacaatttagtctagaaaaataattttataaaattaagcttttagattgaaaagcaccccctttaacaggtagagagatactgaaaaatagtccctaaaaatctcactcaatagttgcnnnnnnnnnnnnnnnnnnnnnnnnnnnnnnnnnnnnnnnnnnnnnnnnnnnnnnnnnnnnnnnggactggtggatgggcnnnnnnnnnnnnnnnnnnnnnnnnnntggtgtgccctccccgtcgcccgacttcaggtacttatccaggatggtgatgatctcgtcattgnnnnnnnnnnnnnnnnnnnnnnnnnnnnnnnnnnnnntcaaaggcacatttttaataatctcnnnnnnnnnntcatgtttctggacttta

SEQ ID NO: 3500 - DNA, 718 bp, Macaca Fascicularis
  misc_feature (1)...(718): n = A,T,C or G
gcagggagcatccgcggnnnnnnnnnnnnnnnnaagcagcagacgtagcagaaggcagcagcgctagaaagagaagtgccagagtggggagcccagaccagcgaggagggaccacagggcacagggagccccgacgagcgaggaggggccacagggcagcatgcggcggtggaggtaggccctggtcccggagccacagcagctcaggtggatgcaggacacagtcaaggcggggaggggcagggcgacagatgcnnnnnnnnnnnnnnnnnnnnnnnnnnnngcggcccagaacacggggacttgaacattcactgtccaacactcacggggcggcttctgtgacgtgtcagctttggagaaaagtatgtcctcctgcaagggtcaggagagggttgcagggttgaaggacgtcccagtgacatttctgagtcttgcagcttgcgggggnnnnnnnnnnnnnnnnnnnnnngaacgnnnnnnnnnnnnnnnnnnnnnnnnnnnnnnnnnnnnnnnnnnnnnngtcttgcagcctgcaggggtccacgtggttaccccgaacaggaacatgcgggcgnnnnnnnnnnnnnnnnnnnnnnnnnnnnnnnttttgcgtttacattcctcattctgtttttaaagataaagcaaattgatgcnnnnnnnnnnnnnnnntttttcaggcctaataaatatatnnnnnnnnnnnnnnntgcca

SEQ ID NO: 3501 - DNA, 736 bp, Macaca Fascicularis
  misc_feature (1)...(736): n = A,T,C or G
catcatgtaagcacacnnggatgggtgacaggggtgcaaggtagaaaaatggctcctctactcatagcagatcttgctacatcatggtgtccaactttccaggaatcgtcaccagctttatccgcttctggcttttctggaagtacccccaggagcaagacaggaactattggttcctgcaaacctgaggctgctcacctgaccactgggcaccttagtgccaacctgaaccaaagagacctccttgtttcagctgggcctcctgtccagcttcccaggtgcagtgggttgtgggaacaagagatgactttgaggataaagggaccaaagaaagagctttacttagatgattggttggggcctaagagatgaaatcactttattttttagagattttttttttttaaattttggaggttggggtgctatatttagaatatgccttaaaaggccgggcgtgnnnnnnnnnnnnnnnnnnnnnnnnnnnnnnnnnnnnnnnnnnnnnnnnnnnnnnnnnnnnnnnnnnnnnnnnnnnnnnnnnnnnnnnnnnnnnnnnnnnnnnnnnnnnnnnnnnnnnnnnnnnnnnnnnnnnnnnnnnnnnnnnnnnnnnnnnnnnnnnnnnnnnnnnnnnnnnnnnnnnnnnnnnnnnnnnnnnnnnnnnnggaggttgcagtgagccaagatcgtgccattctgatatgaatgtgccttatatgccgatatgaatatgcctaaa

SEQ ID NO: 3502 - DNA, 698 bp, Macaca Fascicularis
  misc_feature (1)...(698): n = A,T,C or G
ctgtttgtaagtaccaatacatccaattccnnnnnnnnnnnnnnnnnnnnnnnnntctttcgctccatctccttggcttgacactcttagaagagtgtcccaaaacagttcatttcactgatagttccattattgaatttggtaagagattttgtaattttacacaagccttggtaacattcgaaatattttttgtatctactgcattnnnnnnnnnnnnnnnnnnnttgcaaccccagtcatatatttttatatttttgcaactttaagcaaggatgagatttttctaaaagcannnnnnnnnnnnnnnnnnnnnacttggactaattgcaggaaatacatctgaatgtttatttgcgagtaattttaagaaagaaaattacaggnnnnnnnnnnnnnnnnnnnntttctgtgactgttttgctaaatattggggagaaatcagctatggagaaatgttgattattttattttggttttgcaacttttcctcacttaaacacctttctaactgtcccatgtgcaaaattttcatcagtgtcaattcatgtttcatatttgtgtttatttagtannnnnnnnnnnnnnnnnnnnnnnnnnnnnnnnnnnnnnnnnnnntatctgatttcacaactccatgatttttctgatacattttccatcaatgattcttaggactataaattaaagagttaaat

SEQ ID NO: 3503 - DNA, 699 bp, Macaca Fascicularis
cctttaccttcatcagaccttataaaaggtcaaatggtgatccttaagttttttagtcacatcttacttattcagtattagtgcgaagagtagaatactttcaagtaagcttcaagttacatgaaaacaaattacataaatctaactttgagaataggaaattagtgacaagatcaatctgtaagagcacttatctgaaataaatgagtaacgagtttcacatcttataaacacaagttagcatgtgttttctcaagagtccaggggttttcattattggactacagctttaatcttctaaatgttattccccaagattaaagatcatctcaagttagatcaccaaagatcaaaagctaaaaccagaagtgtttttgtcattgtggtggtggtagtgttactaattgcctagatttttaaagggaaacttatttttttcattagattgtttcactgaaaaaatagaagcagaaacttgcccaaagtcacagtggtcgaactggaaattgcaccgaaacttggcatactggttctaaaatccaaagttttagcccttatgtatactggttaacttggaaggaagaaatatatatatgttttgaaaggctacagcaatgtgaaaggaagaattcagtgaatatatgttgataccttgatattagctgcattgtggctacatgttaactgagtgttcttcac

SEQ ID NO: 3504 - DNA, 769 bp, Macaca Fascicularis
  misc_feature (1)...(769): n = A,T,C or G
cactgctgctggggctggcagagcagttggccgacggcaacaaccgacanctgaacacctacatttccttgcagacaaattgaagaactggtgggatttttttcaagaaaaaaaaattatataataactataatcccttgctcactcctttcccccgccaaataagaaacgcaagccagaccacgatgattgtagaagtccctcccaccctggttctgcacgttacagttagnnnnnnnnnnnnnnnnnnnnntcttctccagcatttctgaggcccacttgaatgcaaaggaaaacactcgcgcagcaaagcaagagaagtcgcagcagcaagacacgcacagtcaaccattttccgagaaagaaagaaaattccccacttggaaagaaagaggaagaacactggattcttacttcctggatcttgacactgggctgcaaaattcacctgcctctctcccacctcccctcaccctcaactctcaatgtcttgctgtcattttctgtctcggctccctcctctcccttctccggccctacacccctcaccctctgtgtctgggtcctgcnnnnnnnnnnnnnnnnnnnnnnncctttgaaatgagaaaaagaaaagaaagcaagaacagaaaacgaagccacaggaagggaagtagacattgtatgtttatggtttctcattatgaaggtgcagcttgtaggaggtttgtacggatgtgcttttaagttatgtatattgcatataacaggaaaaaaatataaaataaac

SEQ ID NO: 3505 - DNA, 111 bp, Macaca Fascicularis
atctatccccaacaaactgggaggagtagtagcactattcctgtcaatcctagtcttagcagccatccccatagttcacaaatccaaacaacaaagtataatattccgccc

SEQ ID NO: 3506 - DNA, 728 bp, Macaca Fascicularis
atgactggtgaatgggagaacaaatgttaatgaggttcaaataaataaaaatttaaatattttagcatttaacccagacaataaggcttccatcacatagtaactgtttattgaaatatttcaagaaaaaggggattatcatttagaagactgattggtcttatttattatgactgaaatgtgcaaacaaaatcattgtttcatgaacagaaaacagcaaagtttttgactatcaatgatgttcgaatagaaaacggatcactaaggagataggagattctgttaccggcagtcttcaaaagcaagttgatggccctggaattaatggagtacagggaattttataatttgatgacttgttgaactacattatagtcaagatttttttccagtcatgagttggaagattctacaatctagtggcattatagaatggattggccacttgtgcatctgaatttgttatgaatgtgtaagaaaaaagtaattgagatgataccttgaaaataaatggaacctcctttgtaacctgactttgtcagtcttcataaagataacattgagttgatgtgtttttaaataaggtgctaagagtaatatgtgtttttctaaaccaatattgtggtatttacatttaaggaattattatagatttatttatctcaagtttccaaatgtgtatacctaaccaagagatctaatcatacacatcttcaaaagctcatttt

SEQ ID NO: 3507 - DNA, 1884 bp, Macaca Fascicularis
tatgctattttcattgtcactgctcagtgatatatctttgcttgcttatcccctgccctaaggaagagattcaggtcttctagttctagaggaattgtctaacttcctagagcatcaggaattgtctgattctctccttgggagcatctgtggtcacagtaatgcatcttcttttcatgctctgatggatctgagcaatccaactttctgggccatgtggtcattcacagcactcttcaggttggcaacaagcccagtactgacctgaaacttctggtggcatatttccaatctgccgagctcctgttagagccctaactgcctctcccagtctattttggtcaataagaacagtttctaacccaatcaggggaagctgcaatggtttttggatagaggtccgtgaagatacctgctctctaaaacagctcacaaatccttccctataaccttctgatgcaagccttttcaaaatgtgcctggcttccacctctttctgtgttgaatgtgcaaaacccactggctcataggcaagaaagaaagcttactcagtaccattttctcctttaaatacagttcacaaaaactgcaccacatacaagcatagtccaagcactttttttcccaaacctaaataaatgcattggtgtattcttaactgaatgatgtacttaagacatgaatgaatatcaccttaacctatttattgaagattttaaaaatatatatcctttgcactatatgctggtgtatgagacctctagatacgaaatatgtgaactaatacatgttcatccctatgcagttaaacagagctttgacctagaggagtacagcctctcacagtctaccctggagcaggtgggtcactcttagtgattctatatcatccatggtatatgtgtataatgtattcacttggagctgcaaagacagtatggcattattcccctctctttatttcttccctccctttcaggttttcctggagctctccaaggagcaggagctgggtgattttgaggaggattttgattcctcggtgaagtggaagctcctccccaaggaagagccttaaaaccccaaattccgtgttcctgtttaaacccgtggtgttcttttttaatacatttatttttatagcatcaatgttctatttttagaaactatactataagtacagaaatggttcttcgtgtggtggaaggaggtatgggtgatgggtaagtgccgtgtcagtgtggacagaggcatttgactaagccaagctcctctcacagcctctgtatctctgcaggccgccctggttccatttttctgtgtgataccgaataaacaaatttacttttatatgatggtataagtttgtagatatgctaaacaaattttgtttaaattttttaaataaaaatcttaaaacatttttttttctaacctagactgagaaattcatgcgtttactcttctgggtgtttgatactttgtaaagttgatattttcctaagaatttaacatgtcatactttttgaaatagatttaagtgtgtttcttattgctaaaaatactaaatgtcatgggtcatagtatcggatatcaatgtagttgataacatttccacagctaacaccatgatgtaggcataaactgaaaaccaaaaacctactatttcaaatatattgtactttttttatttctgtaacccaactgtgtgccattttcgttggacttttaaatgtagatgtctatattgtaactgatcttttgtggatatgtgtcacttggtttcagaaagttcacaaatgtagcaacaggtcacatgactgagtaggtataaaatgtgaaataaacctcatatatgtagttttgaaaaaaaaaaaaaaaaaa

SEQ ID NO: 3508 - DNA, 766 bp, Macaca Fascicularis
  misc_feature (1)...(766): n = A,T,C or G
cnnnnnnnnnnnnnnnnnnntgtgctggctgnnnnggccctcagtgtctccccccaactttcctgtgggtgccctcaggtgaaacagcccctcagacagcccctttggagcaggtttgacatgtcactgagagatgcatatgtgtgtgtgtgcctgtgtgcatgtgtgtgtctatgtgtgtgtttacgtgggtctctgtgtctgtgagtctgtgtgtgtgtgtgtgtgtgtgtgtgtgtgtgtgtgtccattatgtctgtgtgcctggatgtctgtctgtgtggccatatggatgtctatgagccttgtgtgtatctgtgtgtgcctgcgtgtatgtgtctgtgtgtgaacctctgtatatgtccatgtgtctgagtgtatgcatgtgggtgtgtctgtgcctctgtgtgtgtctgtgaacatgggggtggaatggaaggggacagcctcacccgtggggagaaggggatggaagcagctgctctccagggctcctggtannnnnnnnnnnnnnnnnnnnnnnnnnnntgcactccttcctatttaaattctgctttctgccagccagtgtctctccctcgtgttgtctcactgcgtccaatgcttttccttcttagctgttattgtaatgtgtcatttttatttattgggtgatgtgtgtcacccctgctagtctggaagctccatggatacagggagattttatctccagtgcccaacacagtacctggcacagaataaatgctgatagataataaatgaaatg

SEQ ID NO: 3509 - DNA, 3975 bp, Macaca Fascicularis
attaggcggcgcggggcgcccggcatggagctcccggaggcgcggcagggtccggagctcggtggcacggcggcggtggctgccccgatttcctccagctgccactctttgcttcgtgtccccagtccctagacgcctcttcccctcccgtgtccctcttcctatggagtccttacggaccgaacagatgctgagcttgcccgccgaggtcagcagcaacaacttggagccggcggagcgaggggcatcagcggcccaagtagacatgggcccccaccgagaggcggctgcagagagcccggcacctctaccgacgcgggagccagagcaagagcagtctccgggaacctcaacgccggagagcaaagtcctgctcacgcaggcagacgccttggcgtcccgggggagaatccgggaagccctcgaggtgtatagacagctctctgagcggcagcagctggtggctgagcagctggagcagctggtgcgctgcctggcggagaaagtcccgcaaggcgaggcgctggcgccagcgcccccgggcgagggtagcactgcaagcggcgccgtggcggcggaagagactggggccgccgcagccgcggcggccaccgaggtgtgggacggctttaagtgccggaaatgtcatgggtttctatcagaccccgtgtccttgtcgtgtggccacaccttttgtaaactgtgcctggaacgtgggcgggccgccgaccggcgctgtgcgctgtgcggggtcaagctctctgcgttgatggtggccactgggcgggcgcgtggatcccggcgggctgggcagcagccgccgccgccgctgcgagtcaacgtggtgctcagcggcctcctcggcaagttgttcccaggcccggcgcgggcgtcgcaactccggcacgagggcaaccggctgtaccgcgagcgccaggtggaggcggcgctgctcaagtacaacgaggcagttaagttggctccgaatgaccacttgctttatagcaatcggtctcagatttatttcaccttggagtctcatgagaacgcactgcatgatgcagaaatagcatgtaagctccgcccaatgggttttaaggacaatctggagctcccacattgttctagtcaagaggaagcagcagccaggggagatggcagcagtctgatggatccagctaaagtgaagggggatggtcagcagcaccacatgaaagaccaggaagaagaggaggagaagtgggatgctacctctccaaaagctgcttccagcaagactggaaaatgccaggaaaagaaaaggaaacattgccaaattgaatcccaagaagacacagggatgcctaataaagcctccaagcaagatcctcccactgatcagggggacaaacctgctctcagtttaccacttgcatctttcgacgcatctgaccttgaatgcgctctatgtatgagattattctatgagccagtcacaacaccttgtgggcatactttttgcttaaaatgcctagaaagatgcctagatcacaacgccaagtgtccattgtgcaaagacggtctttcacagtgcttggcatcaagaaaatacagcaaaaatgtaataatggaggagctcatagctaaattccttccagaagaactgaaggaacgaaggaagctttacgaagaggaaatggaagaactttctaaccttaataagaatgtgcctattttcgtgtgtactatggcctatcccaccgttccttgtcccctgcacatctttgagccttgttaccgcctgatgattcgtagatgcattgagacaggcacgagacagtttggcatgtgccttggagatcctgtcaaagggtttgcagaatatggctgcatcctagagatcagaaatgttcaattctttgccgatggccgctcagtggttgacagcataggaaagaggcgcttcagggtgctccatcagagccagcgggatggctacaacacagccgacattgaatacattgaagaccaaaaggttcagggagaggattgtgctgagctcatgggattacataactgtgtctatcagcaagcgtcattgtggtttcattcactcaaatcatccctaaagaatcggatactcaatcactttggtcccatgccggagaaagacgctgatcctcagatgaacccgaatggcccagcctggtgctggtggatgttagcggttcttcccttggaaagccgagctcagctccccttcttagcaatgaggtccttaaaggacagactgaatggtattcgacgagtcctggccttcatatcccgaaaccaaaactagtgagtggattgctgaagaggggctcccaccttccccacggtagatagtgccacttatttggttagtttttttgtctgtcatgactgacccagtcttttgcctagtaggttattttttggttattttttgtatgtatgtgtatatgtcttcgtgtgtgtgtgtgtgtatatacacacacacaaggtagcaagcgaacatcatgcctttctgctttgtactgtactactgctgctagcaaataaccagcaaaatgtagaaaataaaaaaccaattttctgtagacaacttggagaaaagagtgcctgcccctgacttagcggggcagagaatgactatttttaaagtttgccttttctgaaggccagctgcttctagcccagtgctgcctaggcagcaaggggcaagccgagtcattgcgcatgtggcgcttccagctcttacctgtggagctgacctgggctcagataatcccctgtgactggccattggagcggtgcagctcctaaggcttgttcacagcatccagaggtctcttacagtaaacagattgcatactgttgacagactgcaatctgtctgtgttccccacaccaactccatttccaagatgggaattttattcagggactcgttccttgagttcccaatatattgactttgcatccattactgctcaccaaggcagaaccataacagtggtgtgtgacaaagatgcaaatggagggcagcccaaacgatggaaaagggaagattttcagcccattcttgaagctgagaaatgaggttttgatttatgatagaagacagttctaaaaagcagctggcagcatgggcttcaatttgtgcccgttctgagttcaaagagaaggaaggaaaaggagccacataaaatgtacacatacaattcatcttagaatgatagctcccaccttattacactgtacaactatttaataatctggattacacacatccagaggtgaaatgaagaaattttcacttacaaaagtgtatttccaaacatgctaagttaacctccagagagaagtgcctgtaatctctgttcctggtgtccctttaaagcttttgcttcatgactctgtagctgttgtttaaaatgtttttgcagcaaacgtgatttaacagaagtttacaaagcaacactgtagctaatgcataattttaaaagtcgattaacatttatctattgttaaagcaacactaataatggaataaaaggaaagttaataggtcaatgtggcaccataggcttattttagataaactagttccatcatcttatgcagttgtaagtaatgccaggattaaaatatcaagcaagccacataaacagtggcaaatgtgtgtgtgttttccatttgtttggtaagcagccattttactcttgcactgtaacgaactgaagggaaatataagataatgctttttttccccccatattgctattcaactacctctatatgctttatttctttttaggattcccttcctccaaatctgtacaaaaacgtttcagctcatctatgttgtaataacaatgtgatacagacagtttgtgtgaaagttgtttgttcattaaaaaaatgtttcctattgcctcaaaaaaaaaaaaaaaaaaaaaaaaaaaaaaaaaa

SEQ ID NO: 3510 - DNA, 2955 bp, Macaca Fascicularis
gagctcaggggactcggccactccatagcagagccctgtttaatacaacttgtgtctgggacagcctgggtcagaggccctatctgaggagcatgttcagaaaccgtgtcgctgggatcagacagccaggtccaaatgcaggcctgtggtgcaggagctgtgtgaccttggggccgtcaccaggcctctctgtgctgggttcctccagtgtagaggagaggcaggcgcagcctgttctcctggggacatggcatgagggccgcgtcctcacagcgcattctgtgttccagcatccccgaccagacccaaggtcttcccgctgagcctcgagggcacccagtcagataacgtggtcgtcgcctgcctggtccagggcttcttcccccaggagccactcaacgtgacctggagcaaaagcggagcgggcgtgaccgtcataaacttcccgcccagccaggacgcctccgggggcctgtacaccacgagcagccagctgaccctgccggccgcacagtgcccagccagggagtccgtgacatgccacgtggagcactacacgaatcccagccaggatgtggccgtgccctgcggttagagggcaggctggggagtggggcggggccaccccagcctgccctgacactgcgcctggacccgtgttccccacagggagccccccttcactcacaccagagtggactgtgggcagagccccaggaggtggtggtagacaggccaggaggggcaaggcgggggcacggggaagggcgtgctgaccagctgaggccatctctccactgcagtttccgaaaccaagccttgcttatgtgacaaaccccgactgtcactgcgccggccggccctcgaggacctgctcctaggttcagaagcgaacctcacgtgcacactgaccggcctgagaaatccctcgggtgccaccttcacctggacgccctcaagtgggaagaacgctgtccaacagtcacctaagcgtgacccctgtggctgctacagtgtgtccagtgtcctgcccggctgtgccgagccatggaacaatagggtgaccttcacctgcactgctgagcaccctgagttggagacccaactaactgccaccatctcaaaacccggtgggtccagaccccgctcggggctctggtttgcaaagcatattcccggcctgcctcctccctcccggtcctgggcttgggtgctcatgccaagtgcagagggaaactgaggcaggctgagggggccaggacacagcccggggtgtccaccagagcggtagaggctctctcatcccctgcccagcccctgacctggctctctacctccaggaaacacattccggcccgaggtccacctgctgccgccgccgtcggaggagctggccctgaacgagctggtgacgctgacgtgcctggcacgcggcttcagccccgaggatgtgctggttcgctggctgaagggaacagaacagctgccccgtgacaagtacctgacttgggaatcccggaaggagcccagccagggcaccaccaccttcgccgtgaccagcatactgcgcgtggcagccgaggactggaagaagggggacaccttctcctgcatggtgggccacgaggccctgccgctggccttcacacagaagaccatcgaccgcctggcgggtaaacccacccacgtcaatgtgtctgtggtcatggcggaagtggacggcacctgctactgagccgcccgcctgtccccacccctgaataaactccatgcttccccaagcagccccacgcttccatccggcgcctctgtccatcctcagggtctcagcacgtgggaaagggccagggcacggagagggaagaacacccctgccctgagcctcgtggggccctggcacccccgtgagcctttccaccctggtgtgagtgtgagttgtgagtgtcagagtgtgtggtgcaggaagcctcgctggtgtgaaatcttaggtctgccgaggcaggcacagcccagggtgggttctgagagacgcacatgccccggagagttctgagtgggcagcggcatggccgtttgtccctgagagagctgcagctgggagggaatagagtgtgagaagagcaggctggccgagaaagaggcaggtagcgggaggagcagcgagggagtgaggggctggactccagggcccccctgggaggacaagctccaggagggccccaccaccctagtaggtgggcctcaggatgtccccactgatgcatccagaaaggggcacctccccttaaccacactgctctgtacggggcacacggacacacgtgcacactcacagccacatatacgcctgagccctgcaggagcagaacgttcacagcccagacccagctccagaaaagccaggggagtcccctcccaagcccccagcgggcattcccaggctcagcctgctgccccaggcccctctggcctccctgtgtttccactatgcacagctcagggaccaactccacagaccccctcccaggcagcccctgctccctgcctggccatcccttcctaagcccaactaggaccgtaagcatagacagggaggggctgcgtggggtagcatcagaagcaggccagtgaaacagggcctgcccagggcccctctgcctgcctctggcttctgcttggggctcccaggagtggaagaactgtgccacaaccactgtggggacacctggcaccaggactcccacaagggggcagtggggcccctgctcttgccttagacatcttccgggcctccccagggccccccgccttctggctgcctctctgctctcagggccaaggtgagatggaggttactgtcacccttgagggtccagtcaccagagggtgagagcaacaggtcacccaaggaagccctgccacagagaagccttccagcccataggacccaggacc

SEQ ID NO: 3511 - DNA, 717 bp, Macaca Fascicularis
  misc_feature (1)...(717): n = A,T,C or G
agaaaattgacacttagagagcnnnnnnnnnnnnnnnnnnnnnnnnnnnnnnnnnnnnnnnnccacaaagtatgaggcagacagatctaagagaagaaagacagctgaggtagattcagattttttctgacatggatggtggctttttactcagaaatatatacctatttccatgagtatttgtggnnnnnnnnnnnnnntggtgagaagagtctggtttctcatctgcnnnnnnnnnnnnnnnnnnnnnnatgttctttgaactgaaccctccttagctctttggaaagagannnnnnnnnnnnnnnnnnnnnnnnnnngcaatattttgtggggtttattagagcccatgcttgcttccagagatgcagttcttttagtgaccagatactgccaaattgatgtgttcttgnnnnnnnngtgagcttttnnnnnnnnnnnnnnnnnaacctaagaagggtctannnnnnnnnnnnnnnnnnnnnnnnnnnnnnnnnnnnnnnnnnnnnnnnnnnnnnnnnnnnnnnnnnngagcccaggagtttgagactagcctgagcaatataatgaaaccctgtcttttcaaaaacatacaannnnnnnnnnnnnnnnnnnnnnnnnnnnnnnnnnnnnnnnnnnnnnnnnnnnnnnnatgggaggattgcttgannnnnnnnnnnncgaggctgcgatgggacatggtcatgccactggatc

SEQ ID NO: 3512 - DNA, 281 bp, Macaca Fascicularis
gcagagtggtgggtgtgtcatggcccataatctgtgtaatcacatcaaggctgacatgttcacacactagggacaggaaatcacataggaattgggaggcgctcaggagactggcgctggtctgaagtcagcatggtggatcagcacccaagatggagttgccactgactggacccacatctccccgggcccaggaggagtttgcagggcagggcctctgattatttttgaaaatctagtttaatttggtcattacattggtgtcaaaaatggaatacatt

SEQ ID NO: 3513 - DNA, 646 bp, Macaca Fascicularis
  misc_feature (1)...(646): n = A,T,C or G
ttttctgcactttttaggtnaatgaaaactttttattatcatttaatccacattgctcagtttaaaccaagtgatacatgtgtataaaacataccaaaatcatgaatatgctgctagctgtaccttaaataaactgatcagttttaaaacctttaatagggttttatatagatttaaaaaatagtaaaataatctgctgtatgtttcagtgttcttggtcttaaattattgcaacactttcagatttgttttaagatcacacagtaacatgttatatttatacatactgctagaaaatatacttttagttttaaaatggaatttttataaatgtactttaattttaaaaatggtgaacttgttaagtttaagtcaaagtacttaaaaagtatgtatattatccatacaaaaagttatgttttacgcttataataagaaatactggtatctcatatcgagatacaattaatttaaaaaaaatcatacatcatttaaaaatattcacacatgaacaggaaagatatcatttctgtgctttaaaaaaccctctattgagcattttcaaatattaattttattttgggggaaaatgcccacaacaataattgcaagatctctctcaatagcttcagcttgctgttggatg

SEQ ID NO: 3514 - DNA, 1594 bp, Macaca Fascicularis
  misc_feature (1)...(1594): n = A,T,C or G
taatttccctaagatcacagttgggctttcctttcacagaactatcaaacagcttctgatatcaaaataactggcaatttgcttttcctagggcagcgctgaatttccttagtagttagttagcttttataagttaataaagtgtgacaatgccatgaatgttggagcagggtcaaagacaggaagccgagtagatgtgtctttcgtggtcccggctctgttttcatggccacacaagtgccgtggcttgcctcgtggatgggagaccctgtgagccagatactgagtcaaaatttgaatttttctaaagttagcacagaggggatttcacaaagtgtaattctcttggaagaagggctgatgtcatttttaaattgtgtgaaattaaatcatgcaaacttaaagctattagaaccttaaattattctgagccttgagaagaatgtggctatgtggtctaagttacgtggcatgcagctgcaacttctgccttttttcctgtaaataattaggaagaccaggtagcaccagaatcagggcccctcagaccattacccctcctcacaaagaaatcatcttctttggaatgtagcaatctgtagtcaatcaaattgctataatatatgctctgatcttgtataaaaaatgttacaatcctgctaaaacttttctgtctctgcctatataagggagacattagcttctccactttatttatttatttatttattttagatacagggtcttgctctgtcaccgaggctggagtgcagtggtgccatcatagctcactgtaaccttgaactcgtgggctcaagtgatcctcctggttcagccccctgagtagctgctgagaccgcaggcacgtgccaccatgcctggctaatttttttttactttttttagtaatggggtctcagtatgttgcccaggctggtctcaaactcttggcctcgagtgatcctcccgccttggcctcccaaagccttgggattacagacatgagccactacgcccagccaacatctctactttaaaatgctgaccctattcatctggagtctgcatttaccgggtggctatcttcaagctttgcactaaactctacactttcatcctattttctgaatttcactatttaatattgactactgtaaaactgaatttcaaattctcctccccactatagggtgatagagctatccagggggaatggctcatctgggggaaaggggaagcctgagaattttcgagcaggatttcccagtcctgaagagggcgctcctggtgagtcctgggatgatttcaaagcagtgactttggcaatcaggtttattggagctttatttatttatttatttatttatttatttatttatctatttatttaatagagcagggctttatttaccccaacagagggctaaagggcatacacttgatgataatagaacggtcattgtttttattccagttttttaaagacagagtctcgctctttcccctaggctggagcgtnnnnnnnnnnnnnnnnnnnnnnnnnnnnnnnnnnnnnnnnnnnagggagccaccatctcaaaaaaaaaaaaaaaaa

SEQ ID NO: 3515 - DNA, 721 bp, Macaca Fascicularis
tcagcaaagatctaatttgaattttcagtaagattaaaagagactatgaaatgggaactttaaaatgagaaaaggttgatttcagatgaaaatgtatccagttttttaatatacagtggaagtgatcaataagcaattaacagattgatatttaaggacaactttacaaattaccagggtaatgaaaaggacataatcaaagataagccccataagaatcaaatagcactgtaagtacagtaaaatgtttcttaattaaaatatggatcatgttgccacaaggttaattacatgaaaggatgaattttgcggaggatgggagccaggtgcacaatatctgaatatatgttatcacagggtttcttggaatctaaggaaaaaagcagagcaccagaaatgcaaaaagtaaattgcccatagctaaagaaacatttgaatagtcagatcattaaaatttatgaaataattatttttcaaaagtcaacgtggctgaaagtgtatttttttcctttctaataagcatattttcctcatattacgcagacttaaaatttaaaaattactttgtaatgttgaaacctatagattatggctcctgtaaaccccaggtcatttttctgccattcttataactctgtctatgatctataaaagtatattctgctttttgttaggccattgatgcttttttcaaccctgtacgttctatgtatataatatt

SEQ ID NO: 3516 - DNA, 736 bp, Macaca Fascicularis
  misc_feature (1)...(736): n = A,T,C or G
ttgctgctatcnncnnnnnnnnnnnnnnnagcaaacatcttgcagtaggcttgggcctgtgctagtcaattacaggacaacacttggtaggtgtgtggcctcgcgcccctttctggtggttctggcagctcctcttcaaggacaagagtagacagaatatgagaaatgtgtctgtgtttctcaggaacagtcattggtgcttagcactagtatgacgaaggctagtgtgcatcactggtctattaataatactttgcaaagcaaaagccataggaagagcttttcagtaaaaggaaccagttcacatgcctnnnnnnnnnnnnnnngccaaccgagagattagaccactcagtattgggatggcataacacaaacttgagatggtttcacctggcttaccctctcttttggtcaacttagtccacttgcccctttacattgggaacaaaagaatcacatcaaagatccctggcccagtagcactggagatatgggatggaaagccagagaacagggcatccacaccattgtgttacagagtcctggccggcgtaccactgagtgggcacagtgaccaggtgtttactggttggctccaaatggaacatctggactctgtgacaatgacctgtggccatggctacccccagggtggccaggacagcgttctctgcattatgcctggacacaggatggaatagttcacaaccggcatagatagtagncaaactaggta

SEQ ID NO: 3517 - DNA, 583 bp, Macaca Fascicularis
gaggaggatacacacgaaaggtggaactggattcaggcatcggtgttctgccactgacacttgggagtgctttccagcttccacatgtggaaacccgaaagcacttgccaaaaattctaaacatagggtctatttctgaagcggaggaattacacggagtgaatagcacgagggaaggggattattattgaggttgaaaggaaagtaccaggaggagactgacttcttacataatccacaaagccaggttttgttgaaaggtgacccgcactcttgtattctcgcaagtacacggcagggtgggcagttccaggcttatagtcattattccctaacactcacgagtcagggtgctcaagactgtactagccctgtagtcaaaaatccaacccccctgaccttcacttcattatctgaccccttagcacggagtctgaaaatggtcttaaatggacaaatatctacaactctggtaaattaacttgagtagcacgggaaataagtatatccgcatagcaggagtgaaaaacttccagttaggaaaggggactcacacccctactgtattctgtagaatctttat

SEQ ID NO: 3518 - DNA, 718 bp, Macaca Fascicularis
ccaggcttttgctatttacaaagtatgctataatgactagtcttgtactacatctttatttttgccagtgttatctctttggcttagactactagaaatggaattgctgggtcaaaaaacacatgcatatgtcattttgtaggacagagtcataatctcctcctgaagaagacagctgctataatggtgcctccagtggttcctacttctgggtaaattgccccttgactgcaatttacagaagtgatggggctggatgcggaggctcatgccggtaatcctagcacttcgggaggccgaggcaggaggatcacttgagcccagcagtctgagactaacctaggcaacacagcgagacctcatctctaccaaaaatcattaaagttagccaggcatggtagcgtgtgcctccggtcccagcgactcaggaggctgaggtaggaggatcgcttgagcccagcagtttgaggctgcagtgagccattctactccactctactccaacctgggcgatagagcacgcccttgtcttaaaaaaaagtgttaggatgtcactttcaagattaagtaccaacggactgtgacttctgttttgctctcacacattatctgtctgagagctgggagcttgtctttaagtagaaacccacccatccccagggagaaggcaggagggaaaatggggagaggtcacaggtaagcccccaattctgttgat

SEQ ID NO: 3519 - DNA, 742 bp, Macaca Fascicularis
  misc_feature (1)...(742): n = A,T,C or G
aacagtaagtnnnnnntaagggcatccagccttgctgagctcacctttttnnngaagagtgggtaagagtgaaatatttaatataaacgtttcaccaagtcccttcaccctaattttgaagctgcatttaacccaactcactaacacagggaatgattgcaccctagtcctatgtgggccaagaaactttcagaagcattaaaaaaatagttgaagtatatcacttctcacgaagtggatagagtcagttggctgtttgtcccttgttttttatttattccataattaatgtttgtgctttttgtttggtaaacagtaatggaacgtacatttttactttgtttagaagacaactttgattcagtctttcaagaactgttccattcttggtttcttcttagggggaaaaaagttaccagttaatttgttttgaggtatttaagcattctttgagttatagaattgtgatgcagggatttgtgaatgagacatttacatgtgaacggtgacttcactagttnnnnnnnnnnnnnnnnnnnagtgtgtatatgtacataaaatgtaagtaatcttaactccattgtgcagtgccttttagatgttccgctttctataaagtcttcaaatttttgcatatatattatatatatgatgtaatgttatagaaatatatgtataatatacatatttttttccnnngggtatctgatagctctgtattttgttatggaagttgaaagaa

SEQ ID NO: 3520 - DNA, 2042 bp, Macaca Fascicularis
atattcactgcatctgatcttgatgtaccacagtgttgggcttatccaacactttttacagatgaacctctacagagcaaaagggaggtgattatttcactagagaatatactcaaaaacatacactggagcaagaataaaggggcactgagaaaaatatcaccaaaattgatttggcattctaaagtggatggcttaattatttttattcattcaatgtttatttgtatggagttctacagattctcaacaattggttttaacaaccatcctagatgtgtataagtttgacagtgtcatgatctcacttttacatatgaagaacttgaaggtcagaaaagttgtctctttattcagatttctgtggcatttaagaggtagaacatggatttgagcctagaagctttaactcgatgccaggggttctttaagggtggttcctggaccagcagcatcaacatcacctgagacatgcaaattctcaggcccctttgctgacctactgactcaaacacatggagacagtccagtcatctgtgtattaacaatcctcctaggggattccgctgcacgtcatgtatgggaaccaccattctacacaatgatgtgtgtataggcactgaactagactcaagtccacagtgtctgctgtcagtgagtttataagctcgtaaagtacacacatgtgcaaacgttccaggcagacagtgaaaccgatgtaggggtaatactaatggagaattttctgattcaaaggagggataaatatcactctggcttgagaatcaagaaaggctgcagaataaggatggttaaaatttggatatttggagataaagtatgacatcaccagccagagggaccatatgaataaatgcagagaagagggaatggtgatgtcacagggcatgcagatcacactggtttggcttcactgagtggagagcagatgtcagaaagctttggatatcagaataagaagaatccattttgttcaactgtcaatgagaagccagggtatatttttgaggaggggagagctatgatcaaggccacaacttaaggacattattctcagaattatattgaatgaattgcattgagaggaattagggatagaagagatcagttaaataatggcaacaatctggacaaaagctgagtccaccatacactggcattgaactggtgggaatgggtatttgagatctgtaatgctcaggtcttggaatgcaaaggatagagaaggattcataagatatttacattgaaacttcagtgactaaggagtgtgagtcgtgccatcagtaaagatagaggaccagttttagagggaagaagagttgagccttgaacacagtaacttgagattctgataggtgtctttgatgaagaagtccagtagggcataagaatgaaaagatggagataggcagagtaatccttcctgaaaagatatttgagatcttctctgtagaagggtgctgcttcccgagaagaggatgtgtacactgttcctctggggagaactcaggagtaaggaaaggggtgtggtgacatagaagaatctgtcttgaagactagcatgaaaataaaaggctgagagatccaagtgggaagggctggctgtcagttctaaatgagggaaagagaatgagtataaggagtggagaagccagcacacaacttcaagagatcaagaggcaagtgagtggttagaagtgcgtgcagaggcataccaagttactttgagaagttctgtggtaatggaaaggagagagagaaattagtaacttcagcgggtggttgagtacagagaagagctattggttgattgtttgggtttcattttattttgttttgttttgtttgtaaggataaaggagactttgagcatttttgtaggcttaagggggtgatgaaagatgagaaatgacagatggggcaagttaccagaagggatacagttgagagtccaaaggaaggattattcttaagaagggagaaaaatacatctctgaagccaaaaaaaaaaaaaaaaa

SEQ ID NO: 3521 - DNA, 709 bp, Macaca Fascicularis
  misc_feature (1)...(709): n = A,T,C or G
ttacaggcatgcaccaccatgcccggntaannntttttgtatttttagtagaaatggagtttcaccatgttggccagactggtcaagaactcctgacctcaagtgatccaccctcctttgcctcccaaagtgctaggattccaggtgtgggccacatgacagtattacctttttgaagaaagaagatcaccagcttcatgccctgaaattttataaatagccatgataaaccaagtgtatgagagcagtattatttaggacatggatattgaattattgggagaggaatatggaagaataatgggttgtttccttttaatgttgtgatgttgctgagggcagatgaaccaagagccaggacacagtccagaagctctgaggtttcttttttcattgtttcttgaaattagagggaatttaagactgacattttattgggggaggtgaggaatgaagaaacacacatccccctctgttccctccattttgtgggacagcctatcatttattatattttattttcaatctttcctggttaaggatttgctattattttttaaaaacaaagttagctttgtaccagtaagtaccatttcctctcagaagcagtggcctagttgtccttgaccagtctgtgcctaggaatgtcttggaatttttgccaggactaacaaaactcagtccttggtttcctctctcaggattaacc

SEQ ID NO: 3522 - DNA, 674 bp, Macaca Fascicularis
gcggcggccctgcgggcgcaccatggacttcaacatgaagaagctggcgtcggacgcgggcatcttcttcacccgggccgtgcagttcacggaggagaagtttggccaggctgagaagactgagcttgatgcccactttgaaaaccttctggcccgggcagacagcaccaagaactggacagagaagatcttgaggcagacagaggtgctgctgcagcccaaccccagtgcccgagtggaggagttcctgtatgagaagctggacaggaaggtcccctcaagggtcaccaacggggagctgctggctcagtacatggcagacgcggccagtgagctggggccgaccaccccctatgggaagacactgatcaaggtggcagaagccgaaaagcaactgggagccgcggagagggattttatccacacggcctccatcagcttcctcacacccttgcgcaacttcctggagggggactggaagaccatctcgaaggagaggcggctcctccaaaaccggcgtctggacttggatgcctgcaaagcgaggctgaagaaggccaaggctgcagaagccaaagccacgacggtgcctgactttcaggagactagacctcgtaattacattctctcagccagcgcctccgcgctctggaatgatgaggtggacaaggccg

SEQ ID NO: 3523 - DNA, 2162 bp, Macaca Fascicularis
aaaatgggccgagatgagcctaaaggttcaggagagcagagaataggcggggccggacggagtagcttgaaggacctaaggaaggggcctcaaggactacaagttccagcgtgctttgctcggtttcggcgggacaaaaacaatcttcgcggcctcgttagcgcattgcatgctgggatgcgtgagctattttcttcggaaggcagcgaactgtattctgggtcttgtagtgtctgccgggtagacgtggatgtaacagtctgttaaccgcgactatctcactcagtatccgtgataagttaaagatgaatcccgaagagagtaagcaccagtctccaaagagaactacatcccttcttcccatcaacaatggctccaaagaaaatgggatccatgaagagcaagaccaagagccacaggatctctttgcagatgccacagtggagctatccttggacaacacacaaaataatcagaagaaggtgccagccaaaacactcatttctcttcctccgcaggaagccccaaattcttcaaagcaccagccaacctatgaggagctagaggaagaagaacaggaggatcaatttgatttgacagtcggtataactgatcctgagaagataggggacggtatgaatgcatatgtagcctacaaagttacaacacagacgagcttaccattgttcagaagcaaacagtttgcagtaaaaagaagatttagtgactttctgggtctttatgagaagctttccgagaagcactctcagaatggcttcattgtcccgcctccaccggagaagagcctcatagggatgacaaaagtgaaagttgggaaggaagattcttcctctgcagaatttcttgaaaaacggagggctgctttagaaaggtaccttcagaggattgtgaatcatcctaccatgttacaggaccctgacgtcagagagttcttggagaaagaagagctgccacgtgccgtgggtacccagacattgagtggtgctggtctcctcaagatgttcaacaaagccacagatgccgtcagcaaaatgaccatcaagatgaatgaatcagacatttggtttgaagagaagctccaggaggtagagtgtgaggagcagcgcttacggaaactgcatgctgttgtagaaactctagtcaaccataggaaagagctagcgccgaacacagcccagtttgcaaagagtctagccatgcttgggagctctgaggacaacacggcattgtcacgggcactctcccagctggctgaggtggaagaaaaaattgagcagctccaccaggaacaggccaacaacgacttcttcctccttgctgagctcctgagtgactacattcgccttctggccatagtccgggctgccttcgaccagcgcatgaagacatggcagcgctggcaggatgcccaagccacactgcagaagaagcgggaggccgaggctcggctgctgtgggccaacaagcctgataagctgcagcaggccaaggacgagatccttgagtgggagtctcgggtgactcaatatgaaagggacttcgagaggatttcaacagtggtccgaaaagaagtgatgcggtttgagaaagagaaatccaaggacttcaagaaccacgtgatcaagtaccttgagacactcctttactcacagcagcagctggcaaagtactgggaagccttccttcctgaggcaaaggccatctcctaatggaccaaggaccccagagcccacctgtgtgacgctgcctttttatacactgtcctcctccaccttgatggacccccggtgatgcatcctgcctaggctggacttaaccccttcctccctgtccccacgaccaactgtccccagttactctaaccgttatttcatttagcttccatatatattttcttacctaagagaatagtttcctgctttaagcaaaagacctacaataggtggtggaattatgggatggggtggagtattgatataaatatataaatacaaatgtatatttttcaggatgtggtgtaggaactgggaataacgttttctgttactcctgatggtgccatgaaaaggttatgtaataaaatattttaaaatcaggaaaaaaaaaaaaaaaaaaaaaaaaaaaaaaaaaaaaaaaaaaaa

SEQ ID NO: 3524 - DNA, 738 bp, Macaca Fascicularis
  misc_feature (1)...(738): n = A,T,C or G
tttttgcggcactattcacaatagtaaaacattttctttttggtgtgagagaccctcccattctttagtaaaaatgtatttacttgcatgttattattgtccttacaaacttgtttttccctagannnnnnnnnnnnnnnnnnnnnnnnnnnnnnnnnnnnnnnnnnnntacaatttaggattcttgtctagaaatcagtatgattcaattctgttcaagccaaacgatatccgtagactctaattgtgtgcatgcaagccttgtgtggagcctcaagtcatctgcgttagtccagcttcctattattggaaatcggctttgcttgattggacctatatcggcaagttaatgtnnnnnnnnnnnnnnnnntttataaatgcatgcaattttacagacgactccttctcaggatannnnnnnnnnnnnnnaaggagtggatttattctgtgtgagccagggaggcaggcatgaagaagnnnnnnnnnnnnnnngcagggaagatcttttgcaacagttgaaaatgccatcacatggctctccacctgcctcttttgaagattgactgtggagaggtggactgtaggtctgaagtggggagataccttgtatttcttccaatttctccttgttcagtggagaataaagaaaatttaaataaagagaagatttctagaccaagtgctaactttagttatctgtgacattgggcttcattttatttactctgtgaatgaagg

SEQ ID NO: 3525 - DNA, 685 bp, Macaca Fascicularis
  misc_feature (1)...(685): n = A,T,C or G
tagtatttgaatattatgggtaatggtttttgcagagtacagtatgcttctactaaattataacagcatatcctcatggtaaccctatttgataggcagaaagcttgtacactgatcctgaaaagtcatctgataattcttgattaagcaaacttcattccctgtgtcccagaagaaggggccagaactattttatttttactcccttcctttcttcccctattccccaggttaggcgagccagaggnnnnnnnnnnnnnnntgtctttcctgtgctctgaagatgccagctacatcactggggagacagtggtggtgggtggaggaaccccatcccgcctctgaggacccggagacagcccacggggcagttttgggctttagctcctggtgctgtttctgcattcataaactggccttttccacctctgctcaccttactgttcacctcacaaaatgaattctgccctgtgacaagatccagccttccctgccgtcaagttggcgtcttactcaggattcctgctgttgctgtgcccttgggtaaaggcctcccctgagaacacaggacaggcctgctaaggctgagtctaccttggcaaagaccaacagatattttttgcccgggccactggggaatttgaggggagatgggagagaaggaagctggagtggaaggagcaga

SEQ ID NO: 3526 - DNA, 707 bp, Macaca Fascicularis
  misc_feature (1)...(707): n = A,T,C or G
ctccttctnnnnntccggcctgnnnnccagagagagtggcagtagccccatggggcctggagctgctgtggcctccactggcatccgtgtttccaaaagtgcctttggcccaggctccatggcgacagttgggcccaaatcagaaaggagagagggggccagtgagggcagggcctcctgtgggctggaaaaccactgggtgcctctcttggcggcgtttgccctgcaggtgaggtgagtgcttgagggaggggagtactttttgccccatgcctccaactaccacatgcgggcctggctctctggtctaggtcctttgggcaagaatgtcggtctactcggcttctatcaccctctggccctgggctcctgtaagcagacaggcagagggcctgcccctcccaccagccaagggtgccaggcctaactggggcactcagggcagtatgttggaaactccattgagggggaaatcaggtgctgcgactgcctgcgccctttcctccctcaagcccacctccatgacctcgagcctgggctctggtccactactgccccagaccaccctcaaagctggtcttcagaaatcaataatatgagtttttattttgtttgttttttttttttgtagtttattttggagtctagtatttcaataatttaagaatcagaagcactgacctttctacattttataacattatttt

SEQ ID NO: 3527 - DNA, 1903 bp, Macaca Fascicularis
tatttttttgaagaaggattagaatgactttctgtggccctagagaggataatgaggaccaatgagaaggcagattttagttaagcataaataactttgtaatgagtaatgaaaaggaatgtgtcatgagatgttagtaaggcccctgcaattggaattgtttatcctaccctctgtgaccatttcaggggaattattttagagaggatttacacattagatggaagaggacctgggaaggggaagacctgatagatgatcactagcctctgttttaactctgagattctgtggttctgtgaaatttccacatttcccttcttcccattatgacaaataaaggaagttctgaataactatgacctgaagaagctctcctggatgctgactgctaattcattcagaattttgtcatttctttgagtgcatgcatgaaagcaaaatttattcagaacagtcactcagcagtaagacaccaagaatgtattaatgaagctacagtaattgaggattttacccaagtgtaactcctagctgtaactcatgcataattcttctgcagtatgaactgtgcctttcttagctagcaaggagtgaccgccttggaagagctgcatgttttaattatgagagaagatgtttcttgtttttatggcccaaacaagggaattgtttgcttctagaaatatgggagagttttgaatgccagagagataaggggaaaataatgttctcctcttcagatattttactctctagctacattgtcttatgcctgtctgctgtttaagtaagaaacaagacatttcgttttttagctattgttcacattaaaatagcaattctttcaataaatacagtaaggagctgcattcattattcccagttatcactttgataccaaaatcttgttcatgaagcaaaatgggagtcatatttatgagcagaaacaggtactagcttgtataatacttgatgttaaatccaagtgtgagattcaaattccatgaccaaattatctgtttatgccagtggcagttaacatggggcagaaacatgattggctggttgaagctcaggcctcatgaataagcctctctagtagtttcaaagtcttaatcctctgagcccgtcatctgacacaaccatggaaccacaaggcttcctgtcctccatttgaatctgtcaaccaactattatttcctgagcaccttctagatatgaattgtgctaggtagatacttagagaggtttaaaaataaagtagacagtttagcaactgccctcacagagctaagtcttctcaatgagagaagatttttggacaaatatataatagaaatatgtgacgagtgtcacagtaagtggcatttcacaataaaagaatcactataggttacagcgagcagtccacgattcatgggtgggtaggatttatactaggctttaatatgcggtttgaacttgcctcaacaatgaggaatgaagaaggcattttaggcagggacagacttggaaataggaatgtataaatcatgcagacgcccataagtgactgaatttcaaaatggctcacgctggaattccccttgagtacaaataattcaacttctgaacaaagatttgggttaattgggaaatagtttgcttcatgaagatagaagacaggggttttcagtggatgtttttgcctttggtaaacttaatgctgagcagtgagtctagctgttaccaaaagtagtatgattggtagtggtggtagcatcatctgctacttcacaggttttgtatatgttaactaatttaatcatccagaaatgtctagaggcaaatactaataccattccagtcttgcaaatgaggaaactgaagctcagaggggtttaaaaaaaaaaaaaaaaaa

SEQ ID NO: 3528 - DNA, 289 bp, Macaca Fascicularis
aggccaagtcatccgggccacccacgccgcgtgccccagaccatccgggcacccgcaggcctgtgccacctcccttggcaccgcagcgtccccagttgcccggccccagtcctgacccagatagcgccctcgatgggcagccccaggccccgggcacaggcgacaggcacccggagcaagagccttccccggggacagccaaggaggaacgcaaggagcccgagaacgcgaggccctggggcggccacccacgccccacaccccacgccccagccacactgcccgcctc

SEQ ID NO: 3529 - DNA, 690 bp, Macaca Fascicularis
  misc_feature (1)...(690): n = A,T,C or G
cgaaatcaatggaattgtgtaatgcattaaaaccagtagaaccaatttaccttcatggaaggggtcaaatatcccgggtgaggattgaaagagaaagaccgattccggtgggacattgcactggggaatgctgcatagtgaaatcttctctcttcctggaaaaccaatacaactgagtctaagtgagcctaaccacacagcactgggttnnnnnnnnnngaagatggctatgagggcagaatagagagagaagggaagtccggaggaggaaggggaagtcagaagcaagctgccagacactgaagcttttgaggaagcacctttgctctttgtcttttatgtccccagcccctcttgtaaagaaaagggcaagcttgtgcttgcctggaaattggaaatccaactgttcttagcatgtgaaggtaacctactgcagaaagttagtgattaaggcaaagagagaaaaccccnnnnnnnnnnnnnnnnnnnnnnnnncttcttcctttttttgacatttgtgttttctaacatatacaaacatagagagggtaatgaaacccatcccccactttacttgttataacaatatggccaatcttgtttgtgtgtatcattttccacttttttctctcctgctgtattattactgaatttcagtgattacataattttctctgtaaaaacatcgat

SEQ ID NO: 3530 - DNA, 752 bp, Macaca Fascicularis
  misc_feature (1)...(752): n = A,T,C or G
tatgtgcaacaattanngtagannnnnnatgnttgagaactaagtaaaatgctttgaaaagnncacataaagcacnnaagcaccaaatgaaaatgattttgtgctttcaaattaattatattaggcttgtaggatgtcttagaataaaatacgattctaagacatcctacaagannnnnnnnnnnnnnnnnnnnnnnnnnnnnnnnnnnnnnnnnnnaggaggaacttggaaatttttatgcagtttggcgaaggaggaacttggaaaannnnnnnnnnnnnnnnnagcactttttgtatgtggactttgtaaagttnnnnnnnnnnnnnnnnnnnnnttgtttatttgtgtaaacctaactagtaaatactgatggtgttcagggccactgacttgcacagcccttggagcactattcgcacagaacacaactcagagtttgttaagaccttaacgcactttgatatctatttcaaaaatacttttgttaccacaagttcattgctgtcatttagacaaaattaatgtactgtgatgttttcctactcttaggatgatgttgcccagcctagtactgtcattttacattgtgagaaattcagttctgatgtctgtgtgtgcaagatattaatgtggtccctgtaagaaatactatagttggtcatgattttctaaggagatgtaatattttctttgacctgttaggaatataacttgtgtcttgatttgttgcacatcatatttttgcaac

SEQ ID NO: 3531 - DNA, 562 bp, Macaca Fascicularis
ttcttataaaatagtgtgaatcgaccttggttctagaaaaatagataaatctattttttcaggaaagagtgtggtatttccagtttgatgtggctgggtggttgagcgagtgaattttcatgaggctgggtgggtttttgcctttttctcttgccctgttcctggtgccttctgatggggctggaatagttgaggtgaacggttctgccttttctgccttctgtttgggacccagctggtgttctttggtttgctttcttcaggctctagggctgtgctatccaatacagtaaccacatgcggctgtttaaagttaagccaattaaaatcacataagattaaaaattccttcctcagttgcactaaccacgtttctagaggcgtcactatatgtggctcatggctactgtattgacagcagagagcatgtccatctattggacagcactgttctagatgttctagagaactgaactggcttaacgagtcacagcctcagctgtgctgggacgacccttgtctccctgggtaggcggagggggaatgggggagggctgatgag

SEQ ID NO: 3532 - DNA, 729 bp, Macaca Fascicularis
  misc_feature (1)...(729): n = A,T,C or G
ccaaacctaaagttgagccccnnnnnnnnnnnnnnnnnnnnnnnngcaaagtcccaggtgtgggccttcacatacacccagcagnnnnnnnnnnnnnnnctgtgcctnnnnnnnnnnaccttgttccctggcgccccagtggttctnnnnnnnnnnnnnnnnnnnnnnnnnnnnnnnnnnnnnnnnnnnnnnggttcccacatcgagcacatagcatcccacctctgcctcgatacnnnnnnnnnnnnnnnnnnnnnnnagaacggcaaggaagtcgtcgtcaacccatgtgagtcttcactnnnnnnnnnnnnntgggacannnnnnnnnnnnnnnnnnnnnnnnnnnnnnnnncaagggccacggggtggtgcttccctggaccagaannnnnnnnnnnnnnnnnnnnnnnnnnnnnnnnnnnncctcggacatcctggactgggaggtggannnnnnnnnnnnnnnnnnnnnnnggagtaactgtctcagggaggacagaggaaaataccacaagccaatggggctcagagacaaatcccacatgnnnnnnnnnnnnnnnnnnnnnnnnnnnnnnnnnnnnnnnnnnnnnnnnnatctggagannnnnnnnnnnnnnnnnnngtttgttgttccttttcttacaaaggaagcaccctctggaggccagannnnnnnnnnnnnnnnnnnnnnnnnnnnnnnntacattgagagacgaagaatggagg

SEQ ID NO: 3533 - DNA, 725 bp, Macaca Fascicularis
  misc_feature (1)...(725): n = A,T,C or G
gtggttcccaaagatggtacccagtcaaaggaagaataggagagggaattctggaaccaaatttctgtctaagaaagaaacaattatctaagaaattgtgaatggaactggactgaaagcggatgagtcagggctcttgaaaaagaaagtggccatccctcttttgagtcagttctgcaagagtggacagaaacttttccagactcccaggcctctctgctccctcagaacttgaaaagattaaagtcatccctcctcaaggtcttcactgaaaccctggaaatctttccttcagttttaagagattccagttcttcccattgtccagcctcagtcactacttgctgtgtagcataggtggcttccctgggggaaagtgtaccagtcccgctcattggtcctctaagaccccccggcattcctcaagacacttctgcctcatgatgtcagaagaagggctgtcaaacagattttaaaaaccccaggctcggccaggcgtggtggctcacatctgtaatcccagcactttgcagggccgaggcgggtggatcacaagggcaannnnnnnnnnnnnnnnnnnnnnnnnnnnnnnnnnnnnnnnnnnnnnnnnnnnnnnnnnnnnnnnnnnnnnnnnnnnnnnnnnnnnnnnnnnnnnnnnnnnnnnnnnnnnnnnnnnnnnnnnnnnnnnnnnnnnnnnnnnnnnnnnnnnnnnnnnnnnnnnnnna

SEQ ID NO: 3534 - DNA, 641 bp, Macaca Fascicularis
aaaaatcgcatgtccaagcccgtttgagtggtttcttttgtttttcattgcagggagtgggtgggagggaggtgggactaggggcactttgggggtctccttttagtcaaaagcgagaaaatgacaagaaagagattaaaattcaatgtttcctttatagtgttaaacactaaaattttaaaaaagatgaaaaagaaaaaaaactttgtaaaatgcgagaacagaagcaaaagacactacgctctgtcattttatctttcttttgttgaaagactaaaaaaaaaactgaaatgttttttagacaatcaaatgttaggtaagtgcaaaaacttgttttttcttactggtgtagaaattaatgcctttttttatttttcagttattttataataacgaaataaaaagaaccccccagctgccaggcgggttttggtgtttgaaatgcggggcaaagcactacatcactgcaaatagatacagagttagtctgcatgtctgtaggctgtgtgattgcggaaaatataaatgctgctaatatatttcctttttacaaaagcatatctaaatagatgattgttttgatgttaatctttgtaaattatgtattaccaattttaacattggatgtaattgcatacaaa

SEQ ID NO: 3535 - DNA, 738 bp, Macaca Fascicularis
  misc_feature (1)...(738): n = A,T,C or G
annnnnnnnnnnnnnnnnnacctcattgtggtagccacctacatcccaggtatcatctttgaccggccactgctctatgtagctgccactgtatgtctgnnnnnnnnnnnnnnnnnnnnnnnnntgcgctacttccgcatcaagcccttgggtcacactctacggagcctcctgtccctttttctggatgaacgagacagtggaccactcattctgacacacatctatctgctcctgggcatgtctcttccnnnnnnnnnnnnnnccagaccctgcacacagaagggtagcctggggggagccagggccctcgtcccctatgctggtgtcctggctgtgggtgtgggtgatactgtggcctccatctttggtagcaccatgggggnnnnnnnnnnnnnnnnnnncaaaaagacttttgaggggaccatgacatctatatttgcacagatcatttctgtnnnnnnnnnnnnnnnntttgacagtggagtggacctnnnnnnnnnnnnnnnnnnnnnnnnnnnnnnnnnnnnnnnnnnnnnnnnnnnnnnnnnnnnnnnnnnnnnnnnnnnnnnnnnnnnnnnnnnnntctacctcctgannnnnnnnnnnnnnnnnnnnnnnnnnnnnnnnnnnnnnnnnnnaggaaacagacatggggagggcgaacagtccccacagcagacagctacttgggcatgaagagccacggtgtgaaaagcagatttgatttttcagttg

SEQ ID NO: 3536 - DNA, 731 bp, Macaca Fascicularis
  misc_feature (1)...(731): n = A,T,C or G
ttcacacttctatatatgatgnnnncacggagggcactcctgttttttaaaacatttgaaannnnnnnnnnnnnnnnnnnnnnnnnnnnnnntnnnnnnnnnnnnnnnnnnnnnnnnnnttcatttgtgcctgtctgtccaaccccgtcccccatgtttctctgcctgctgggctcttaactattgcccgaagactgtgacatcagaagtaactcccactcctaatcaagagtctctccagcctcacagnnnnnnnnctcttggcgcctgcctagctcttgggcctgacctccagtcctgctggcctgctcttacttcccccaccctgggtttggcccctggaacctttccctcgtgtgtaccacaccctgcnnnnnnnnnnnnnnnnnntggaggcggtcgggggtggggggagaaggcctcccctnnnnnnnnnnngtcccccggggctggtgggttgggcagaatcctgggccctcagcgacctttgctcacacacactccttccccctgtccctggggcactcccccaggattgtgcaatagtcagagtgtccctctttgcaggggactgggccatgggtcctcggcccatctgtccatcctcctctccatgcaagtgctgtttgggcaggagtcaccatgcaagggtgacatcgacaaccatgtaccaagccaccgcagctgctgccactctgccgcctgtacagaagaaaatgaatctttttcat

SEQ ID NO: 3537 - DNA, 1904 bp, Macaca Fascicularis
  misc_feature (1)...(1904): n = A,T,C or G
accagaacgtgagtttatatttcaaaataagttgccgtatttctcttgtcccttttaatagtttggaaagggccatattcagtcacgttaagttttggattaaaaaggctctatcatacatcttgtgcgtgaatgagttcatgccctgaagatgagtatttccaaaattaaaagacagaacgtatattgactttggcagcagccttggatctttgatccctaccagggagttttagtgtgctggggggcatgtttggttgttgtcactattggaggatgttgctggcttaagcaggcaagcaccatgaatggtgaatgacttgtgatgtgttgaacagaattaacctgcgtgccatatgctatgaatgttcttccagacatttatatgtgggaaacatctgtgtatggtcttctgcatatgtaatttaattctgttttaatacttgcattatagttgagcatcctattaccaaagacagtcgtgctccaagcccagaatcagagtgaggtgggctaccaagttacagggcaaagggcatggatacaatcgcacaactgatggcaatactaattatattttagtcatcaataaagtatatctgtattggtctatattagtagctgtggtaagcaaataatgttattactgtttatagatatgcatagagaccatactttttgcagagtatatcattagtttctacagatgtagtttacaaatttcttgactattactttagtgtttatagacttctacagtgtgtttggtggagcagatatgtacattattaagttacagaacataatatgccagatgctagtaaaatattttgcattggagcactttgtttttatttgctgaagtaatttttgtcatttttttcagaaccaaaatatttcacaaaaagtttccatgtatttcttttgtaatgctttcttttgtatcagttactttaaaaacaaaacaaaacaaaaacctgtagtgatcttggcactgtagctccnnnnnnnnnnnnnnnnnnnnnnnnnnnnnnnnnnnnnnnnnnnnnnnnnnnnnnnnnnnnnnnnnnnnnnnnnnnnnnnnnnnnnnnnnnnnnnnnnnnnnnnnnnnnnnnnnnnnnnnnnnnnnnnnnnnnnnnnnnnnnnnnnnnnnnnnnnnnnnnnnnnnnnnnnnnnnnnnnnnnnnnnctggagttcaaagctgcagtgagtcatgatcgtatgactgactgtacaccagcctgggtgaccaagagagatactgtctcaaaaaaaaataaattctgtagtgattttctgtatgtcctcatttgtgatgtcatgggcaaatcatggttttccagttaaaggaaggtagattaacttctgattataaagttaatggaaggtggactggtgaacgctgctacggatagataattcaatagaaaagaaaatgtagaaataattttattttgaaatatgtatagtttatgttttctagtagtaagttaaccttcctaattatgtttgaagactaaaagtaaaaacattactactggccaagtgtggtggctcacgcttgtaatcccagcagtttgagaggctgaggcgaacggatcagttgaggccaggtgttcaagaccagcctggctaacatggcaagactctgtctctactaaaaatatatatgtatttaaaaacaatagccaggcttggtggtgtgcacctgtaatcccaggtacttgggaggctgaggtgggagactcacttgaacctgggaggtggaggttacagtgagattgtgccactgcactcccatcctgggcaacagagcgagactgtctctaaaaaaaaaaaaaaaaaaaaaaaaaaaaaaaaaaaaaaaaaaaaaaaaaaaaaaaaaaaaaaaaaaaaaaaaaaaa

SEQ ID NO: 3538 - DNA, 610 bp, Macaca Fascicularis
  misc_feature (1)...(610): n = A,T,C or G
ttacccctataaagtaccaagaatcagtttagactaaaataaaaattaaagcctaatccttaagagagagagagaaaaaaagtaaataaataaaaaaaaagtccaatcaaaaatgtattcaagaacaattcgaagaagcagtctacccaaatgagaaggaattagaaaagtaattctggtaatatgacgaaaacagggctctataacacccccaaagatcacagtagctccctagcaatggttccaaacctagaagaaatctctgaattgccatataaataattctgaaggctgattattaagctactcaaggagataccagagaaaggtgaaaagcaacttaaatttaaaaaacagagccaggtgtgnnnnnnnnnnnnnnnnnnnnnnnnnnnnnnnnnnnnnnnnnnnnnnnnnnnnnnnnnnnnnnnnnnnnnnnnnnnnnnnnnnnnnnnnnnnnnnnnnnnnnnnnnnnnnnnnnnnnnnnnnnnnnnnnnnnnnnnnnnnnnnnnnnnnnnnnnnnnnnnnnnnnnnnnnnnnnnnnnnnnnnnnnnnnnnnnnnnnnnnnnnnnnnnnnnnnnnnnnnnnnnnnnnnnnnnnnnnnnnnnnn

SEQ ID NO: 3539 - DNA, 643 bp, Macaca Fascicularis
  misc_feature (1)...(643): n = A,T,C or G
ctggaacggagccnnnaagttgagcnnnnnnnnnnnnnnnnnnnnnnnnnnnnnnnnnnnnnnnnnnnnnnnnnnnnnnnnnnnnnnnnncacatggagagcttggtcctggctgagcaggcacccagccccatgttccccnnnnnnnnnnnnnnnnnnnnaggagactnnnnnnnnnnnnnnnattcacctgaagcacnnnnnnnnnnnnnnnnnnnnnnnntgtggcaagttcgatcaaattgaccacttttcatgagacaccnnnnnnnnntaaaaaactaccgggatgtgttgagggggcagtttgccatgctctgttctatctgctgctatctctgggggccgcataatgtccacacacatcatggaggggagaaaggcatcagtaccaaacggagtaacctcttttttctacaatgtccatacccaacatgtgaggctatattatcaacaggtggtgagaaaaattctgtttttattcgctttctggtaacttctgtaggccctggctcaaggacttagcatttcgtctcatgtacatctttttcttaagtgnnnnnnnnnnnnnnnnnaattgtccttggtttttccttagctcataggtcatagatgcagaaatatagtatttaaggcatccgca

SEQ ID NO: 3540 - DNA, 759 bp, Macaca Fascicularis
  misc_feature (1)...(759): n = A,T,C or G
agagccagaggnnnnnnnnnnnnnnnnnnnnngagcctgtccatccaccaggggtggggngatgctcccatccaggcctggaggacctgctgctccctgttgctcctggggacggagcaaggccaaggctgcgggaggctgggagccccgccctgcccatccctcccgcactgtccctgcagactttggttcggtgccccagccaagatgaggaaggggcccagtgaagacaggcctgggggctgccccagcaggctctgggtatgacctgcctctggcctgggtcctgggtggggcctgtggctggagtagtgcccccaggccctgccctgggtgaccagacggggaggaaacctgactggacctgggcaggcaggatgtgttggccacagagagaggcggaccagcacccggtaggacctcctaggactgggccttcttccagggggccnnnnnnnnnnnnnnggggtgtcgggcagaatgtgacatgtggcctcaccatggacttgaatgggacttggctggcctcaggatcttgtgcctggaaatagcctgaggtggctcaggaggcagagaaagggcgccagaccattctctggcggggaccagggcccaaggccccagggctggaaggagaccaaggggcagccgccctggnnnnnnnnnnnnnnnnnnncttccacccaacttcccgtgcggttccacgttttcccaccagcctgtcggttgctgccccagcattcggtacctgcttcttca

SEQ ID NO: 3541 - DNA, 691 bp, Macaca Fascicularis
  misc_feature (1)...(691): n = A,T,C or G
gctgaggacttgttgcaggagggtaaactaggtgaataaattacctgtgaatgaacaatgaagtcgttcctcttaagactgaaacaagcaggccgggtgtggtggctcatgcctgtgatcccagcactttgggaggcggaggcggctggatcacgaggttaggagttgaagaccagcctggccagcgtannnnnnnnnnnnnnnnnnnnnnnnnnnnnnnnnnnnnnnnnnnnnnnnnnnnnnnnnnnnnnnnnnnnnnnnnnnnnnnnnnnnnnnnnnnnnnnnnnnnnnnnnnnnnnnnnnnnnnnnnnnnnnnnnnnnnnnnnnnnnnnnnnnnnnnnnnnnnnnnnnnnnnnnnnnnnnnnnnncaagagagaaaaaaaaagactgaaacaagcttttgctaagatggaaagcactgcttccaacagatgtggtttgttgctttagttgttgaagcaaaaatactgacttatgtttttgttatcaccccaccactacctccatggttgttcatttaggatgcttctgattcagccactgtaaaccattataaaggttttattgccatgttgaaaatgtttataatatggcaaaaaggggcataacataaaagatttactattattacagccatgtaaagatatgtgcacatatggatgtgggttgaaagtggatgatgagaaaaaaa

SEQ ID NO: 3542 - DNA, 1081 bp, Macaca Fascicularis
  misc_feature (1)...(1081): n = A,T,C or G
cctttgcaactgcataagttagttcaaggaaacaattaatttgcatttctaaaatttaaaaaatccccaataacttctgacaaaactcacagatggcttattattgctagcaatgtcaatactggatgcaaatcatgctcaaaagctgtgtgaatagccaaaagtgctaagcacattctgtcagtgctcataattcaaggaaaacattagcaaaattcaaagagaaaaacttgaaaaatattaagaacagctttctacaataaagtatttgaaaaaagcaacacactggaaaaatgccatcagatgttagtatacagtttagccaaatgtgtaattaaatacagcatgttacatcattaagtagaagcttttaaacaattatacatagtgcattttatcacagtatagattaatggttctgctggttgcaaaccatattctatataataagacaacttttggaaaatttattaatccaagcaataaatcattatcagtgaagtgtcaaccatttcacacaatgtatttaagttttagttccttaaatactaaacataagacttacaggaaaatgggtttttgttgatctgaggaactcaaacataccaaccttactcatcagtgctgaagaaaaatagctttaatgtgagatagctgtatgatggtacagatagggccagtatatgcaatgaagaaagttcagggtttcaccaaaattttagcaaaatttcagggtttaaaaatctagaatattatcgcagaagtcacatgactatctcacatttactcttcctcgtgtcctgatcctgctgacttgtccacatggnnnnnnnnnnnnnnnnnnnnnnnnnnnnnnnnnnnnnnnnnnnnnnnnnnnnnnnnnnnnnnnnnnnnnnnnnnnnnnnnnnnnnnnnnnnnnnnnnnnnnnnnnnnnnnnnnnagcaacatgaactgggaggctcagagaggggagatttccttagtcactgacttactgagggactgactgactcaagattcccaggcactagacaaaagtagtnnnnnaaggaatcatttcctgattgcctgttggggaaaa

SEQ ID NO: 3543 - DNA, 767 bp, Macaca Fascicularis
  misc_feature (1)...(767): n = A,T,C or G
agtagaccaaggagttatcgaagnnntcgggaaagtgacaaagagccatgcacgcgattctgttccatgccaacactcattcatttaaggaatgtattcaagctggaggcttccatatcattcacgcttcttggcnnnnnnnnnnnnnnnnnnnnnnnnnnnnnnnnnnnnnnnnnnnnnnnnnnnnccttcctggtctaacactctgtgtatgatctaggatttggaacgtggtatgagatcctacaatggaagaataaaattacctcattcttcannnnnnnnctgaatgttagcagtcatctagattttttttttttttttaaacaaaattaagtgtgcttagannnnnnnnnnnnnnnnnnnnnnnnnnnnnnnnnnnnaggtttgtcagnnnnnnnnnnnnnnnntgggtataaactnnnnnnnnnnnnnnnnnnnnnnnntttagctgagcacagtggtgtgcatctgtagtcccagctactcgggaggctgaggcagnnnnnnnnnnnnnnnnnnnnnnnnnnnnnnnnnnctaagcaacagagcaaaaccccgtctctaaaatacaaataaaatatttgtgtagtttttgattaaaattgactacagcggtcagtataaaatatatgtcgcttttaannnnnnnnnnnnnnnntatctaacagatggaagtttttgtattggtaagagcatttatatatgctttgtttcagggtttatcgatttgtattcatatattgtcaaataggtttcatactcta

SEQ ID NO: 3544 - DNA, 856 bp, Macaca Fascicularis
  misc_feature (1)...(856): n = A,T,C or G
tagcttgtggatcagttgtacacccacacttnnnnnnnnnnnnnnnnnnnnnnnnnnnnnnnnaagtagtatgcctatatatgtgtgtttttcttaacacaggtccatgaaagtttggcttcgtagtttgatgtctgttgtatggcctagaaaccagggggcaacaactactgagatggtttctgtattcagtgaaaaattctatttcattgagacaattttttctttatccacagtaattttttaaaactgtcatcgtgaaactacccttaaaaaaataagattgcctgcaaaaaaagaaatgagctatggaataggaacagttatgtgatgattctggaactttaacttagagcttcattactttaagaagggaaacaacctctgagtttgattttccaaagtttcataaagcccctaagctcatgattttcatcaactctttgcccacatagtcatttacctccagagccatttgttgtcatagaaggggtggtggtgtttggatttgatttttttcaacttgcagtgagaaataggataggtgacaaaaccttattgttttcttaagacaattcagtgcttgagcatctctgtcagaaatggaatgaaatactgttagccaattagaattattttatgtattgttattgtgttttgctgatttttatatgaaaatataattattcattcttgnnnnnnnnnnnnnnnnnntattatgaggatcattttantttggaaacactttcataataaagataagtattaagagtgcagtgtaagtgccctttactgtaaatgctaaccatctcatgtgggtaaaacatcacatctcactggatgaggtcaataaggg

SEQ ID NO: 3545 - DNA, 742 bp, Macaca Fascicularis
  misc_feature (1)...(742): n = A,T,C or G
gacacgtgagacatgagaaagactgacgacagcagtaagcaaaggnnctgaagatatccagaagaaggggcagaggaaggcagtggcgaagcctccaagtatacagaagaggatccttcaggagaaacannnnnnnnnnnnnnnaagtccagctggttaacgacatctaagcctagtgctctagctcaagagacctctcttggtgcccctgagcctttgtctggtgaacagttggttggttctccccaggcggcagaggctacgaatgactatgagactcttgtaaagcgtggaaaagaactaaaagagtgtggaaaaatccaggaggccctaaactgcttagttaaagcgcttgacataaaaagtgcagatcctgaagttatgctcttgactttaagtttgtataagcaacttaataacaattgagaatgtaacctgtttattgtattttaaagtgaaactgaatatgagggaatttttgtttccataattggattctttgggaacatgaagcattcaggcttaaggcaagaaagatctcaaaaagcaacttctgccctgcaacaccccccactccatagtctggtattctgagcactagcttaatatttcttcacttgaatattcttatattttaggcatattctgtaaatttaactgttgtttcttggaaagttttgtaaaattattctggtcattcttaattttactctnnnnnnnnnnnnnttgtatataacagtca

SEQ ID NO: 3546 - DNA, 466 bp, Macaca Fascicularis
ccctccctccctccctcccccctccctccctccctcccccttccttccttccttccgtccttccttggtgtattttattcaagatgacttggacccattgccagtgagtctgagtgtcactgacagccctgtgttgtgctcaggactcactctgctgctggtggaaacgcatggcttctctctctctctgatcccaggaagctatgagggggacgggagagggcagtgcaatgggagctaaagagatattttccagtaggaaaagcaatgctttcttgtcttctttagactcaaatgcttagggaacgtttcatttctcattcatgggggaaggcagcctccttaaatgttttctgaagagcagtaaaatctagaagcttaagaatttacagttccttcaataaccatgatgacctgaagttcacctattccattttagcatctacttgttcttcccatctcttcc

SEQ ID NO: 3547 - DNA, 746 bp, Macaca Fascicularis
  misc_feature (1)...(746): n = A,T,C or G
agttctgtatagctcgtaatgatggtatttttatagcagccttttaacagaactaatttggtgtatatgaatctttctcgaagatctggtcaaaactgtattcagttttctgactagaatgatcagattgaaggtggttggtttttattattgatattatttagtgtgattggtaatatctagaatggcaggcggtgcatacaagttaaagaggggggaaaggtaaacaccattcagtgtattcggtagactgtgctatttctgtttatcctttgggttttggtttttgttnnnnnnnnnnnnnnnnnnctgcaattgatctcataacgtatgttattaataaatctcgtcccataatttatactgaaattaccttaggatatttttgcataatgctctcttactgcttacattctatacatttttcatgtgataattgtctttgcgtaactgggaaaaatgccgtatgacttcattatctggaaaaattaaatttgttcgtttatattttctacttactaaattgagtttttaaaaagacttagtgtgacattatacagtgtctttcaaacgaacaagtttatagttattttcctgtttcgacactattagacgtcttataaattatgctaattagcacggcagtcttgttacacactcttaacattgccaaagaactgttgattgtttgagaaaaccctgggactgtgtgtgtgtaggttttgttttgatttaacaaccaaaaa

SEQ ID NO: 3548 - DNA, 730 bp, Macaca Fascicularis
  misc_feature (1)...(730): n = A,T,C or G
aaacttgagaatcactgcccctgggaattgattaaannnnnnnnnnnnnnnnnnnnnnccaacgttttnnnnnnnnnnnnnnnntggaaaacaaaacccaatgtaatcacttcactcctgnnnnnnnnnnnnnnnnnnnnnnnnnnnnnnnnnnnnnnnnnnnnnnnnnnnnnnnnnagcagggtgggccaagccctgatgctgagtgctcagtgcctctgaatgcagaggctccaggggaggcttctggggcgtcgggtggatnnnnnnnnnnnnnnnnnnnnnnnnnnnnnnnnnnnncagcatccaccacactaatccatttccactaaactctcgatgatactgctctgtgagtcttctggaaataatacaggaaaacaagactttggcaaaagtaaattatagctatacttcaccaatttgccggttcggttccannnnnnnnnnnnnnnnnnnnnnnnnnnnnnnnnnnnnnnnnnnntttttgctttcccagcacatatgaaggttatgtttacactatactgtatgtattaagtattcaatagcattatgtgtaaaaaaaaagtgcataccttaactttaaaatactttgttgcaaaaaatgctgacatggacacacaaaaggagcacatgctattagaaaaatggtgccagtagacttggtcgagnnnnnnnnnnnnnnntgaaagacacaatatctgtgctctgcaataaagcangacac

SEQ ID NO: 3549 - DNA, 801 bp, Macaca Fascicularis
  misc_feature (1)...(801): n = A,T,C or G
ttcaaggtaggaaaaagaattantttttaggatacaaaaattcagttacacaatcagtagcattcaaaattagttatgagtatacatttacaaaaaaggattcatgtttcaacaaagtgttttaaaagctcaaacattttaaaacaggcacaatattctaaaggcatataaattcaccatgggcttttgaatgtcctcactcccaacttcataatcaaaatttacagaagcagcaaaagatcagagttcagagggctatttttttccctttccttatttaaggttgcaaacacattgacaaaggcaaaataaacacctttcatagcagaaagaccaaaaaattgaatgtaannnnnnnnnnnnnnnnnnnnnnnnnnncaaatacaaggttcatttgtacctagaacaaggctcataacttnnnnnnnnnnnnnnnnnnnnnnnnnnnnnnnnnncattcacccaaataccagctgcaatttgttctttaaggatgcttcacaaggatattatgtccnnnnnnnnnnnnnnnnnnnnnnnnnnnnnnnnnnnnnnnnntttgtggctatttattaaatgtagtcgcattactttgttgtgaatatgtaccatcatttgctacaatgctatgaactgacctttaattttactttttttagcaaattattccaaatcctgaataacctttcattttaaacagcaaagtttctcctgtccagtggactcatggttacagatcatcctgtctacagaaantcattttgtacatttctaagcccattatcagntnatctactcctg

SEQ ID NO: 3550 - DNA, 846 bp, Macaca Fascicularis
  misc_feature (1)...(846): n = A,T,C or G
tgtnnnnggcactaaaaatnnnnnnnnnnnnnnnnnatttctcagacacatgaaatgtgatgacacatccatcaacaagtcaaacactcctttgaaattttctaccttatgtcaaatatttctttcttttaaaggcattcctatcctggtataaaacccaacataaaataattttagggaatttaaggaattcaaatttcacttcatggagtacttggctttatttcttcactgaacttctagtaatgttcttcacctgatcttgtctgcagtgtttagacaagagtccagatcatttgcaactcaaaagcaggtacaaaatgttatccatcttaaaaacccctcacannnnnnnnnnnnnnnnnnnnnnnnnnnnnnnnnnnntccattaacacttgtgaacacatcctggtgaaaatattgtctatgaacaattataccaaaaaaatcaatttttataatgcaaataatattttacatgcaccaagaggattcataatattaaagtatttcttttataaaaggaaggttttnnnnnnnnnnnnnnnnnttccttcaatgttaatatattgcaaacttggatttggtgtaaatcaagccctaagaatactgctctgaatttctagcttaatttctgagcgacattctaaagcagttcattaatttatttcaaaaacatttcttggacacttcggtgtaggagatatatattgcatggtccttaacctaaaaaattcagttaataaatctttgtttaaaaaaactaaagcaaatatttttatttcgtttatttactatctttttacatatgtatttaaattagtggtgtgacttgcatgagtccat

SEQ ID NO: 3551 - DNA, 754 bp, Macaca Fascicularis
  misc_feature (1)...(754): n = A,T,C or G
cctattttcaaagggtaatcataagatgttaacccttggtatttagaaaattaaaaccttataatatttttctatcaagatgtatatnnnnnnnnnnnnnnnnnnnnnnnnnnnngcaaaaggtaaagattttattttgatatnnnnnnnnnnnnccaggtaagaagatatctgcatgggtggaaactgggttcnnnnnnnnnnnnnnnnnnnnnnnnnnnatatctcagctgtggggttaaagttttcccggtatagagagactgacactaggaacactgtattggtttattcaggtcattgagatcttctagatgtatttttnnnnnnnnnnnnnnnngttatgtgttgctaccacagttaacactccataatgttcatgtcagccaaagaggactaatcaaagctgaaatctcaaagaacaatttgctttactaagctaagtaaacttgagagcggaacttctaacaatgcctcactatagtgtggttggttgnnnnnnnnnnnnnnnactatgactttaaaacatgtttataccatttttaatttttatcagacagtagnnnnnnnnngaaatgtaatgttccatatgaaattccttttacgagtttgttcattaataacatttagtaatttaaatcagcgttcgagtttgtnnnnnnnnnnnnnnnnnnnnnntttctctgagtaattctgatttgtgaatgatcnnnnnnnnaaccctgagatttnnaaacctgattaagtcaatatg

SEQ ID NO: 3552 - DNA, 725 bp, Macaca Fascicularis
  misc_feature (1)...(725): n = A,T,C or G
aannnnnnnnnntccagctacatgctagcaagggtacaaagcccgcagtggcagacaggaggcgggtcccagctcannnnnnnnnnnnnnnnnnnnnnnnnnnnnnnnnngacacccattctctgggtctccgtttctgtatctgggggcagatggcaggatgggattcagtctggaatccatgggtggtcacttccccttggtgggacggtgcaggggtctgcctcctacagagagtggctggggagcttctgcgttcctgacatctcatcacggtttttcccctcctcaggtgctgtgtctctgtgaatgatctcccctttccctcccccattcacctgtctggggctataatagaaattaaaatcctgtacaaagtgcagaggacagaatgttacaactggacagaccctcggaaaccagttaattattccctgtgtttcacagacaagtcccagggcacggatgtgacccattatgaacaggcagtgagtctgtggcagggctggagctgccctgggctctggcattatccccgagggctggagctcagtcctcaccacaggcttttctggatcccacgtccgcaggcaggtgcatctgatgaagctgtcggccacagtgagtcatggcatagccaacgggtgacgcagcacgaggcaccccccgcccccctccactgtctcttgtgagcagagttaatccccaagctggtgtttctggcg

SEQ ID NO: 3553 - DNA, 3056 bp, Macaca Fascicularis
ttttctgtctcgccactggaaggaagagagagtatggctgaactggacacctccttcagagaaggcaaggaagggaggaggagagaggaaggcggggcagcctcaagcctcactcagcactgagcccaatgctggctgatgagctaaaaatataacgacaggtggcaagtagatttcaatacctgattgattgatagctgttgcctagaaggaaggctgtgtggaaaaggattttcaggttgcacccgggctcagtgggaaagaaggctgcggttgattgggactgctctcatgaaagggaccaaggaagatgaggaggatggtggaatgagtggagtagaccagctttgcctgctgtcctctgtggactcaaggtagaggccagagggcaatggggttggggaatggtggagagggggtgtgcatggcccacctaacttgccaagaactctctgctctctgcagagaagtagaaagtggggaacagagaatggagaataagctggaaaaacagctcctttctttaccttcatgtaccctgtaccttaccttaagctttctcttctgcccaaaagctgtgagtgaccttctttgcctgaccccttagcgttcactcctgcctctccccttcttctgtggcactggccttgccatctggatggtgcaggagcctgctctccctgaccttcccttctcagctccttcctggaacaccaagcttagtaatgtacctcccttgtttccaccagcaatctcccccacagtgatgttgcagaggagtggagtggggatgggattgggggaggagggtcgcctggacctcagcctgaaatagcaagttcaagggctcacagcccctgtgagctgccccagccgcattctgaaacccacttaatcccagcctcttgctgggtggaggggctctgctgcagctttgccctggcctcaccattgaccccttgctacgaaactgtttatctgcctttctcctctttgcctcggcacattttggcagcccaattagtgccttgcagatagtttcttgagtctgagcaatcctcctacccaacctttcccctgccgacttccctttcctgcccttgtagggagatgtttgacaagctcttttccatttcatcttcaagcaggctgacacgctcagaagctctgctgctggcttccaaatgaaaagcgggttaatgaaggcgtattttccagcttgtttttaaaagggaaaacaaaagagagagaataggtatcctagttaatggttcctaattgcttcttttccgaaaagtcttcagcgtaaaacagcctaattgagaacttcctaatcttgtgttggagaggaagcaaggctgtgccttgcaccttgtaactcccactcatccttcagaccccgctggctgccatctcctcacaggaaccttcccttccccttagacgaagtcaggtgattatactggacactgtgtggcgcagcctagaacattctgagggacagaagtgtgtattctgccagctgctggaagggttgtctgcagacagccctcacctgtcagccctcttcaggagttgtccttattgaaggaccaccttgtccgaggtcatccttctttcctggggcagcttgcatccaatgattggcctatgcaaggacatgaaggcctggaccactcatttcagcttggcacgactctgaaatgctattccggcttgtggtggcatcagctgaggctgttaatgagactgcatctcagcccaacttctccctctgcccattctagcttccttccttcacactcatctccaactcagggtctgctccctgaggaacctgacctgtaacagtaatcctccttggcattgtcgtacatccttcctaatcctcctcatcagtgtgcagtcatatgttgggtgcccaaaaaggcattttaggaggggcgtaatgcaatgaggccatttatgtctttcaatttagcagagatagatggatttgatctttgcagacttctcatgccctattaattcctacaaaccatgatctacctgtctacctacctatctattgtcatctgtctacctatcatctgtctgtctacccatgcatccatccatccatccatcccttcctccctccatccatcatacacctatctgtactagaagctgtaggtgccccaccaagactccctttactggctgatgaccccatgtcccagctgctgtaactattggtgcataacagttcacaggtgcacccttttctggatcgccgtccttggccaaatgggagctgcttccccatggagactgtgctctcacctctccttccccagtggcagacctcagctgatgactgacgagcatggggtaaaagggcaattctcttgcttcaaggtgagacaagctctgagggatttgcactgcagcgctacctgcccatgagatcagattggagctagttgtcagccaagggcacattcctcattagcttttcttttagtgctgttttgcttctaatatggtttggctgtgtccccacccaaatctcatcttgaattttagctcccataattcccatgtgttgtggaagggaccctgtgggagataactgaatcgtgggggtggttttcccccatactgttctcgtggtagtgaacaggtctcatgagagatgatggttttatcaagggaaacccccttcacttggctcttattctctccttgcctgctacagcgtaagacgtggctctgctcctcctcgtcttctgccaagattgtgaggcctccccagccacgtgaactgtgagtccattaaacctctttttctttataaactatgcagtatcaagtatgtctttatcagcaacgtgagaacagactcatacagcttccctcaacccccttcttcaagtataccaccctaaaaaaaagctttaacaagggtcctcatatcaggctctgttttttgaggagcctgacctgagacatttggtattgagcatggtcctaaaaagcaaacaaacaaaacagaacaaaaaaaaaaaaaaaaa

SEQ ID NO: 3554 - DNA, 747 bp, Macaca Fascicularis
  misc_feature (1)...(747): n = A,T,C or G
gaatagaacttggaaaaccaagcattttgnnttnnttccagtcctctgggcatcattcctatttcttctgccatgtcaaggagaaattccaagcctgcattctgttatgctaaaataacaagcccatacttcccgatgaccttctgttgaacgtacctgagcctgcaaatgtaaaaatgattgtatctgaatttgcactaatggtgtctgagagcaaaaagagtgtgacctctattggaaacctttgttcagattcaataattcagagatgctacatacttctgcaagcttcctgattatgttcactgtaatattaatgacctaagtttgaatgcatttccttacagtccattaatttgacatccatnntttacctggggattatgacgattgcaataattcattaatgttttcttcacacagcttcttaaaccaagtttttctgcaactctttcagttctgcttacagtgtgtgggaaatctgatttttttttccccctagtaatagtttgataagaaatttagtgtattgactgcctcagtgacacaattcatctttaaaggtgtggaagctggtggggaccaaatgttacctgtgttttcgctgttgattgctattttcagaagtgaaccatgtttttcacttacagtaggagtcaacaaatttgggattttagaagggggagaagggaactatttgtgtaatactgctgtcatatttgactacatattaaaaacaataaatga

SEQ ID NO: 3555 - DNA, 1722 bp, Macaca Fascicularis
gataactaaagtagatgggaaagaaattaccagttgggtgtgacttgctggtaggcatttttaaaaagtcaaatttggggtgcattttgagaaatggaaggaggtagggaatgtgtatttgggaaagagggtgctgtgaagacacaggataacagcagggtttggagagaatttaggatactgattttaaatatagagattagggtagattatgttggagaagaaaaaagcgcaaagagtctttcacagtcagtgggagtttatctgagccctgaactagaaaagctattttccccggagaccccaaatgggagctctaactgtagcttgattcagattgggtcagaagggtggaaataggtagacaagtcaaagtagacagggatctaggagactatggtagtaataatgtcattcctggaataaattgttgaaggctttaaacctgaagcaagccagctaggtaacttttatactcttctctcacttccgaatgttctttgccttcaaatgctattgaactgtaatagagtttcattatgaacttgaaccttatgtatgctaataaagtgtgttgagctgcagaggtgggagttggggggaagggcatagagacttggctctttgtaaaaggtctccacccttgtgtacttgtagatacctgagagtgagtgttatttttatttttatgttttttttaatcatcacagaactctttgaaagggactttataaaaatacaccctagaatttcaccaggcagaaatttcaggtccaatgtaggtgggcccacttcctcccatgcaactcaactcttcacaccatagttcctcacttctctaggggaagtctccataccttactccattgctcatcacatcttagcctctggctttctcactgtacttactaaaacatctttcgaagacttactattcttatcctcagcagagcttccagttccagcatgagccccagcatagtaccttcatgctgtacttcattgactgatcttcattcactactccattggattttttggttagaggcagtagaatccacctctgcctaacttaagcgggaggtaatttattggaaaggaattagaatctcacagaactgatggaattctagagaaccaaccttgggaacaggtcagtggaaactaaggcaactcttgggggctaggaagcagaattgcagaagtggtctgatcaacagattaccactgggatgattgaacccagtctgttctttcatcctcgaatagtacttgcccaagatttaagagtcctggagaaagcatctagtcggtgaaacctaggtcatgcttgatgtaccagtggtgagagtagggatttatagtatttacaagaacctccaggaatccctttggcatccattagtgggagggtagtcatatggagttacattctcgctgggattatacaaggacaggtaattttccagcaggaaattaggatgggggagagatggatgctaagcagccaaaatgaaatacctcctccagaccccttgtcaacattaaataattttatgactctttacattctagtagtttacttatatgagacaaataatgacagtttatttcgtgcttttctcagtagaatttatattgtgtctgatattggccctttacctgctgctcctttaattatgtcaacagtcttgtaatacaggcagtgaaaaaaaaaaaaaa

SEQ ID NO: 3556 - DNA, 727 bp, Macaca Fascicularis
  misc_feature (1)...(727): n = A,T,C or G
cccaactagattgtgagcttctagaagacaaggctatgtctttgattgctgtctcccctaccaaaacccagtacttnnnnnnnnnnnnnnnnnnnnnnnnnnnnnnnnnnnnnnntttcctctagtccactagctttgggttcaggctttgggnnnnaattgtactctggattttgaaaaannnnnnnnnnnnnnnnnnnnnnnnnnnnnnnncatatgaggtagtagcnnnnnnnnnnnnnnnnnnnnnnnnnnnnnnnnnnnnnnnnnnnnnnnnnnnngaaggcaaaatagcagactcagagggcaaataaattttggtattacttgattacgcagagttatacaggnnnnnnnnnnnnnnnnnnnnnnnnnnnnnnnnnnnnnnnnnnnnnnattgagaaactcaaagaggaaaccatagaatgaggcctttgccatacctatctgatcatgaatttcttttcccccacaggccttctcctgtgtcaatgtccaatgaagcatgatttgggaaacnnnnnnnnnnnnnnnnnnnnnnnnnnctatcttctggagatcttttcctcttttcactcatctactttccccaaccagccatctgcctaagaaaggtccccacctgatttttgtttagcctatcctgcagctgtggactatctctattacattggaattctttactagcttgtcctgtatttaaaaaaatnnnnnnnnnnnnnnnnng

SEQ ID NO: 3557 - DNA, 701 bp, Macaca Fascicularis
  misc_feature (1)...(701): n = A,T,C or G
ccatccttagtatatattgctactcattcaagaatcctcagtattgagtacttaccatatgttaggatactgtgggctctggagagaggagggggcatagagccaggaattaaggatcacttgagtaaaatgtgtgatatttattcaataactgactaggaaggactaaaagccagaaaggggatgaaaaaaaaatccttaattcagggccaacattatctacttaaacaactttgagatatagtcttaactattttaaagcagaataatataattgaaagtttattgctaaaagagactatataggtcatttcgtataattcttccttagtttcagaaccacaaaattttaaataaataagctatgaatgttgatgtacactataaatctccttaattctataaatttgtgtctgtaacctgaatagtttgaaaacttcttttaaaatcttttgtatctcagccgggcacagtggctcacacctgcaatcccagcattttgggaggccgaggtgggcggatcacgaggtcaggagtttgnnnnnnnnnnnnnnnnnnnnnnnnnnnnnnnnnnnnnnnnnnnnnnnnnnnnnnnnnnnnnnnnnnnnnnnnnnnnnnnnnnnnnnnnnnnnnnnnnnnnnnnnnnnnnnnnnnnnnnnnnnnnnnnnnnnnnnnnnnnnnnnnnnnnnnnnnnnnnnnnn

SEQ ID NO: 3558 - DNA, 1150 bp, Macaca Fascicularis
  misc_feature (1)...(1150): n = A,T,C or G
aaattgtgcattattgcagaatgtgaagaattgaaaggaaggagatgactggggaatattcccaaaagatggctctggcgacagtcatccagatttccctgaggatgcagatgtagatttaaaagacgtagataaaattttattaataacagaagacttaaaaaatattggannnnnnnnnnnnnnnnnnnnnnnnnnnnnnatggccattaaaaaatatgcaaaagttttaagatacgtggnnnnnnnnnnnnnnnnnnnnnnnnnnnnnnnnnnnnnnnnnnnnnnnnnnnnnnnnntaagctgtgtactgaatattggtgcttgtaaactgaagatgtcaaattggcagggagcaattgacagttgtttggaggctcttgaaatagacccatcaaatacnnnnnnnnnnnnnnnnagagctcaaggatggcaaggattaaaagaatatgatcaagcattggctgatcttaagaaannnnnnnnnnnnnnnnnnnnnnnnnnnnnnnnnnnnnnnnnnnnnnnnnnngtcaaacaaaagataaaggcacagaaagataaagagaaggcagtatatgcaaaaatgtttgcttagaaaggattcagttttgcttattgtgtgttgattgtgtaaatgcaataagaaaatgtaaaggtttttgtctattaatatgatccctaatgtgtttcttttgacaccttagttcctcattgtttacagtttaggagtactgataggggtccatgnnnnnnnnnnnnnnnacaatacagtcaataaagtggttttgtttgnnnnnnnnnnnnnnnnnnnnnnnnnnnnnnnnnnnnnnnnnnnnnnnnnnnnnnnnnnnnnnnnnnnnnnnnnnnnnnnnnnnnnnnnnnnnnnnnnnnnnnnnnnnnnnnnnnnnnnnnnnnnnnnnnnnnnnnnnnnnnnnnnnnnnnnnnnnnnnnnnnnnnnnnnnnnnnnnnnnnnnnnnnnnnacattggtcacgtcacgctggtcttgaactcctgacctcgtgatctgcccctgccttggcctcccaaagtgctgggattacaggtgtgagcccctgtgcccgaccaagtaaaatgttttttaaaatggttatctgcattattcataaaggataatggtgtccagtcttt

SEQ ID NO: 3559 - DNA, 701 bp, Macaca Fascicularis
  misc_feature (1)...(701): n = A,T,C or G
cctgccttgcacctcagttgctgtgtccaaccccacaccaccnntacctttcctctaccacccttgtcaccatcctgccccaggacctttgcacttgctgtgttctccaccctgaacatcatcactccctgcctcagggcctcctcttgtcctcttgctgaggcacacgctgcgggaagaacatgtcgggcagaaagaatagcccaagcaaaagccctgtcttgaccagatgtggttggtggtgcctgcctgtgatctaggccctttggcaggctgaggtgagaggatcacttgagcccaggattcccaggctacagcgagctacgatcacaataccgcactccagcctgggcaacacagcaagaaagaccctgtctcaaaaaaacaaaaagaacaaaagccctattttggggtgtgacagaatgccatactctggtggcttagaaacagcacttattggctgggcacagtggcacaaacctgtaatcccagcactatgggaggccaaggcgggtggatcgtctgaggacaggagttcgagaccagcctgactcatatggtgaaaccccatctctactaaatacaaaaaaattagccagacatggtggcgcacgcctgtaatcccagctacgcaggaggctgaggcaggagaatcacttgaatccggaaggcgaaggttgcagtgagccaacatcgtgcca

SEQ ID NO: 3560 - DNA, 635 bp, Macaca Fascicularis
attgagtaaagttatacctcagtttcttggttgatactgtcatatgataaaattaatcaatggataaattgctgtgtatgtgtgtgataaagatacttgccttaaaatagaacacttctgtcttgcaaacagtttatggtcaaattgcgttttcagttactgctctttctgtgcacctggtgaatgcaagtctgataaagtccctggatgtaagaaagaagatgaaatgtcttttcattgttaattatctgcacctggattaaaaagtgttttcaacatgtaaagattttatggaaaaaattaatacgtgtgtgttgtttgacttttactgctaaagacagcaagtgattgaacacgataaaatatgtattggttttaaccactatttttattgaccctatcctcaatgacagtagttatttaattgtgtgtcagttttagtattttcattgtatatacataactactgttaactgtcatccttaatggccattgtatatgtcatggaaggatcgagatgtactgtatcaaccaatgggaaagataatgtggatagaaaagattgtattatcatttgggatttacggtaataattatattgtttggtagctgttttaggaatgatggtttaaatg

SEQ ID NO: 3561 - DNA, 742 bp, Macaca Fascicularis
  misc_feature (1)...(742): n = A,T,C or G
aaggttttgggccatccagactaaaatcatttctcannnnnnnnnnnnnnnnnctccaacttgtcttaagtgtatttgcctctgtgcaaggtatnnnnnnnnnnnnnnnnnnnnnnnnnnnnnnnnnnnnnnnnnnnnnnnnnnnnnnnnnnnnnnnnnnnnnnnnnnnnnnnnnnnnnnnnnnnnnnnnnnnnnnnnnnnnnnnnnngtttattttccatatttctcttttttatttctgctcctcctttcatnnnnnnnnnnnnnnnnnnnnnnnnnnnnnnnnnnnnnnnnttaattaaagcattaattttcttttttggtgtatttctatccctagcnnnnnnnnnnnnnnnnnnnnnnnnnnnnnnnnntgtttttaatnnnnnnngtggttttctttggtgttatctgttccattttctttttcgtacattgaggtgtgtctccttttcaaccaaatgaaatagtggnnnnnnnnnnnnnnnnnnnnnnnnnnaattggcaaattaatttaccaatatnnnnnnnnnnnnnnnnnnnnnnnnnaccctttttgagaaggtatgatgagaatggnnnnnnnnnnnnnnnnnnnnnnnnnnnaataattgttttcagttttggttcnnnnnnnnnnnnnnnnnnnnnnnnnnnngatgttacctagagctgtatttatctgtttttatttatactagtgtagtaannnnnnnnnnnnnnnncagtaaaaatgattact

SEQ ID NO: 3562 - DNA, 738 bp, Macaca Fascicularis
agaaacaaacaaaagaacacaaaaatgcaaacacacggtagggaattactgctgcttattctcaacagtgccacagaaccagtgttagagtgctggtaccatacacagcatggggcatccaggctggagtggtccagttttttttgttggtggtggcagtgttttttctttccttttgttttgtaattttctgttcattttttctctcttttttccccccactcattaagaaaagaaccctactgaaaccctaggtgacaaaaggtgtgctttctgttgccacatttgacccaccacaggactcactggactggacttctatttatattgtattaagtaactgatatatatatatattttttttttgattgacaccaaaaaattaccttggcacaaatgccaaacctgtgaaggtcagaggcccgctgcttctcccaggagggagggaactttttggttgtctgtggtaattcctctgtacagattgtaactttttaaaaattcccttcgaccccgtcacttgaatatatgttcatagtaatttgtaagatacttcttttccttattttggttgcaaagacccttccgaacacattcctgtataaagtattttgcactatttaaagaaacccatacggatgaagtcaggttgtgcaatatgatggcgtcacaatgctcatcgttgtacttgtcatgtaattaatcagtttaaatgtactattttaaatatgtaaaata

SEQ ID NO: 3563 - DNA, 745 bp, Macaca Fascicularis
  misc_feature (1)...(745): n = A,T,C or G
gatcatgnatccagcagcagcgacgaggagggcagcgcccagagcannnactgtgacctggcactgggctatgtggcggccgggcacacggagctgacctggacccaggaggtcccggtcagctcggggccactcctgtcccccgtgcccaagctgtgccgtattaaggcctccaaggccctgaagaagaagatccgtaggttccagccgacggccctgaaggtcatgaccatggtgtgaggcgcagtgactgcatcaggagaagcctgctgcacaccggagcccttttcccgcagcgtcctgtgcatgtctgggtttcagtgtcatctcgccaagccgctttatcttccgaggccaccatttgacaggagtcccctcctgttacatgctctgcccgtggagtacgccgtgagtccccgccccagcaaagaccttccgtgcagagatatggtttcagatgccagcagcctccccggccgacctagagtatattttcaaagtaagcacaggacaatgattcccggcaggcatcttgtttccaccttgtcatcctaacaaggccttcccctgccctcactcccctctggctggggacgcgtttcccaatcctttgaccattcctccccaaaggnnnnnnnnnnnnnnnnnnnnnggactccgtgctggaaattgaattggagtttaaactccacgttacgctnnnnnnnnnnnnngacacccaaattatgccannnctcaaaaaaag

SEQ ID NO: 3564 - DNA, 732 bp, Macaca Fascicularis
  misc_feature (1)...(732): n = A,T,C or G
gaggccgctgnccnagnnnnnttnnntccgatgacagtgctctaggctgccctgggtccccagctcnnnnggactcaccctcttaccatctgctgccccgcttccccacagaactgcttgctagccctgcggagccggcacctacatccccaggtctctccactgctctcagcctcccaaccccagggcccccacaggccccccgcagcaccctgcagagtacacaggtacagcaacaggagnatcagagacaggcagcctagcaggcacaggacacctggcctcctccaggagcctaccccatgagagaaagcaacagagacccnnnnnnnnnnnnnnnnnnnnnnnnnnnnnnnnnnnnnngtctcagggttcagaccctgaagattccagaggctgcaaaatttccacctgaaccagaggccatagattcaaaatgctccaagtggtgggaatcagatctgtgttgttgtcatataattaagggaatcccttgtacctgtggctgcctgcatctattctttgtacnnnnnnnnnnnnnnnnnnnnnnnctctgcctctctagcttttatgctctaggttagagatgggctgaactgagcctagctaccttctctatccatctcccccatcccccactgccacaccctccccattcatggaccaagaatgacctggtttgtcaaannnnnnnnnnnnnnnnnnnnnnnnctcttttaaggaaatggagct

SEQ ID NO: 3565 - DNA, 712 bp, Macaca Fascicularis
  misc_feature (1)...(712): n = A,T,C or G
gagntncccagcccctctcctccttttttttagatgagatttagcacactctcagttatttaaacatgcaacatttcttgagtatgtatgttgaggccatctgagctcatagctgannnnnnnnnnnnnnnnnnnnnnnnnnnnnnnnnnnnnnnacttaatactgcnnnnnnnnnnnnnnnnnngaaaaatgtatccatgtnnnnnnnnnnnnnnnnnnnnnnnnnnnnntttttnnnnnnnnnnnnnnntaacatttctgagttttgttttgttttacagaaaaaaaaaaaagtgataaagcaatcagaagaccaagaggtttactattgatgcttagggtcgtctgaccttggctggccaatagacgtacacggccaaattaatttacaagagtaataatttttcaaaagccaatttttttttctgtattttctgtatgaaactgccaatatnnnnnnnnnnnnnnnnnnnnnnnnnnnnnnnnnnnnnnnnnnnnnnnnnnnnnnnnnnnnnnnnntaaggaaacaatgtggaggcaggcgcgatcagccgaactctagggacttgatggtgttgcttggaaggcatccatacctgcattttgcattcttcatatgtaatcatattgccaaagacaaactatttcatcatttattgtaaataacacttttccccagacctaccataacgtnnngttctatctacttta

SEQ ID NO: 3566 - DNA, 710 bp, Macaca Fascicularis
  misc_feature (1)...(710): n = A,T,C or G
catgnnnnnnnnnnnnnnnnnnnnnnnnnnnnnnnnnnnnnnnnnnnnnnnnnnnnnnnnnnnnnnnnnnnnnnnnnnnnnnnnnnnnnnnnnnnnnnnnnnnnnnnnnnnnnnnnnnnnnnnnnnnnnnnnnnnnnnnnnnnnnnnactggtctgaactcttgatggctcccccttacttccttttccatcctcacctcctaaactgtcctccttcactgtgtctcttctcagtcaaggctgccaccttctaccaagttgcacagtccccagacctgagtcgtcttgattcttgtctgccttaggtcagaaaatgtcctcaccctgcaaattcctgtctacacagaacctgtgaatgtgaccttcgcaggtctgtgtagggcttggaaatggggtctttgtggatataaacaagttactgccctggaaatttaatcaagttaagatgaggtcataccacattaggactggtgtccttataagaagagggacacagccgaacacacaggtgaggatggccaggtgactggagtgatgtatccacaagccaaggacaccgagggcttctggcagctactagaggcggggaagctttcttcctgagagcctttagagggagcgtggcccagctgacaccttgatttttgcgtatctaacttccagaactgtgagagaatgaatttctgttgttctcagccacccagttgcag

SEQ ID NO: 3567 - DNA, 711 bp, Macaca Fascicularis
  misc_feature (1)...(711): n = A,T,C or G
agcccannnnnnnnnnnnnnnnnnnnnnnnctgggagggtccccagaagagagaggtactggtagactannnnnnnnnnnnnnnncttgacccagaagctgtggggcccttgaccctggttccatggcatctgggtaccagcagcaagagcccgagccccaggctgcacgttggctcacagccaaggagaaagccggctgcttcccccccactgtgtgcatccttcccccgctctcatcatgctccctgtctgggctctgaaatgagccaactgtagctgctttgggggtgacatgctccttctccagctcagctgggccccgggcatcccctgccctgccctgagacccaaaggggggttggcatctgctgtgacaccnnnnnnnnnnnnnnnnnnnnnnnnnnnaggatgctgagcggggagaacctggaccccaactctatggtaagcaaggtcggagaagggggagcatcatttgcaagaacttcaggtctcatccttggctggagatgaggatccannnnnnnnnnnnnnnnnnnnnnnnnnnnnnnnnngctcgctacacacggatgcttctccccacccgtgctgactctcagaggctgctaaggcagaatttataggaaattgttttcaagccaccagagacctgtttgtacaactggaacggttgtatttatttaatgtacctcaaggtgttttaataatga

SEQ ID NO: 3568 - DNA, 732 bp, Macaca Fascicularis
  misc_feature (1)...(732): n = A,T,C or G
atcccccaaagaaggtaaggggagcagnnttnnnnnnnctnnctgtgaagaacaccaagaggagggtggagggcaccaagaaagccaaggcagacagccccgtgaacggcttgccgaaggggcgagagagtcgaagtcggagccggagccgtgagcagagctactcaaggtccccatcccgatcagcgtctcctaagaggaggaaaagtgacagcggctccacgtctggcgggtccaagtcgcagagccgctcccggagccggagtgactccccaccgagacaggccccccgcagtgctccctacaaaggctctgagattcggggctcccggaaatccaaggacnnnnnnnnnnnnnagaagccacacaagtctcggagccggagttcatcccgttcccgaagcaggtcacgggagcgggtggataatccaggaaaatacaagaagaaaagnnnnnnnnnnnnnnnnnnnnnnnnngagcgctcgaggtcatacgaacgcacaggccgnnnnnnnnnnnnnnnnnnccctgggcacagcaggcatcggagtgctgagtgcaggccaccagctcctaaatagaggtnnnnnnnnnnnnnnnatgacatggtgaataaacacagctctctccactcaggacatctggagcgttgtggacgtggtaggtggtcgttcnnnnnnnnnnnnnnnnngtccggcgtgtgcacagccggcgtgcccactctcgggctcc

SEQ ID NO: 3569 - DNA, 360 bp, Macaca Fascicularis
  misc_feature (1)...(360): n = A,T,C or G
cccgccgaaggnnnntgactcnnnnnnnnnnnnnnntgcttggtcttgcgaagtgtgaagtgcgaagtgtgaagtgtgaagtgcgaagtgtgaagtgcctcctggctcctcctgcccaaagacttgggtttgtcctttggctgcagagtctccctgtgcttccttccaacctgttcccattgactccaannnnnnnnnnnnnnnnnnnnnnnnnnnnnnnnnnnnnnnnnnnnnnnnnnnnnnnnnnnnnnnnnnnnnnnnnnnnnnnnnnnnnnnnnnnnnnnnnnnnnnnnnnnnnnnnnnnnnnnnnnnnnnnnnnnnnnncctgannnnnnnnnnnnnnnnnnnnnnnnnnntggc

SEQ ID NO: 3570 - DNA, 1910 bp, Macaca Fascicularis
aaataaaacaagataatgtctttggagagaatctactgttgttgctttagatagggttgtcagagaaagctgtacaggggtagggacatttgagctgaagtctaaatgactttaaagaggttacagtgtggtctggggagagcatgtcaaattaaaatacactaagatgaaaagaccatggagagggaagaatggcaggatccagggaaaggtagggaggggccaggtcactcaggaccttctgtgctgtggtaaagataattcagaaccattacttcactgcctgtaatatttctaaggggataagaacttccccatccccttccccctgattgggtgtagaaatggcgaaaggccatatagacacaagcagactcatgcaactaccactgctctgtgagctcaggaagacactacctcattcattatcacatccctgaacccctagaatacctaacataggtaagcaattaacaagtatactggataaactgagctgggttgtatcaaaacatggtcatggcccacctgcatcaaagtcatctagggatgattatttaaaatggagattccaaggcctcacttgcaggcttatgaatttggaatttctgagagtagagttgttaacatgcatttccaacaaattctaaggcacaggaaatttgagacttggcctcatttttacttctcacaagaagttcgtactacattataaaaatcttaaaggcaaacatgtttaggctaatatgtgtgtatattcatgagagactcctgctgacagctgcatgtgtttacactattttatatactggatcttaataagattacataagtgtttcaattttttacatacttgcaatttatctttattaatgcaagcaaaatgagtgaaattgggaaattaattatattttgacttttgttccatttggtttatttgattttattatcaaaaagtaaacagcagcttggctgagggagacgtgatgagaagcacccctctgggctattcataccatcaaacctctgaaatccaagagctgaggactgaaatttttgcataaaagcatagcaatataaagcatgccatgctttaaaagctcatgttgcctgcataaaccaacttttttaaaagaagaagcctcagataaaacaatgacttgagattcagggtaaactaattctggccaggttctttccaaatagtggcaaaagtatagattcctcactcactgattcatattttagaaagaggaaagaatatatagaatatttaaatgggccttgggacctgtccttagacccaccattatttcttccataatatagagcagaggcaaagaatcagcactaaaccattccacaaggttcaggggtgagtattattccagctccaggtacatcgtgtttttgaaaatccctcatacactgtagacatgacaattgcttaaagtagcatttccagggatggaaatgacaaaccttcagccagaaagaggaatgagacttgagaactattttgctggatgcatattccaattcaaacagccaaagaggagaacaggagggtggggattcctccatctcacctttagagtttttgttttgtttgcttctttctgataattccttcttccacagtcttctcaaagctgcattgtgttattatcagtttgttcttgctgctgtttgacctgtttcctaacaaaatatagttgtttctacttgtggcagggaaaagagaaaaggcacttttgttgttttaagcatttatttaaaatatctcttaaaatcttgttccctcacacccaaataaaatgttgcagtaagacattgtataagatagcaaaagagtgatatttgttgcttaggcccttagctcaagaaatagggctgctattctttgtttc

SEQ ID NO: 3571 - DNA, 773 bp, Macaca Fascicularis
  misc_feature (1)...(773): n = A,T,C or G
agaaacaagtagaagagaatgcagagggttgaaacctacccaaaatatcagtcagagannnngagcttcaaagacctccccttgtttcccccaatgtaatttatatagggctggacccttagtccnnnnnnnnnnnnnnnnntctcctccacataagcctgccttggctgggaaaaaaatagcattcaaagggcactgggaacaattttaaatggtgcatctaannnnnnnnnnnnnnnggtcctcttggagttggattaaaattgttaacactttcacattcaagnnnnnnnnnnnnnnactacagaccctattatctgttcttctgaattagcattaaaacaaatagcacaatataactagaaatgagtattctatagatgtataacataggtttttcttattgaatggtgctacttattttaacaaccaggctgccttaaatatgatggagnnnnnnnnnnnnnnnnnnnctatacaagctttctctttagggcaccaggggaaagtgaaaaaagaaccacatttgaattctgctttgtcactacaannnnnnnnnnnnnnnnnnnnnactaacctcagtgaacctgttcctaacctgaaaaggaggagaatggagagcaggtaataataccttatgagatggttgtgagagttaaatagcattctttatgtcatagtcctnnnnnnnnnnnnnnnnggaatagatgctccctaaatgttaactacctaccttcccttccctttctgtcagactttttctactattctta

SEQ ID NO: 3572 - DNA, 729 bp, Macaca Fascicularis
acaggcgtgagccactgtgcccagcctcaagtaggtttttaatgattttcttatacttttaaaatacaacattgtggcaataaaagactattccacttcttttctaatctggagaattgtgttgatttttctagtataattttctggctcatatctccagtacaatggtgaatagtggtgaaagtagaaattcttgtcctgttttcaaacttgcatataaggcccccagtcattcaccattaagtatattagcttttggtgtggggttttccatcttggctcactgcagcctcaacctcttaagctcaagtgatattcccaccttaactgcctgagtagttgggacaacaggcatgcaccaccatgtccagataatttttttttttaatattttgtaaagatggggtctccctatattgtccagaatggttcttgaactcctgagtttatgcagtctttccacctcagcttcccaaaattctgggttacaggtgtgagccactgcacctggccgattttgggttttcatagaggccttttagcaggtctcaaaagttttcttctaatagttttcttgatgttctgtcattcacaggtgttgaatttatcaagctttttctatttaaattattacatttttactttgttcaagtaatattgtatcatattaaaccaacattgcattgtgaaaataccctgcttagtcatggtatgtaatcactcttatac

SEQ ID NO: 3573 - DNA, 759 bp, Macaca Fascicularis
  misc_feature (1)...(759): n = A,T,C or G
gccctcgatataattatttnnnnnnagctggatgtgaaaagctgaagcagtgaaaacctgcagtcctatttaattggtttccttctgtttcttgtccatcacttctgtatccacagggagctatctnnnnnnnnnnnnnnnnnnnnnnnnnnnnnntcttcaaatttttaatatgaatannnnnnnnnnnnnnnnnnnattaacatannnnnnnnnnnnnnnnnnnnnnnnnnnnnnnnnnnncagttgagcttaatttcatatttaacttttgcatttgacttgtataatacactactgctgagaaaaacaattatgaatgccttctgcatgttgtacattatttnnnnnnnnnnnnnnnnnnnnnnnnnnntacaaaggggtatagagttagaatggatgnnnnnnnnnnnnnnnntgttgtgtttnnnnnnnnnnnnnnnnnnnnnnnnnnnnnnnnnnnnnnnnaaatatttcactcagtgaaataatgggccaatctggaatagagacattttcttnnnnnnnnnnnnnnnnnnnaacnnnnnnnnnnnnnnnnnnnnnnnnnnnnnnnnnnnnnnnnnnnnnnnnnnnnnnnnnnnnnnnnnnnnnnnnnnnnnnnnnnnnnnnnnnnnnnttggcnnnnnnnnnnnnnnngtaaatctgcannnnnnnnnnnnnnnnnnnnnnnnnnnnnnnnnnnnncttttggtaaacttnnnnnnnnnnnnnnnnnccttttnntaaaataaagatcca

SEQ ID NO: 3574 - DNA, 1749 bp, Macaca Fascicularis
tactgattaagaagtcctgcttcagatcacttgggagctcaggttattgtcatatttaccatcccagggcaactggaagacccacaaagatcctcacaggggaatattgagcttcttttctcagggtcccatagctttgttagaagaaacttgctactattttgatgagataactgaggcacctgcagtttaagtaatctgcacaatgaaacagacatagtctgttctggagcaaggattaaagtaagctgctgattcctgcgttgcacacttacccactgtatcacacagaagtctgagagggagaaaagccaaatgtcctaggagtgtaatgatgaatgaaaaagaagacatttaattccagaagggatggttgacaggatcagataccatggagggatcagaatttatgattggtgaatatgcctgttaacaaatcacctatgattaatacatatggaggcatatcttccccttatcatgaaaagctctggaaattaaattttcaacatttaagtggagaaaggagtcataaatcaaggccaacattttcaatcacaaaagaattcatcttgagattcaatcaaacacaaaattccaaagggaaggaagaattgttggaactagctagaaaaatcattctcagatgtaagagaaaattgggtctcaaaaccctgggctctgggaagcatgtgcatcttcctgctgcatggattgaagtaatatatctggctcaatgcaaaggggaaatccaagatgaagctttaaatatgctttatgcatctctggaccatgcttcctttgattatgatcatctgcctgccttattttttgttgcggaatcgattttatacagactctgttgtgatgcatccctcaaaacgtatttatattcagtggaaataaagctagtaaagattggctatttggtcttcttacgactttttatatttttcctgcatggtcatctagaaagttttaagcaacatttacttaggcttcaaccacatttatacgcactttctttctctggagcatcatatcacaagtatccaaacatcttttcaaatgtgcaattcatcctgaaagcctcagaaattataggtaaaagagaactccgttctgaatcaatttttagccctgtggagaataagaaaagacatgagaacacagattctgatatggtgggtaatctagtatgggaggatatgaaattaaccacctgctctggcactgtgttgctgcttggtcttgtgttcagaataacagtcctcagttgaataatgtgcttgaacatctcatcttccataagacacagcttcaaaagaaatgctggtgatcaagtagtctggactggttactatggcttagtgtataacctggtgaaaatttcatgggaacttcaaggagatgaagaacaggatggacttagaaatataatatggcaaacattgcagaaaacaaaggattatgagaaagacatacgaatccaaaatgcaatcaatatcgctcaggctgagttaaatgacccaaccgatcctttcactaggtatagtacaaacatctcatcaaatgtaggagaagaagttttctccaaatatattgggtggagaattgccgacactctttccaaactattctttccccccattgaggcccgtgttcttcctttgaagaaaccatcaataaaaaaggatcaaacaaaatatccgaataaaaagctggagtccatgaaaaaaaaaaaaaaaa

SEQ ID NO: 3575 - DNA, 710 bp, Macaca Fascicularis
  misc_feature (1)...(710): n = A,T,C or G
tagggttcagagtcacttttgttccctnnttcattctggggagtgacttccctacatagagccctgattttgtggctgtggggatcggaggtagcattcaaagatcagatgtgcttttcctcactttggagatgaacactctgggttttagagcattaacctgcctaaccttcatggnnnnnnnnnnnnnnnntctcttctagtcatgctgtgcatgccgcttactctgttggggtctatataaatttgttgaactcttacctacattccaaagaagtttcaaggaaccataaatatatgtatacatatgcatatataaaatgtatatattaaaataaaattatcaggaatactgcctcagttattgaacttttttttaagaatacatttttttttaagctgagaagtatagggatgaaaaagatgttatattgtgtttgactattttccaacttgtattttcatataatttatattttttaaaagctgaaaatttagaagcaaaatgaaaaaaaggaaaagcaggtgctttttaaaaatcagaactgaggtagcttagagatgtagcgatgtaagtgtcgatgttttttttttttttataaatgcaaaaaaattcttatggcggagttttttgtttgtttattttnnnnnnnnnnnnnnncacatcattttgctggagagttttttatatactgtagcctgatttcata

SEQ ID NO: 3576 - DNA, 731 bp, Macaca Fascicularis
  misc_feature (1)...(731): n = A,T,C or G
cagaagtaatnnnnnnnnnnnnnnggaacatgataagcacatagtaagtgctnnnnnnnnnnnnnnnnnaaattcatagtaggatgaatattacccttnnnnnnnnnnnnnnnnnnnnnnnngtgatttttattatacttcattttccttatttctatgtttatttcattgatcacccctgctctccttttaacaattttctttaatacctacatgcagaaactcagagctagaaaaattannnnnnnnnnnnnnnnnnnnnnnnnnnnnactgtattagtagtcaggagatttattccatgaatatataatctcaaaattatttttctgtcacttccattgtggattcacttaacttttatctttatggcaacttcttaggaatcagaaggaatccaggaaaattgccaggtgtagtagatttttctttccagtgtttctttcaaatgacactagacactannnnnnnnnnnnnnnnnnacaagtaccttataacagtataatcagttcttctctcttgtcacttacaacattgctgacattcattctgcttgtctgtaaacaaaatacattgttactgttattattttaaacaaactgttatctgttagatcaaataagaataacaaaatattttattttaccttcacttctttcttgtctaacactcttgtttctttgtgttgatccaaattcctgacctctgtaatttttgttttctctgaaataag

SEQ ID NO: 3577 - DNA, 738 bp, Macaca Fascicularis
  misc_feature (1)...(738): n = A,T,C or G
ctgtcaagctggccggcgcagtgcacgctgggccgccccggagcggtcgcagagcccgccgggagtcgtagtccgggacgggcgcgcagtattgtccgctacgcagctcgggatctgggtcgggttgtcggctgggttgctgccggnnnnnnnnnnnnnnnnnccacccagcattgagctgcccgcggctgttctccctaagcaccctcgctcacgttgcctcgcctcgcctgaccggccgcaaccttcgagaccagctttaaatcgagccgacgactgcccggccccgccagcggggaggtgcgtggggttcggtgccagccgctctcccctggccgggccagcctcttgatgcaccgggaacgggcgcgcccatccgattcgaggggcggccgggccccatctgtgtctttcgctcccgagcccccagctagagttggcttcagcggaatgcctactgtgcaggattattcaacaagccgattgatcacattcttcagctctagcagggcaaaagcgtcactcaaaaagaacattacagattttttttgaaagaaacttcggggtaaatttaatttaaaatactgatttttgataacatttgatcttatgacagcatttatttttaattacagatagggttacactaaaagtcatttctgacctgcttccttacccttatggctccaaaataaactgttaggccctgaagcaaaggcgaaccctgttctagagcaa

SEQ ID NO: 3578 - DNA, 179 bp, Macaca Fascicularis
ccagttacaccccaaaatgttgtgctcagcaccgatctgtgctcttatatagcgctaaaaattttatgagaaattatagcgcagggatggggttatttgcgcatattttttcacaatgcccaatgtgtgagaataatgtaaactgagattttttaaaaaactcagatttgagggggagc

SEQ ID NO: 3579 - DNA, 714 bp, Macaca Fascicularis
  misc_feature (1)...(714): n = A,T,C or G
actaacgggaccntgggacctgtaggagcaccctgtttgggactgtgagctgtttgaggggcnnnnnnnnnnnnnnnagcagtcactaacacacaacnnnnnnnnnnnnnnnnnnnnnnnnnnnnnnnnnnnnnnnnatcctttttcttttttttccttttctttttttttttttttggggggtcccaccgagataggaacttggatnnnnnnnnnnnnnnncagaccccattcttaagatcacttggtgccttaaagacacgcattccaaagtggaatgtggttgaagaaagtgggccaggtggttgaagacannnnnnnnnnnnnnnnnnnnnnnnnnnnnnnnnnnnnnnncactccagatggtctccttagcatctcagcnnnnnnnnnnnnnnnagcttgggtgttgggcctcaaaggctgtagagtccttgggttagagagctggggagaacgaannnnnnnnnnccaggagtnnnnnnnnnnnnnnnnnnnnnnnnnnnnnnnnnnnnnnnnnnnnnnnnnnccagaggaaagccgggctgcttctgtnnnnnnnnnnnnnnnnagagcctgaggctgaagggaaaagtacacagaggaaggtgttttacaaatcaggtcagtgtaggccaagacttatggtctacagattttggtgggggaggggggaatcttttcaaagacaactgggggtnnnnnnnntgttaa

SEQ ID NO: 3580 - DNA, 727 bp, Macaca Fascicularis
  misc_feature (1)...(727): n = A,T,C or G
atcaaacagaatactgtttgtgcttaaaaaccatcctgcgcccccatctgtaaacgacatcgtccctggtacttcccagcaggcgctaagcaccgcccacactgccggcnnnnnnnnnnnnnnnnnnnnnnnnnnnnnnnnnnnnnnncaacccgccgggagcagctcccggggaatgtgcagaaaagtgcctccaacacccgccctttctgcccctcggcccctgtggtcactctcccctccacagtcctgaccccgcagtcggtcnnnnnnnnnnnnnnnnnnnnnnnnnnnnnnnnnnnnnnnnnnnnnnnnnnnnnnnnnnnnnnnnnnnnnnnnnnnnnnnnnnnnnnnnnnnnnnnnnnnnnnnnnnnnnnnnnnnnnnnnnnnnnnnnnnnnnnnnnnnnnnnnnnnnnnnactcctcacagcctcttcccaaacgaaccgggtgtggcgtgctgggcctttattcttctgggacgcaaacacaggactgctgattggtctctnnnnnnnnnnnnnnnnnnnnnnnnnnnnnnnnnnnnnnnnnnnnnnnnnnnngaaattccagccgcaccacatttgcaaacgacacactgtcgggctnnnnnnnnnnnnnnnnnnnntcttaaataattcaggctttggattgagaacgtgtctgtcactttcctttatagnnnnnnnnnnnnnnnnnnnnnnnnnnnnnnnnnnnnnnnnagccag

SEQ ID NO: 3581 - DNA, 802 bp, Macaca Fascicularis
  misc_feature (1)...(802): n = A,T,C or G
taaaggtagacagggagannnnnnnnnnnngggcagaccaggcnnacttcctgtgaccccagaccttggcaggcaggtcttgctgaaaccaggcatctccctcacacctggggaaaggtttagggcaacgtgttgcctcttcatcccgttaaccctagaaatcttctggttagagtggccccttaccccaaatctggcctaggtctgaagactgcagaaggatagtcatgatgggcccatcctagagcctagctggctgggtatggcggagacaggagggcgggggtacaggagggcggggacaggagggtgtcgggaagggcctgaggccaaagccagttttctgtgctccctttagccccagcctggttggccagatctcctctccttcaggggaccgtggggccacccaagccagtcaccttcctcttccaagctctacccccatgactgttgatttctggcacgtggaggcagagttatgaatccacaaatgctgcagcccatacctcgtaatgtgtctgtgtccacttagagcctcacaacctggctgagtgtgtgtgtgcatgtgtgtgtagtatagtttgtagttgacaatatgtgtatataatagcttgtgtatttatatgtgagtacagaattagtgcccgtggcggttttctgtattttaaacccattgaattgattagttttattttcgggaagtgggaaagggggagtggggggaagtgtaggaagaaggactcttagccaaatcattctctaggactattagtcgcgatctcccaatgagccatcatga

SEQ ID NO: 3582 - DNA, 3330 bp, Macaca Fascicularis
agtccgaatggcagcgttgcgcgctcgggagggggagttccctccagaactggctgcgctcggcgcgctaggggaagaagaattggaaataggatgattaaacccagaggaactgtttcgtgactgctacaccgtaactccgtcttccccgacctcagatatctaaaaacgtggggtgggaggaaaagcgcttcttgctgttgcggacaagcaggttggaacgcacgggtaaaatgaagttgactccgcggactttttgtctttcagacccgcgaggtctgcttttcagtttaaactctagaattgaagttcactaaccctaagccaaagagcgaaatgatctttcagtagtctaaagtttgtaaggtttttatatactgtccaattcctctctctgctggtctcctgccctttgtttttaagcaaacttgtgcagctagctgtggtgttttgataattataaggacaagtctccatgactggagatttttaaacaatgcattagtgtaagggcgcgagtagggagggatttattacagaacagtggaagatctatttcccgtccctaggcgttgatatataataattttctctcaggaaactacttggagagagaagattgttgggtgcaactcgccggtaacctttttcaatcattcttacgtgttcccatcatctcttacagtctgccaaagacaaagtcacaggaaggccacgaagaacccccgcgcttcccccaaagcttctaaaaagccatttcttatctaatgggactgccagttttatctaaaaaggcctacagacacaaaccatagtaggcttaatttcggtgtcttgttgccgtgagaagacccggtgtgttaggaaactcctttctttgtatctttcgcaaaatctaacccttgataagagctttaagtcctggccggtcgtattggctgagcttgaacgggtaatgcctctccaaagcagaaagggaatttaagatgcaaaagtttcctcttgacctaactgaggctttcttccccaggaactcgttttgatttgttttgctttttctcaaggaggatttcaaattggatctctcttcccttccatttttattatgttattttgtagcgcgtgtatgaaagtgaaagttgaatagacctaggctgataagtttaccagtttgtgtgtgtgtgtgtgtgtgtgtgtgtgtgtgtgtctgtctgtttctagtctctggtattaaatgtatggagccttttgtcaagctgtttttgcaaagctgatgctgataatctcaacacgaagcaaatcttcccagtattcgggcgtgtttcccatatagataaacatgttgaccctagtaaaaaaaaagataaccaccacaatgccagaaaatggagagttttacccagtcatattctatcatgccacgtttataagatggaattaaacaccagaagctaccagaagcctgatgacttatatttgagatccacaaagcaccctcactatccatcttccttcaaaccagcccccacctcccacacatagtgtggtattttaactccctaaaccaataagctattgcattacaaagaattattgcagatgataacaattccaagtagaaaaactggcatgtggcttaggggaaacctttagtaacaggcaatttcaccttaatggtgaagacaacattttcttcttttcattctgcaccattgttgtaaacaagtgttttcttagttcctaaactgatagaagcaagacgcatggtgaagatacccgcattaaaaggagacgtttgagggacccccaccatgatggacatgctctgaagttcagtgcatgtatcatgatacattttatattaaaatccaagttagaatagcaggctttgtagttttacctcaccttgaggttctaaattgatcatggactattctcatttcctcagctgattgctgtatgtggatttagtacatcaaatatatctgtaaaattttgttttctagagaatacataaaactgattagcaatttttccttaatacttgattacaggagcgacctcttgtgttcaaagggaggattagaccctgtcctctcaaaaatggactcgttttgacctttgtatattgttaggtcgaaaatatatccttgaaaacggcaatagtgtgaatctctggtttgagttcctttactgagaaaaagaggagtatgagtagttattaagtatagtccccatcacctccaggctgcctcaatatatccgacagtgtctttcaatataaaagggatactgaaacgtaagttcctctggcgtctgtggcatctacccatgtgcactcgtatacaacttccaaaatgtggctgttaacactcaacctcctggtgggctcttagacctgtgtttttgtatactgttgctttctcagctttaattacaatttaaacattccacatcaaacttaatgtcagatacagattcctgaacaaacatcatgctcccaagctaccttcaaaaatctgaataggttttaattccaattgaaaggtaaaattacacatttagcatttattgatctcccaataacctctggcacatacaaatgaattttaagttggttctttgggaagtcacaaacagacaacttattccttctcatttaaccaagattgggaagggaagaggggctttgatcagctttccaatgaaggtataaatttgggaatttgttcccagggagatgatgctatatgtttagctcacatcagaatcaggtttgaaagagtagaataacagttacactgctagtttcactgagtaaggtattcagatgaaaatatatatatacctgaagggtttatattttctgatgtccacaatcgtatatagtttgggggccaaagtgaaacaggaacatttacctctaaaaatggatattgagtagatgcatatgtatcccttttcccgtttttatcttttatgtgtagtctctagtcatgtagaataaggctatataagccctcagtatctttaatcatgtccaagggtcagataaaattatgtgcgttttaaaggagttaggattaactatattccaccggaacggggtgtgggtgtttagaaccaatttgcctctcttcccattggtggtggtggcttattgaggaacaatcaagagaatctgtgctctaatttcggagaaaaggaagagataccactgggtatgaaatgattatctctttttctttccttttacttaaaaaaaatactaagcaatgataataaaggcagttgttaataacaacaaaaaaaaaaaaaaaaaaaaaaaaa

SEQ ID NO: 3583 - DNA, 790 bp, Macaca Fascicularis
  misc_feature (1)...(790): n = A,T,C or G
ctggatgggtgggagcgagggannnnnnnnnnnnnnnnnnnnnnnnccatagcagagccacccctgccagggacccggtgagggaannnncaggagcaggtggtggttcagttcccacgccgatatctggggtaatggatgtgtgagaagagagaagcaaagcagtgaaaggagttattccacatccagagggcccgggagtcccacagataccccagggaagccactgactcagaccgctgcagaggctcctgggcccaatgcctcacccctgctggccagcatggggcctagcactggaagatgcctcaggtgtgtttggagtaggggagacggaaatagggcaggctctcagagaccaggacggagagtcagggaacctgggaaagagtagnnnnnnnnnnnnnnnnnnnnnnnnnnnnnnncctaccagcccaggctataaagagtctgctttgccccaagtcttttccgtccacccccaacagcctcgtcatcacttagctactgatcgcgccnnnnnnnnnnnnnnngagggttacattagtggagtctgccacagcttnnnnnnnnnnnnnnnnntgccctttgcctctgctgtggccctggggttttatcaactgtccccttcctatcctcctctccaccttctttttttttttaaaataatatacttattttgctatgggggaggggaatatcaaatggacaagatcacttttaaatggtagtttttataagatgttataaacttgtatctttttaccattaaagtgcnnnnnnnnnnnct

SEQ ID NO: 3584 - DNA, 1107 bp, Macaca Fascicularis
acttgctataacaaccttcttctaaagtgcttatctaaaagaaagccttagctggattattattatttttattactgaagacaaatttaaagaatgattgtcggagaaaatccttacctgccaaggctgcacaaactgcatcccatgtttagaaaaacgtcaaaggaaggcttccgtcctcgccagcacccgggaaaagcagctcccttacagtgcaggcattgaaggtatccttggagagcctcagacctctgaagctgtgccgagttgtgtgtgaagaaagcagagagctgccagattatacctgggaagtgagaaaagataacatttaagaattttgattcttgctgccttgcttctctcctccttcagcctctgtcccactgagtaagcctgacagcttttctaaaaactttgtttttaaataaatgattgccccattgcctgaatgcaatgcacaggtacccttgttctcaacgaaaatcgtccacgtttaaaattctcacaattgcttccagagccttcaccattttacaaaggcttcattttacaaaggtttaactgtctccaaggaagactcccacgtcccctgctgagacgtgtcatggggcctgaagaataatgctccctttctcagggagctaagacacacctgagacgtgaataaaccagttccaataaaatcccacttgggctgatggccagcagatgcctctggacccatttctcagacacagaagacgaggcacagtgacttggctcacaccggaacagccctgacttgctggagggagaggagccttgcttccgggccctcacctggtgtcactgcctggaccggagcagtaagctggagggtgccaccagggaaaggaagccacagatggagcggggcagctgcagttaattgctgacttgctttgatgttgtgcagggccctgttgacccatgagcacgttattggcgctttggtctcctcatctctaaataataggtatgatgctaactaccttgcagagttttgttgcaatgatttgagaaaacaaaagcagctctaataaaaaaacagaggtcatgcttcttcactctcaaaaaaaaaaaaaaaaa

SEQ ID NO: 3585 - DNA, 764 bp, Macaca Fascicularis
  misc_feature (1)...(764): n = A,T,C or G
gattaaagtaacagtagtatnntctagtctctaagaataaccagaaaagccatgagcttgnnnagcttttatctagggccaataaattttaaagagacaatgttagacaaaataaaaagtactttatacttgcattctatgagtcatatttaccgccttgcttacacagtaagttatgcatacttttatacaggtgttctcacatatatgtaaaaatttgtctctagggtttatgcttgggagtggaagtgctggataaaagaaaatgctctttttaatcttgctacacaatgccaaactattttttttcttaagaaaagtaatttttcacttgagannnnnnnnnnnnnnnnattgtctattgagtataaagataggataaaaataaaccaacatctcaaaaagtgatctttccttgtaccctttagcaggtaaacaccataaatattgtattatagactgactgatgtcctcctaaaattcatgttgaagcttaacccctaatgtgactatatttggagacagggccttagaggaggtaattaaggctaaatnnnnnnnnnnnngtagattcctaatctaataggactggtgtccttataaaaagaggaaaagacagcagagctctgtgtttttctccactcacccagagaagagtccatgcaaggacacagaaagaaggtgtcatctccaagccaaggaaagaggtctcaccataagccaaacctgctggcacattgatcttggacttccagcctctagaa

SEQ ID NO: 3586 - DNA, 649 bp, Macaca Fascicularis
  misc_feature (1)...(649): n = A,T,C or G
gtccctaagtctttctgcctctatcttaccaaggttcttgaaggcccatttcctcatacatgtataccaccgcttttattagtatcttatactaagaatacaacacacttctaatagcatctcacttcttagcttaggtgtccataccagctgggggaaaaataatctgggtttatcagtttagaacttccnnnnnnnnnnnnnnnnnnnnnttatgcgatttcaatattgtatttgtagaagaaggggaaaaggagagggaagggaaaaaaacaaatgtctttcttaatttttcagaatttgctcttttcattaaaattcttctttgacaactttatttcatgggacttgaatacaatatggattttcaagtacagattctgtaaatcatgatcctcatgtcagtcataaatcactggctcactggaggagtagcatgctgggcctccataattccccagaaatacctaatacaatagcataaatcaaaataacttacaaagtgatgattttgtgagctaaaatacttttctcagtagcatcagggaagaggcctcattctactaggataaaatgcattttcattatggaattcagcagacatgctaaaggaacaagattaccttccttggcctctacatttcctgtt

SEQ ID NO: 3587 - DNA, 712 bp, Macaca Fascicularis
ggggaatcagtgggcaggcccttcgcactctgggtccctctgtgctccgcaccactcggccccggcttctcccctgactttcctcctaacctgtcccatctgccgcaggcttggtggtgtatcatccgggcccagctggacggggctccagagggcaagggccgtatgtccagaagctctgtcctcagtacccaaaatacggaaatggacccacagggccctaatccgtccatttgagtgacagagctgggaggtttgggttagactaaggaggtctcaggaaacacagcctgaggggccggactggacgggcaacataagggctgtcctgggctacccctcaggctgcccccttctcagagccccccgccatggcctctgggagccagcctctgcctacacccagccaggacgcccgccacaacctgcgtcctgtggccccagacgggggatgccccctcacacagaagtcctttctgccttccccactgtccagacgtttcctgcccctccccgcctcaggtggtggccgctgggcagctgggatctggcccagttccccgcccctgaccctccccagcgatttttatcttggcttttggttttttgctgaataatagatgaaagtcatcttctcggtggagcgggtgtggctggtggcccctggtcacttccagttcatctcccactgcctccttgatgaagaccgagg

SEQ ID NO: 3588 - DNA, 732 bp, Macaca Fascicularis
ctattacttggtttactcacatacagtatgcagattgttccatttaagttcagcgcccgtacttcactatcccgagtgggactgctttttcattaacgtgtctccatccaaggcagtctaaacatttttctattcaagtttgccgcatgtgtttcactatccagagccggactgcttttcgatttacgtggctttgtgggatgcggtaggaagatgcttgcattcaagtttgccgcctccacttaactgtgcagaatctgactgcagtcagatctgtatgacagatgttgcactcgttttctgcgggtacgtcactatccagtctactttttccatcaacgtggctgagtcatatgtagtatgactgtcagaggcgttggaacccgaagcgaccccattttgagtgagggctagaaaaatgaggccgggatttacgggcgtgcattctctgaaggatattcctagctgtcagatgtttacggttaagggaacaaattaatgtttactaaggagacccgagtgtccagatagctggatatctggagaacaaaggcgttcctaattttgctttaaagatagtaatagggattcttgcacaatataataattaaaattaatcctttatcacaaacccttgtagcagagcacctctccccatgtgtacacgcattgtacctagggtggatacgttccgtctcttagtttcgggaacgtcctactctgtctttggag

SEQ ID NO: 3589 - DNA, 822 bp, Macaca Fascicularis
  misc_feature (1)...(822): n = A,T,C or G
tttatagccaggtttattagggcacatgntnnnagtcaaaggaccagttannnnnnnnggaattgttcctcacctcatcagcttctttccacttgaccttaataatgcaggaaatagcagagtgagctagggaagtaccctgttctctgtggaaaggtgaggacgagagaggaaagttggggtgtttgtaggaccttgctgcagtaagaacagccctggtcactaacccaggtcaagcctcagtaccttgcactccctccaccccacagtcctaaggagacttgaatgtcttccccagcacctcctccgaccacactcccagaggcttccctggcagtggtttgggtgtggccttccaggcctttgtgtcagggcaggtctcctgaaaagtcttctctttgtcgtgggagaggcttcgttgggcatcgaggctatttctgtgttactgaggagtctgggcttttttctgataccgcatttcttttttctcctgggccatttgtagcaagacactaagggcgactaccagaaagcgctgctgtacctgtgtggtggagacgactgaagcccgacacagcctgagcgtnnnnnnnnnnnnnnnnccatgcttccagctaacaggtctagaaaaccnnnnnnnnnnnnnnnnnnnnnnnnnnnnnnnnnnnnnnnnnnnncccaacctcattttagttgcctaagcattgcctggccttcctgtctagtctctcctgtaagccaaagaaatgaacattccaaggagctggaagtgaagtccatgatgtgaaacactttgcctcctgtgtactgtgtcataaacag

SEQ ID NO: 3590 - DNA, 762 bp, Macaca Fascicularis
  misc_feature (1)...(762): n = A,T,C or G
acgccccagtccagcccagagcttccccagcattctagacttggagaagtgacagtgaccgcacacacacacaccccnnnnncgccagctcnccaggtgggagtgagcccaaacccagcccctcctgtccacccctccaggtctcactctcttcctgccacctacaagaggagaggacctggctgggccccaagccttggacaaatcctagaaaaacctgagactacaacccttgtctttctcttacccaaattctaggatagctctagagcctgctannnnnnnnnnnnnnnncaacctgcctcattcggcctgagcagtagaggcaggtggaccgtggacagaagcaatcctctttccgctcaccccgggcagacactactgcctgcgttcccccgatgaaaggaaacaggctgagagnnnnnnnnnnnnnnnnnnngcattataccaccgtggagggtgggtcacaggacatgatgcagggtccaggtttctgttttgatcaagtcttacatgcccattcagcttctaggcccccctcacctccctgccctcattcacgagtggccctgagacatgtgaatgcctccctcctatgcatcacaaaccttctccacgaagctttggtgctttggcctccggcacacctaactagcattggcaaaggagtctacattctcttcctcattcagggaagatgctttaagaactcctgcgtctgtgcagcacaggaactggagacagctccccaagctcctcccc

SEQ ID NO: 3591 - DNA, 721 bp, Macaca Fascicularis
  misc_feature (1)...(721): n = A,T,C or G
ttcttnataagaaaattagtttaatcaggtgagctgatacttatgattatgcatatagctatgataaaattgaaagtaattgtggatgttctttagagaacgtgttttgattttgacttagcattgggaagctaacaacactataatttttactaaaaaactagaccctgcctgttttctaaaaaacactttaaattcttttaaaataaaagcatactatttaaaattgtataattaaaaataataaatgaataaaaccacttaaaaagaataaacagtgtgaataacaaaaaacctctggctcacccaacttttgtttctggaagatttatatcaccagttccacttcatttatttttggctatttcaaacactttcttatgactctgtggaggagtgattagtttagtacccaaataaaggataacattttaaaatgtcttttaaatgtgattttttgatgataggatcaatagcaaatagaattaagataagtcaatcaatctaggcatattttatgatggaactttgtaatgtttacaaatgaagcaattcactgaagaatattaaaagaaaattgaaatgaatgggtaaacgaacaaagtgtcaaagcaagtaattgtctaattgtccatattactttagtgattataccagaagtgccttttaaaagattaactgtattatgtgctcattgtgttaactgcacagtaatttattt

SEQ ID NO: 3592 - DNA, 1078 bp, Macaca Fascicularis
agcggttaccatggaggggatcagtatatacacttcagataactacaccgaggaaatgggctcaggggactatgactccataaaggaaccctgcttccgtgaagaaaatgctcatttcaataggatcttcctgcccaccatctactccatcatcttcttgactggcattgttggcaatggattggtcatcttggtcatgggttaccagaagaaactgagaagcatgacggacaagtacaggctacacctttcagtggctgaccttctctttgtcatcacgcttcccttctgggcagttgatgccgtggcaaactggtactttgggaacttcctgtgcaaggcagtccatgtcatctacacagtcaacctctacagcagtgttctcatcctggccttcatcagtctggaccgctacctggccattgtccacgccaccaacagtcagaggccaaggaagctgttggctgaaaaggtggtctatgttggagtctggatccctgccctcctgctgactattcccgacttcatctttgccagcgtcagtgaggcagatgacagatatatctgtgaccgcttctaccccaatgacttgtgggtggttgtgttccagtttcagcacatcatggttggccttatcctgcctggtatcgtcatcctgtcctgctattgcattatcatctccaagctgtcacattccaagggccaccagaagcgcaaggccctcaagaccacggtcatcctcatcctggctttcttcgcctgctggctgccttattacattgggatcagcatcgactccttcatcctcctggaaatcatcaagcaagggtgtgagtttgagaacactgtgcacaagtggatttccatcaccgaggccctaggtttcttccactgttgtctgaaccccatcctctatgctttccttggagccaaatttaaaacctctgcccagcacgcactcacctctgtgagcagagggtccagcctcaagatcctctccaaaggaaagcgagggggacattcgtctgtttccactgagtctgagtcttcaagttttcactccagctaacacagatgt

SEQ ID NO: 3593 - DNA, 585 bp, Macaca Fascicularis
caaatcgagcccactgctgacctcactggaattaccaatcagcttatacttgcaaagcaggaagcccatttaccattgacgtaccaatcagtggtcgtcccgcccccaaagtaacatggaaactggaagaaatgagacttaaagagacggatcgagtgagcattacaacaacaaaagacaggaccaccctgactgtaaaggacagcatgagaggtgactctggaagatacttcttgaccctggaaaatacagctggtgttaaaacatttaccatcacagttgtggtcattggaaggccaggtccagtaaccggccccattgaggtctcatctgtctcggctgaatcgtgtgtcctgtcatggggagaacctaaagatgatggaggcactgaaattactaattacatagttgaaaagcgtgaatcgggtacaacagcttggcatcttgtcaattccagtgtcaagcgcactcaaattaaagtcactcatctcacaaaatacatggaatattctttccgtgtcagttcagagaacagatttggtgtcagcaaacctctagaatcagcaccaatagttgctgaacatc

SEQ ID NO: 3594 - DNA, 1183 bp, Macaca Fascicularis
  misc_feature (1)...(1183): n = A,T,C or G
caggagcaggggatcgacggggagaccctgccactgctgacggaggagcacctgctgagcaccatggggctgaagctggggcccgcccttaagatccgggcccaggtggccaggcgcctgggccgagtcttctacatggccagcttccctgtggctctgccactgcagccaccaatcctgcgggccccggagcgagaactcggcacaggagagcagcccttgtccccgaagaccgccacgtccccctatggagggggccacacccttgctggtcgagcttcacccaagcaggagaatgggactttggctctgcttccaggggcccctgacccttcccagccnnngtgttgaggtggccgggggtacggggtggggccacacaaatctgcaggagccaccactcactacaatggccctgcctcccacagctttatttcttttggttttggatgcaaaacaaaaaattttgaaggaaaatgtgacttcaaaggaaaggaggaaatttccaaagacttgggggagtgaatgtagagcctggtgcagccgaggtctgcaggtggagggcagaggtggtggaaggggccaggggtctgcaggcctccccctggaactaggactggtctnnnnnnnnnnnnnnngggtcatcgtctccccagcggagctggcttcagcccagagctgtggggcttcggcagccacgccagcccagcacagctctcagtccgtttggtcttccatgctgaaaaataaataaagcctgtcccctctctactgcctcccccagctgcacagacgccagcctctgggcctgactgccagagaggtgggaacacgccaccagcacggcagcccctgcaggcccccagatgggctgccttagtcctcttcagagagctgcagagcctccagctcatcctccggcccctgggccagctgctgcagctccccaggggccagccccgcctctgcgtctgggtctccatcctccgagtcgtcctcatcctcttccactccatgccgagtgcccaggggccccagcgtctcgtcctcttccaccccatgccgagtgctcaggggccccagtatccctctctccgagtagccctcagtgtcgtcgtcctcttcagagctgttcaggtcaaagaggtctttaaattccttccctgtcctcatccttcctgtc

SEQ ID NO: 3595 - DNA, 722 bp, Macaca Fascicularis
  misc_feature (1)...(722): n = A,T,C or G
accaccggagnnnnnnnnnnnnnnnnnnnnngcccccatgcccgcggcttcctctagggggcggtgttggcaccacctgagctgggagacccaggactgccggcccccatgcccgcggcttcctctagggggcggtgctggccacagtggactggcccgcgggtgaccactgccctgggctccggctggtccnnnnnnnnnnnnnnnnnncaggggagcggggccatctgatgcttcccctgggaatctaaannnnnnnnnnnnnnnnnnnnnnnnnnnnnnngcacttgtgggccatgtcaggagagccagcggtgcctgtgggggagggctccaaggtgctccgcaaagagcatgggcaagctgtctgacactcggattcttgggtacccgtgggaccttgtgcatgcaggggtcttctctgagccttggtnnnnnnnnnnnnnnnnnnnnnnnnnnnnnnnnnnnnnnnnnnnacggtgtggtgcggcgagctgttgtctggtcactgtggctgtgcacagcccttgccaggggcgtttgttgagggcttcctgtgccagagtccggccagagagcaggtgcaggtgtcatcccgagttcaggctctgcacggcatggagtgggaaccccactagctgctgctacaggacctgggattgcctggggctcccaccttcctgtcaattctcatggtagtccaaactgcagactctcaaact

SEQ ID NO: 3596 - DNA, 1889 bp, Macaca Fascicularis
aaaaacctggggagctgaggcctacgccaggcgagagtcgccggcgtgcgtaacgttggcgcacgtgactccggcccgggctacaaggcgcgtgcgcagtgggacttgagcgcccctggtccttgtctggcggctttcggctgctgcgcggccctgaggtgggaccggcttcccggtgccgcgagggcgcgaccggacagccttcccacctgtccagcgcaccacctccttgccttgtggctggaggcaccgcggacccaaagggagcgaccatcccgggaagcagccccgagagcggaagtgcagaatggcttcttcgagggagtaaagtgcagcctccccagacactgggatccagtcatgcatttaagtgctgaagtgaagttgaggtgcactattatgactcatattcagaacctgaagagagagataccttttgtgattttaatttgatttgaaaatgagtaagtgcagaaagacaccagttcagcagctagcaagtcccatgtcattcagcccagatgttcttgctgacatttttgaactctttgccaagaacttttcttatggcaagccacttaataatgagtggcagttaccagatcccagtgagattttcacctgtgaccacactgaatttaatgcatttcttgatttgaagaactccctaaatgaagtaaaaaacctactgagtgataagaaactggatgagtggcatgagcacactgctttcactaataaagcagggaaaatcatttctcatgttagaaaatctgtgaatgctgaactttgtactcaagcatggtgtaagttccatgagattttgtgcagctttccacttattccacaggaagcttttcagaatggaaaactgaattctctacacctttgtgaagctccaggagcttttatagctagtctcaaccactacttaaaatcccatcggtttccttgtgattggagttgggtagcgaatactctgaatccataccatgaagcaaatgatgacctcatgatgattagtgaattttccaactaatttccactcattggttaatattgttaatgaattgatagaggtaattgaggaaaggaaatgagtgagtcactgttcagcaacactgatttctgttaacacatcagttatgaatttcagggaattcatctcgccagattcttgataacatgccattcattgcccttaggggattgaccctatcttcttatatggctcaaataaaactagtgtgctgttgtatgaatcttttactgactacaccgtccaactaaaaaaagataacggggcagctttaaaccaaagatcatgtttagaacaatgaaaaattatttgttgtatctaatacttgcctgtatcatgaaaagcttcattcagcaatgatgtaataatttttaacttccaggaaataatctgtgaatggaaagattttttcaagattttgagatagtatttagtctcatgttgggaacacaagaatgtgatgaacatagtgaatactaaagaaaactcttcagactttcagaatgatggtttagaatttaaatttttaatctttactgatttctttttttcagtatgaaaatagcactttaccaaaagattagccatgaaatggttattttgccagttgcatttgatttcttttgtatttgcaatgtaatgagtccttttatttcttctgtatttgcagtgtaatgagtttttgtggcaaactgtattaagcaatttttcattatcttgaagttccataaagtggagaatatttatattctcacatgcattttaggcacttttgttatgtgaaaatagatgtatttctgatgcatttggttaataaatactaatctgaaaaaaaaaaaaaaaaaaaaaa

SEQ ID NO: 3597 - DNA, 710 bp, Macaca Fascicularis
  misc_feature (1)...(710): n = A,T,C or G
tagaaaaggcnnnnnnnnnnnnnnnnntgttaacagaaggatataaaaccacagctaagtagctctatataacacctgtccagtgactaaaaccannnnnnnnnnnnnnnnnnnngaaataacatcaagaactgtaatgctgggtgggaacatgtaacttgtannnnnnnnnnnnnnnnnntttgagtggctgagagggctgttgggtgggaatgcaaaaattctctgctaagactcnnnnnnnnnnnnnnnncagacttggccnnnnnnnnnnnnnnnnnnnnnnnnnnnnnnnnnnnnnnnnnnnagggtcatgaaggttnnnnnnnnnnnnnnnnnacaacacgttttgttttctcaggttttgctttttggcctttttctagctttaaaaaaaaaaaaagcaaaagatgctggtggttggcactcctggtttcnnnnnnnnnnnnnnnnnnnnnnnnnnatctttgctttgactactaatctgtcttnnnnnnnnnnnatttctccttttctctgcaggtgctagttcttggagttttggggaggtgggaggtaacagcacagtatctttgaactatatacatccttgatgtataatttgtcagaagcttgattgtatattcatatttacacgagaacttaacgtaactgccttgtctttttcaggtaataccatgcagctggtgtncnagaagccataccaccag

SEQ ID NO: 3598 - DNA, 781 bp, Macaca Fascicularis
  misc_feature (1)...(781): n = A,T,C or G
gctgacagnnnnnnnnnnnnnnnnnnnnnnnnnnnnccacccgcccagcggggagtannncggccagtgtggtggctgcggagaagatgtggtcggggacggggctggggttgtggccctcgatcgcgtcnnncatgtgggctgctttgtgtgttctacatgccgggcccagcttcggggccagcatttctatgccgtggagaggagggcgtattgcgagggctgctacgtggccaccctnnnnnnnnnnnnnnnnnnnnnnnnnnnnntcctggaccggatcctgcgggctatggggaaagcctaccaccctggctgcttcacctgcgtggtgtgtcnnnnnnnnnncgnnnnnnnnnnnnnnnnnnnnnnnnnnnnnnnnnnnnnnnnnnnnnnngaggactttcacaggaagtttgccccaagatgctcagtgtgcggtggggccataatgcctgannnnnnnnaggaggagactgtgagaattgttgctctggatcgaagttnnnnnnnnnnntgttacaagtgtgaggagtgtgggctgctgctctcctctgagggcgagtgnnnnnnnnnnnnnnnnnnnnnnnnnnnnnnnnnnnnnnnnnnnnnnnnnnnnnnnnnnnnnnnnnnnnnnnnnnnnnnnnnnnnnnnnnnnnnnnnnnnnnnnnnnnnnnnnnnnnntgggttctcagttccagttcccatccttcgattgatcaccctccctgacatccacctgtatgacttcatcaccaaatgctgnnntcctctttctcca

SEQ ID NO: 3599 - DNA, 659 bp, Macaca Fascicularis
  misc_feature (1)...(659): n = A,T,C or G
cataattaagcagtagaagatctatctttacaaagtatgnnnnnnnnnnnnnnnnnnnnnacttactcnnncntaatctggacaaagtaaacttaacagatttttctgatgagcatgttttatgaatcctccattgtgctccattctatcacatgtgcatttttcatgttaaactgcaattacttaatctcttcccctatccttctaaattaattttctgaagttggagtgtagtcttttcccccttaggctatgcattaatcgaagctttcttttcaccatgactttataatgtctagtaaacaatatttctacttcccacatctttgctttacacagtcaccttgcccttccttccaccaccgaagaaaannnnnnnnnnnnnnnnnnnnnnnnnngtacaaggtgtctgtgtgttttgtgtagcttcagagttagattgaaattaccaggcacagatttagtcttgtcattttgtttacacattggggaaaacaattcagtttattaaacgtttcatgtaactgcacccaagttttgccaagctggaaacttggaccttttctgtgtagtgactttttaattatagttttcataacctggagatcagactgttgctttcgcatgatgtatgtagtgtctcatgactggagtttgct

SEQ ID NO: 3600 - DNA, 719 bp, Macaca Fascicularis
  misc_feature (1)...(719): n = A,T,C or G
gactttngcctannaatatcatggaaatttaacttggcttgagtttggttcatttatatctttatggattatgtaccagggccattaataacacttaaaccccttattttgctatggtggttagattttttattccttttcagttatgctgttaattattacatggtcacattcatgcttattacagatgaactatttttagtgccaatgtaaaggattaaggatagcattcaattagttggctgatatgtcaggctttattgtacatggtaatgtttcagggagtgtgatttggtctagaatatatccagatccttacgatattgggttatgacaggattctattatttttagccatgaatggtgcttatttttccctatattaggaatattaatatttggattatcagagtccatgttataaacagaatttatctatgcaagacaaattctaactgtgcaacattttcatgagaattaaaagtagtgtgttaaggggaaactctgaatgtttttatgtataagtgcctagctaaagaaccatagaacaataaatcaaaagctcttataaaagaaaaactgattgaacattaaccagaaacaaaatattaataatttacattattttttttggttgctgggactgaataccccaaaaactaagagatgagagtcgagaaaatgtatacttgataagaaaattgatttatattatattt

SEQ ID NO: 3601 - DNA, 1803 bp, Macaca Fascicularis
  misc_feature (1)...(1803): n = A,T,C or G
gcattatttagggatcgtatagagagaagaggagccaacaaagaagtcaggaaaaacagaaagggactgggaaggaacaagccttcagggaagaggaaaaccaggatgttgtgctgccatagagacagaagaggagaatatttcaagaaagaagggacatcagaatgtgtttactgtttgagagatcaaagaagatcaaggtcagaacaaatgtgtgttggatttgatggcatgcaggttgttggtgaccttgaaagagatttcacaaggaaggagtggtggggatggtagaagttggagtatgttgaagaatgggaggtgaggaagtagaattaatgtgtaggcagctctttagaagtttggctgtaaacaattgcagagaaatgaggcagctagaagagaatatggatgtcaaagggagaatgttttcaaaatagtagctgctgctaagagtaatccaggagagagcacaggactgatgttgcaggacagagcagtggtacgatagaaacagtctccaggaaagtgagagggggtggaatgcaaagcaccagtgaggaaatggcttttgatgggagaagggatactttttgcaaggtattatgtagaaagggacaaaaatattgagttatctataaggaaaagattacaatgacggggctaacgtatgtgggctgcacaagagaagagtgaagctagggcagagctgctgtatgatgggaatgtgctggagttcatggcttgagtacaggcgagctagaaggataagaaatgatggtcaggggtttcagaggtagtatggtttctgttggtgataagtacctggaagagggtggctgagttcaggaggcatttaaagaactgagaagccaggttttgggtgagcatcatgccttcactgaggatacccagggtgatagcaggggctggggtagaaaggaaggagcagtgtttagactcttcctgaatgttagagacagtgaggagaaagtcaggatggtaaagccaactgccataagcaggggctcagaagggtagaagaataaggcctgaaagtagcaaggcggcctcttactcactaaatcataaactcagtctccttgagcttgatgtcttcctctgataaatggtggtaagcatgtgcacattatcacagagttcgaatttggggagtcagcgtacccaccatattgcccagtaatactaaaaaagaataaacaaatactaatttctgcaactaccatactccataaaaagagacctatccccaatcaccaaaaaatccccactgtttttctactccaacttttgtacatagttaataaccttataccaccacttactattttttactttcatcgaagatgaatctacaaaaatatattaatgtcaaaaaatgttactgacctagcaaactgacagttcaaaagtaaggtaagaaggcacacttttattaattaataatatcctttagtattccctaaacagatcgaaaaatggtggattagttcattcttgcattcctataaaaaaaatacctgagaccaggcacannnnnnnnnnnnnnnnnnnnnnnnnnnnnnnnnnnnnnnnnnnnnnnnnnnnnnnnnnnnnnnnnnnnnnnnnnnnnnnnnnnnnnnnnnnnnnnnnnnnnnnnnnnnacaaaatattacctgggaggctgaggtgggaggatcacctgggcccgggaggttgaggctgcagtgagctgtgatcacagcattgcactgcagcctgggtgacagagtgaaaactgtctcaaaaaaaaaaaaaaaaaaaaaa

SEQ ID NO: 3602 - DNA, 2089 bp, Macaca Fascicularis
  misc_feature (1)...(2089): n = A,T,C or G
agaccaccagctaatggatgcggagcggagggcctgctgaccgctctccgcgcctggggcagcttggcttggctggagctaagagccagacacaccattgtgtggaggtgggttctaaggttagacgctcattcaggatattttcaatactaagtcagtgcatagctgccccactaacaaattggtgactgtagagtcagagcgggtcagttcttgggacaatggcgctggcgctgttagaggactggtgcaggataatgagtgtggatgagcagaagtcactgatggttacggggataccggtggactatgaggaggctgagattcaggaggtccttcaggagactttaaagtctctgggcagttatagactgcttggcaagatattccggaagcaggagaatgccaatgctgtcttactagagcttctggaagatactgatgtctcggccattcccagtgaggtccagggaaaggggggtgtctggaaggtggtctttaagacccctaatcaggacactgagtttctggaaagactgaacctctttctagaaaaagaggggcagacggtctcaggtatgtttcgagccctggggcacgagggcatgtctccagccacagtgccctgcatctcaccagaattactggcccatttgttgggacaggcaatggcacatgcgcctcagcccctgctacctatgagataccggaaactgcgagtgttctctgggagtgctgtcccagccccagaggaagagccctttgaggtctggttggaacaggccacggagatagtcaaagagtggccagtaacagaggcagaaaagaaaaggtggctggcagaaagcctgcggggccctgccctggacctcatgcacatagtgcaggcagacaacccgtccatcagtgtagaagagtgtttggaggcctttaagcaggtgtttgggagcctagagagccgcaggacagcccaggtgaggtatctgaagacctatcaggaggaaggagagaaggtctcagcctatgtgttacggttagaaaccctgctccgaagagccgtggagaaacgcgccatccctcggcgtattgcggaccaggtccgcctggagcaggtcatggctggggccactcttaaccagatgctgtggtgccggcttagggagctgaaggatcagggcccgccccccaacttccttgagctaatgaaggtaatacgggaagaagaggaggaagaggcctcctttgagaatgagagtatcgaagagccagaggaaggagatggctatggcggctggaatcatgaaggggacgactgaaaaccacctgggggcaggacccatagccagtgggcctagggacattcactttactaggctaagacctttaaatttttttttctttaatgtatgggactaaaatcaaagcatgacagccaattattgaccttcctttccttccttccttccttccttcgttccttccttccttccttcctccctccttcccttccttccctgcctccctccctccctctctccttctctcctctccttctttccttccttccttccttccttcctttcttccttccttccttccttccttccttccttcctgccttccttcctatttttctttttctctttcttctttatttcgtgggtctcactctcatcacccaggctggagtgcagtggctcactgcagccttgacttcccaggctcaggctgaggtgatcctcacaccttagcctcccaagtacctgnnnnnnnnnnnnnnnnnnnnnnnnnnnnnnnnnnnnnnnnnnnnnnnnnnnnnnnnnnnnnnnnnnnnnnnnnnnnnnnnnnnnnnnnnnnnnnnnnnnnnnnnnnnnnnnnnnnnnnnnnnnnnnnnnnnnnnnnnnnnnnnnnnnnnnnncatgcctggcccttgatttttctttttaagaaaaaatatctaggagtttcctagaccctttgtagattattaatgaacaaaagattaaactccaaatattagatagtaagcctgaaggaatctgaaacacttgtacttccaattttctttacataatcccaagtagaccag

SEQ ID NO: 3603 - DNA, 709 bp, Macaca Fascicularis
  misc_feature (1)...(709): n = A,T,C or G
gcctgtgnnnnnnnnnnnnnnnnnnnnnnnnnnnnnnnnnnnnnnnnnnnnnnnnnnnnnnnnnnnnnngnnnnnnnnnnnnnnnnnnnagaaaaactcccttgttagtggttagaacatttccctccccctcttgaccccgggtcccagctgcccttctctcccgtaggagaacgccaagaacgannnnnnnnnnnnnnnnnnnnnnnnnnnccgacctggtggtgggttcgagcccaacttcatgctcttcgagaagtgcgaggtgaacggtgcaggggcgcaccctctcttcgccttcctgcgggaggccctgccagcccccagcgacgatgccactgcgctcatgaccgaccccaannnnnnnnnnnnnnnnnnnnnnnnnnnnnnnnnngttgcctggaacttcgagaagttcctggtgggccctgacggtgtgcccgtacgcaggtacagcnnnnnnnnnnnnnnnnttgacatcgagcctgacatcgaagccctgctgtctcaaggtcccagcagtgcctagggcccctttcctaccccggctgcttggcagttgcagcgctgctctctggggggttttcatctatgagggtgtttcctctaaacctacaaggaggaacacctgataatacagaaaataccccctcgagatgggcgctcgtcctgtccatcccggtctctgccagatcaaggcgagttcccc

SEQ ID NO: 3604 - DNA, 754 bp, Macaca Fascicularis
  misc_feature (1)...(754): n = A,T,C or G
acnnnnnnnnnngaactttatgaacnnnttccaagttaatctnnnnnnnnnnnnnnnnnngtgggcgtttcttcttgtacttacgtggttttttggcttttaatacagacattttcctccagagatgtgtatgtagctttttctttatttgatttgggaaagggaatccaagaattgcaagacattaccctaaaacctgagcgagggaatctcggaaaagttagagaagggctactacttctgtctcctttacccgtctgtgagagatagatggaaaccgtattatttgccctgatggcgattgtcttgcatctcaccacactggcccccagttcccatccaccccccacctgtcacggtggcaaaccgttttatatgattcaactttttgctcactgttccaagctctgcaaaacacccaggcaagcatcaaaatggtaaaatcaatagttcctctgagctggatggctttcacgaaaatgactcactttaaaaggcatgtagatttcttttcaaatgcatgaactttagcagataagcacattccaaaagctggttttaaaacctgagatactgttttggcgtttagatttttcaaaaagataaactcttgggggataaagttaatgatcacaagattttcttcacctttggtttccatgttacagtatctgctatnnnnnnnnnnnnnnnnnttccaggttttcagaagagtaagtaaaannnnnnnnnnnnnncttaatataaaaattat

SEQ ID NO: 3605 - DNA, 1819 bp, Macaca Fascicularis
gatttcgacagagctgggctcagaagccagttgttggcgctgtccgtggtgctgaggaattcccggctgccggcagaatgagctccaaatcagcaatctgcaaactgctcttactgatgcagaaacccagctaaagttgctcctttccttcacgtccatagttagtattttccggtgtgtaacaggggattcaagcaacatactgtggacgatggtgatggtattgccagcggagtgggctttaagctacagcatgctgttgctgcttgtgatcctccgagcctagccaaatcacctctactgccgtagcaaacaccgtgtaagtgaactcatgtgtggaggaggcgtaatcagccgggaaatttcatagaaggatctaagaaaatgctaaaaataagttcaacatgattctgctactggggtctggatttctacaggaccagcattgcttcttgctttgaattctgaagacaggtccaaagcaaatttcttatgtgtttctgctgtgtttctttctggaagggcgggagactgcttctttactgtgttttgaaatgggaggtagaaagaatggactgcctttaattcatgcctaaaaatgtattctttgggtaattaaagaggaactgctttcttaaaacatagctgaccttttagttcattttgggctgtgacccctaccaccaccattaacctccagagtgattagcctacccctcttgtattcccatggaaggagctgagtgtatttaatattaggagtacatccagaagtctttgaagagggggatggctcttcatattcatgaagcttgcatacttctgttggtcatccctggattggtcacctctgctgctatcagtcatgaagactatcctgctgatgaaggtgaccagatctccagtaatgacaatctgatctttgatgactatcgagggaaagggtgtgtcgatgacagcggctttgtatacaagttgggagaacgatttttccccgggcattccaactgtccatgtgtctgtgctctagatggacctgtttgcgaccaaccagaatgccctaaaattcacccaaagtgtactaaagtggaacacaatggatgctgtcctgagtgcaaagaagtaaaaaacttctgtgaatatcacgggaaaaattacaaaatcttggaggaatttaaggtatgcgttaccctccatacttattgaatatcaacttttcataccacgtacttagtatattgctacattaaattcagagttggaaaaatgtacttttaaatttccctttaaattacagcaatttgattctaattaccataagtagcaccatggtcaacaaatggccaattgatttgctgatcatattaagtttcacaataacctttgtttgtttcccagaagtatctggggcatacctaacaccttttatttttgcccttaaacatttcttctctgctattacaaaaatgttttctgaggggaacaattttgtgtatagtgtgtctcctaaattaatttttaaattgtgtcagttgtgtgtgtgtgttgcttattagcctatatttgaagtcatttaacaatatagtctagaattatttgtttattgtgtggaaaagctgcagagatacacttcttagctgtggtcctcatatcaagaaaatgcgttgggcctacttattgtcaagcaagattcccgttctgttctctgctcgctggattttttgcttacaggattccacagagaactgaatttttatcacaatccaagtaaagagtagtaaaaaagactgtaaaaaaaaaaaaaaaaaaaaaaaaaaaa

SEQ ID NO: 3606 - DNA, 2266 bp, Macaca Fascicularis
acagtggactcggagatgcataaggacccaggacggcatctggacatggctgcgtgaatgtttggctcgctctggtccagcagctctcccagaagttgggaggggcgaagatccccttgggctgtcccttcttgggtccatggcttgaagaagaatccccttctgctcactatgaacatggcttatgacctcacagagagcaaagataaggagacccagtgccaggaaaaggctgcagcccccaggatcctctccaccttcccaacttccctcagctgaacatggcagcctcagaagcaaaggctgtgttccacctctcactcctcctcccaaggcttcactgaagatgatgatttgctcaaagaggaacacgcgcctctctcgacctcgagaagacagcagccccccagcctcaggctcgatgacccagaaagtgtcctggcccaagagcttcccctgagcagtcagtttgccctgaaacgaaagggatagtggccttggaaaaagaacaagaaaaagggcaattctctgctcctcccttcctcgcctgacatgctcaaccaaccaaccaaccatggggtcagccccaggagaagacaactccccataaggacttccagagtgctagcgctggggcagaagagcatcgggcctccagtttcttgccctatctccgtacctcaaatccccgcaatctccccagcgtcatcatatcgttgcagcgcttgggcacaaagcacatgacctccacagcttgctgggacacagttcactcaggacgtacctaggatgaaagcaggaggaggcccccacttcagtgtcggagctcatccttggttcaacccgttcctccctcctccccttcatcatcatagccaaccttggaggaaattccatctaaaatgtgagggacagtcttctggaagttgtgcaactgcagggaagggctgtggacacttacatactcctttccagagccttcttcttctgctccgcctcactctcaggggcttgggacaaagcctcctcttcaggtggctggaaggaaagaacatcctagggtgagcaaatgaatgccccttgagtgaaaggagcctccccagagcctgtcctcacacctgcgtcttatctccagggctgtccaacaatgtggtcagcaaggtcagttccggcagctcctctcctgtggctagagctggctccaacatccagttctgggggccagaaatcaagtgtcagaggtcagggacagtagctgggtagccccaacctgccctctctgccagtgtccttcatagatgtccccacatgctttggtgccattccctgctcacctcatatagtcccgcctgacgactgtctgcctcagtttccacactgagacagtgtttggaatgatccaaccatctcctcaggccactgacgggccctggggggcctggggaacaggggccagagctgaggccagagctggggccagagggggcagccagaccggaggcagcagaagctgatatactcccctcactgccagcaatggaataggattctaatgggaggaaaaagagaggaggtgatagaccttgccccagctccagactcagggtccccagggaactcccagggtcttctctccatgatgctcagcctctctctccaagggctcactctcttgccatcctcatttgagctgcccccaggatagaaaatttcaccagggcacccctgggagaaagcacagtaaggtaaacacctggctctccagacctggaacccccagttacatgtggaggttccccatatcctgagcatagcatagatatgggggtgggggcagccatctgggcagacactggaagctgggggtggccatctgctctcctacaaccctccccctttcaatgggtacagaccattctctgggaaggggggaggatgagctgggtccatcagggttatctatggcctgggctcagggacagaagagctgtgattccttataaagccccttgtagaaccacctcattctcattcctccattcccctgtccctcttcagaagtagattcttagcaaaaggtttgaggaaagataatcggttctaggcctaaggggattgtggatggttttttctcaaacccatttgactaagggaaagagatgagttccctgccccttccccaatttccataacttgaactaacataaatttggaggcagaagggaccttagggatcacttaaaaaaaaaaaaaaaaaaaaaaaaaa

SEQ ID NO: 3607 - DNA, 689 bp, Macaca Fascicularis
  misc_feature (1)...(689): n = A,T,C or G
agcaagacatgaaatgtaaatacacctgacagcaacaggctcagcaaagtgactctctaaagtaccttgaacnnnnnnnnnnnnnnnnnnnnnnnnnnnnnnnnnnnnnnnnnnnnnnnnnnnnnnnnnnnnnnnnnnnnnnnnnnnnnnnnnnnagcccggatgacatagcaaggctttgtctctgcaatttttggttttaaattagtcagtgtggtgttgtgtacctgtagtcccagctacttagaaggctgaggtgggagcagcccttaagcccaggaggttgaggctccagtcagctatgatcatatcactgcactccagcctgggcaacagagtaagattctgtctctccaatatgtattggatacataattggtggtttaattatgaagaagttcaagattactgtcaaacaagctgcccacataggatgttggttatccttacttgagtatcttctccattttttatcttttcttgtgacttgtgaaaattcttcagttgttggcataaacacctcttatgaagggtatgttgttttctaatgaatgtcagaatctgtatattcttctgagataaatcattgaaagcgtggctatgtggtcatcaaaacaggtctcttttataccaaagctatagtaaacaggtcacacattgatgattggaagatttctctttctattcat

SEQ ID NO: 3608 - DNA, 1908 bp, Macaca Fascicularis
atgctcctgggtcgccgtgacttgcagccggcgggtgccgtggggcgggcgcagggtgcggtggggcggttggtgatcgtcctagcctgcggtagatggtgtgccctgccttcgctgcccagacgttaagaaaagtgcactatgtcagaagagatggataatgttacagctgaagaaattacagacaagcatctccaaaaagatttagatgcagaagaaaatcaaaatgtagtaaagacaatgagaggcaaagtgagagaaaagctaaaaatttctaagattaataaaggtgaaaaatcttcaatggagcagctcgttgagagcaaaatatatcaaaggtccaagttgtctccacagaccgaagtctcattggatgaaagtctttcatttttcattctgagtggtgaagaaggttcagctttgggcaagtcttcagagcagagaccagtaaaagatagttatcccaaatgcttttcacttggtgttaatttacaaaatgttgctgagagtgaagatgaagagtttatgaaagaattcattttgacagatttactcaaagtaaaagctgctgactatgaagatgatcaagaacaaataaaaaaacagaaggcaaatatttttgtaccaagtagttctccagtggtcaaccagcacaaactgccaaaagatatgatgccacgtattttagaagatgaaggattctatattcagagaaagccagaaatatataaaaagacctgcaacaaaatggaaaatcgcctgcttaaactagaagagggaaaatgttggtttggagagagtggagaaataatgtcattacctacacctattaaacagtcatggaatttcagactaaacgtaaggaaggaacctttaaatccgttacttaagaccatatacaggaaactctaatctaatttctcccaattctgtgagggaggaaatggtcttgacaaatctcaggactccttttttccttagtgagcagcccccaactctgcctctggcacttcttgctgccttgctttcttagtagtggcttatctagatcctaagagcccctcaagaaagactggacaggtctaagtaggaagcactatactttcttctagttgattgttttgtccttcattaaaagaaatgtatttatataatttccttacatatgacaaaacaacttgtcaaaaagaaataatcaaggaatatggatttccaaaggctgaccagagcagttttgtatgaggtaaagataagagaacattcacctctcccattgcagaaccactgaggtttcttggttcactcgcacaagcagagagcagagaccccaaatttatctgcagggaatacccaatctatatccgtttcctaaatgtgcatgggctggtgccagaaaagcctcacttatttgtggtgatgttagtcttggaccaagcttgagattactagaagaggcaaaatagggacatgagtgaaggaatgtttttttctcccaggttaaaacctaactgtatgtatcttgtggcatgcataagaaaactgatcagaatttttacttttatttgaatgtttttgtttaaatttaatgtgaagttttattattaaacaagtcccccactttgattgatttagcacaaaatgatgctgatggaaagatgaggacgccaaagacaggctgaattcatacaactcatttctgtacagcttttaatatttacatagctattttattagttgttcatggtttttagaattgataggctgcttaagagtaggctagcaagtgttcataggaaagcatggaggacctttctatattgtatcctttttacatgtgtgttacttttacaattaaattttttcctgaaaatcatgaaaaaaaaaaaaaaaaaaaaaaaaaaaaaaaaa

SEQ ID NO: 3609 - DNA, 695 bp, Macaca Fascicularis
  misc_feature (1)...(695): n = A,T,C or G
tttggagattttcnnnnagctacaagtgttccagtacaaccnnnnnnnnnnnnnnnnnnnnnnnnnnnnnnnnnntttatgtccctagtatctggtgtggtgcctggcatatggcatttcagaagtatgttcatagttgaaatagtacgatagatatttgtcatctnnnnnnnnnnnnnnnnnncaatttatagttgagttcatttctggtcagtggcacatggctggaaaatgcagaaaacaagttcacnnnnnnnnnnnnnnnnnnnnnnnnnnnacagctgcctcctggcagttcaggaaaactgcagaaaatgggaagtaaggtccggcaggcagacctggcatgtagccatcttgaatcccagggcatgaacttgccccaaaggtcagcacttgattaagcctcatccctctggtttatcacaaagaatagggtgggataaagagagtggacacttaaacaagccataaattatatggtccttgtctagcaggagacaactgcacaggtatgctaccagtgtttggatattgatacttacatggcaaatctgaatattgttttatgagaggcctggcaatgggaaaagcaccaaacttgaaattagaacataggtgcaaatggccactcctgcagtttcttttctgtaaaatgggacctggaaaaatgataccaaatgtttctttctgac

SEQ ID NO: 3610 - DNA, 643 bp, Macaca Fascicularis
  misc_feature (1)...(643): n = A,T,C or G
gttccaggtatcatnggaacaaggccccttggagaaggtcccggacctcatcagccaggtgttggccacttnnnnnnnnnnnnnnnnnnnnnnnnnnnnnnnnnnnnnnnnnnnnnnnnnnnnnnnnnnnnnnnnnnnnnnnaaggagcagcagttcgnnnnnnnnnnggcgctgctcctgcaaagcatccggctnnnnnnnnnnnnnnncctgctggtgaacaatgcctaccggggactggccagcctggtggaagtgtcagannnnnnnnnnnnnnnnnnnnnnnnnnnnnnnnnnnnnnnnnnnnnnnnnnnnnnnnnnnnnnnnnnnnnnnnnnnncacaaggatgacccagaggtggtggagaacgtgggcatgctgctggtccacttggcttcnnnnnnnnnnnnnnnnnnnnnnnnnnnntccagcagtatgaaggccctggtccaggagatcaaggagcgcttcacctccagcctggagnnnnnnnnnnnnnnnnnnnnnnnnnnnnnnnnnnnnnnngcggccacttctcccagccccccgggcagagaagcagctcagccctgatgctggggagcagacagacaccccacaggcccctcctccacgtgtgccctctccctgcccttcctttcc

SEQ ID NO: 3611 - DNA, 295 bp, Macaca Fascicularis
cctgatcccccaatccccaaaggcaaaatttcttccccttaatataagctctgccttgcctttttcaaaacagaagttaggattttttgttttctgaaatttcagtttttctgtggcctgttggaggattgtagaatgctaacaattacaaacttgataggaactaaaacatatttaaaggtttttttttttaaccctttttcttatttattggagtaagcaatacactgttatggttaaactccaaaagttacagagtttactgtgaaaagtcttccttcaatccctgtccccc

SEQ ID NO: 3612 - DNA, 701 bp, Macaca Fascicularis
  misc_feature (1)...(701): n = A,T,C or G
aggaagtcacaacctggcagggaaagaaaccataggcacagatttccacaacagatgggatgcgataaatgccacatacatctgagggacctatattatccacagacgtgcagggggatgttgcttagcaacccagatgtttcttaaactttaatacaggtgagaattcactggggattgtactgaaatgcagattccaattcaatgggtctggggtgggccttgagattgttcatttctttctttcctttctctcttttttttttttttttaagacagggtttcactctgttgcccagactccagactggagtgcagtaacgccatcatggctcactgtgnnnnnnnnnnnnnnnnnnnnnnnnnnnnnnnnnnnnnnnnnnnnnnnnnnnnnnnnnnnnnnnnnnnnnnnnnnnnnnnnnnnnnnnnnnnnnnnnnnnnnnnnnnnnnnnnnnnnnnnnnnnnnnnnnnnnnnnnnnnnnnnnnnnnnnnnnnnnnnnnnnnnnnnnnnnnnnnnnnnnnnnnnnnnnnnnnnnnnnnnnnnnnnnnnnnnnnnngctgatttttcatttctaacccaatgcagctggtccacagaccacactttgagtaggaaggccttagatgtccagatttttctctgtattatctaatcctccatccaaatgtctagaaatcaaaagcagaacaaaaagcaacca

SEQ ID NO: 3613 - DNA, 2108 bp, Macaca Fascicularis
agtacgttttaagaaaagggttctttgtcacatttgaatagagtatgtgtgtggagtttgctctttatttttttttttttttagcataaaaaaaatctacaagttggcagttggttgtacagatttcctctttgtggtggaaatactgggatgttgtgggagaaaaccgcagcctatcttaacacagatgctaattgtgttccgtaattcttcttggttgccattgcgatgttcttagctgccttttatttgttgtttctccaggacagaagtgattactaattacgtatcatgctacagtgaagaagtaggccatttggttttcttttctttttctttctttcctctattattgttactattattattattttttggagaggaaagtgaaaggcggcttagaggttttaatgctgctgctcatctctacatgcctaggctgcttctctaattcgcatgggtaccttgggcattgtcctgtggggctggggtagtttgacctcctctttagtttagtgacccttgtcatcttgctgttcattcctggggcctgtttaatgctaattaggccttcaaccagttgctgtttacaactgtgtgctttagaaagcagggccttctccaaagaccacattggtggtcttagctaaattggtagaattgaagacccccccatccccagagaaaagcctcttaacacttgtatttatttagaaatatgtaacagtcacaccattaacataaatacataaacaatgaaggattgaatatttgactctgatgcttcctaatgatggctggatgctccttaggaaaacttaactttgaggtcctaaaaaaacacatcatctcagcctcccctcccactgtgaacattggataaagataaggcaagagtgttgaaaaagagaggacagttaaatggtcctaagttaaggaatatttacattatgtttatctactatttgattaaactgattgaacaaaaggacaaaattcagtggactctatgtatgatatgtatctgattgtgctaaatataggttctcagaattgattacaggctttattcagtagatattttatctgcatttcagctgagagctttgctggccttcctagtgtttagataaaggaaggatcaggaactctaaacagacctctttggccaatactgtctctaatactcctcctgcctgattttgtggaagtattaactgatgtttgtacaagtcaaagatctcactcatgatcgctttggagagctgattacaaaggcacattttgaaacaaaacttttgagatcagcgtttggcatagccattgaaccacactatctccaagtagaggacaatgaaaataaatcggtgtcctatggacattgatattttctaccctttctagactgaatacaatgtggatggctatttatggcattacggttcaaggcttgtgtgatgcacagtgcctttgagttacttctaagtagcctcttttttcctaattttgataatgtgacatttattgcaatgaaattaataaaaattattgaatgttcctttttgcacagagacaagatacggagtttatagagggaaatgccttcatttagtttttcatgggtacaataaatataatgttgacaagctactttgcttgataaacttgtttatgtagtttctttcacaatgaaaacaaggtacgttagaatttttgattagaaatgcttcaattaagggcaaatgagcttggatgctaaatgggtttgaataatttcctggactttgagggaaattaataggtattaaaaaaagcaagtagggctgtccatttaaatagaagtccttagaacaattcatagtattagaagataaacctttttttgtgttggtgctgggtaggttttcagcctttaaataattttttgtagctgtttttacagaaaggtatctgccagggtgtgtgtgtgtgtgtgtgtgcgcgcgcgcatgtgtgtttgtatgtatctgagagagaggtggggggaggcccagacagagtgcttctaagccttcctaaagaccctcctttgcctcttgtctccttctcaaaaaaaaaaaaaaaaaaaa

SEQ ID NO: 3614 - DNA, 112 bp, Macaca Fascicularis
cagaaatacatatgaattggacttgcaccaaagccggcaccagcgctaggaatgtctaggtattcagaaggatggcattttctgcaagttaaagaaaatcaggatctgagtt

SEQ ID NO: 3615 - DNA, 746 bp, Macaca Fascicularis
  misc_feature (1)...(746): n = A,T,C or G
cataccaccaatgcccctttataacctgtgtcactttcacttattactgtggcccttctggtaactaggacataannnnnnnnnnnnnnnnnggaattaaccactgaaagagacaaagcacacctaaataataatgaacaaatcaagacctacaaaaaatgaacacatatatgctttttaattgtcattagnnnnnnnnnnnnnnnnatttgannnnnnnnnnnnnnnnnnnnnnnnnnnnnnnnnnnnnnnnnnnnttcttgaatgacattctcaaactatttattaatgagttagtctcatccctgctttctgtttcctctctctgcatcttctcttggtataggaannnnnnnnnnnnnnnntgtgttttttaatataagctttacaaaaaaagatgcattcccttcctgttcacactcttaccacgtttttgttcttccttaagaatgattgtgtgtgtgtgtaagtgtannnnnnnnnnnnnnnnttcttcacttgtaaagttttatctggaaatacttttacaagttatgttgaggtaaacaaagataatgttttaagatcgtgtattggatttggatttgtgtgtgtgtgtgtgcgcgtgtgtgtgtgtgtgtgtgtgtttaaagcatttgataaggtttaaatgttttttatacagagatttttgttcattaaactcagtctgcatcatggtctaatttctcttggtttgaaacaaattgaaaacttgaaccagaaaa

SEQ ID NO: 3616 - DNA, 1633 bp, Macaca Fascicularis
  misc_feature (1)...(1633): n = A,T,C or G
gagccggagggagaggaggatctcagcaggcctccagccgcttccannnnnnnnnnnnggagtgggctgaaggtgaagggaggaaggctgtgggccactctcccttctgagaggcagctgcagctcaggccctaatacactctttgccctgtggcttctccctttttcccccttctggttggaggagggagaagtgggaagtagtttgggaactggtttgtccacataaacttccccattgttccttggcccgccctcagggcagagccccctgcccaggctgggtaagagatgggcttggtccagcagggactctgagggaacaaacccttttccttctggggagagagtgcccccctaccatgtagttgaacaggggctaggagctccccactcccctccctttaacagcaggctgtgtgggtttcaattcccatccttcccaccnnnnnnnnnnnnnnnnnnnnctgtatcctatcatgtgtctgagtgtgtgtgggggggttctgtactaatttccatggccggtggcttttccttccatgcatcactcccccccgcatgcccaggggnnnnnnnnnnnnnnnnnnnnnatgctggggtcattgggggaggggggtggggctcacgctgtcctgtggtcttgagatttttatttttgcatatgtaatccattctgtacaggtagctaactttgtaaacgctgtgtattccctctgcccccatggctgctnnnnnnnnnnnnnnnnnnnnnnnnnnnnnnnnnnnnnnnnncctaccctcattaccatattgctgggnnnnnnnnnnnnnnnnnnnnnnnnnnnnnnnggctccaggaccacaaaagnnnnnnnnnnnnnnnnnnagacactgaccctccaatagccccagaagcaggagcctagggcccagcgatccatacccagtccttggaattgggaagggtaggacgctggccaagggccagtgctgtctcttgcttacagcctgaggcctacgggagcagcagctgtggcctggccgctcccaatgctgggggcttggcttggtgtcctgtccccttcctgactgagctctatgaaggactcttaaaaaaataaaatgcnnnnnnnnnnnnnnnnnnnnnnnnnnnnnnccctattcctgctaaggggtagagggagaaggtgaaggcggctaggtgcccataagagaaggctggcacaatcttcattcccgcctgtgtgatttcagtctcaaaaggtnnnnnnnnnnnnnnnngaaggatactccaggattcctatggaggtgtgctggggccatgctgagctgcccaggcaggcagccctgggtgctgggggcagacatgcaggacactgggaagagccaggaccacaggtgggagggaatctcagagcccaggctccccactgagcttggccagcagctnnnnnnnnnnnnnggaggaccctaaaagtgaaggaagatgacatcctcatttctacctgagttgtgcttgcacagaagggacgtctgtactcctgtggacgnnnngaggaggccccgtacctgcctcctgtgtcctatggannnnntttccatcacatcctttccnnnnctccctcncnnnnnccttgggcccagctctggc

SEQ ID NO: 3617 - DNA, 748 bp, Macaca Fascicularis
  misc_feature (1)...(748): n = A,T,C or G
taaaaaaacaaaaaaaactaagggctactcactagtaactagtgaggtatgaagaactgctaaaagttgcccataatcaggccgggcgtggtannnnnnnnnnnnnnnnnnnnnnnnnnnnnnnnnnnnnnnnnnnnnnnnnnnnnnnnnnnnnnnnnnnnnnnnnnnnnnnnnnnnnnnnnnnnnnnnnnnnnnnnnnnnnnnnnnnnnnnnnnnnnncacagtgacgggcacctataatcccagctacttgggaggctaaggcaggagaatcacttgaacccgggaggcagaggttgcagtgacccgagattgcatcagtgcactctatcctgggagacagaccaagactccgtctcaaaaaaaaaaaagttgcgcataatctaaaatgaatgtgttagtagattctggaaagagctataagtcagtatttgtaataggtgctgtgggccctgccgaagtccctctggccttacttacacctgtgggcttcatctgactgtgtctgcaccttgtggcctgagggcaaaagagacatcctgggagcagccgtcaaccaatcattgatgggcatttgataaacaccaaattctccatctccccatgtgtggaaaactctgaagcatgtgttttagtttccagaggttccccaggaattgcacacaggcactcaccatggtagctgcctcattgggtgacttctctgtcttccaccttccctaacagtattgcaacctctccccaacaa

SEQ ID NO: 3618 - DNA, 764 bp, Macaca Fascicularis
  misc_feature (1)...(764): n = A,T,C or G
gactgaaagtagnnngcntnnnggggcctggcgatctgtcctggcctatccgctgtcagccttgagccctggctgttctatggttcctctgctcaccgctcatcagggttctcttagcaactcagagaaaaacgctccccgcagcgtccctggcgcaggtgggctggacttctacctgccctcaagggtgtgtgtatattgtatagggggcaactgtattaaaaattgggggggggggcgttagataaggcaccctgggctgtcaggagactgcctactgggcgggtcaacttatttccactatgacatttgtatctttgttttttcacaattatattgaaggcagtgggagagggtgggttttacctgatattaaggggtagcaccccttccccaggcctgatgcaggtccatctagacagctcagattagcctgggccatgccctggggacagggcttaggggagctgggtcggagggggtctgcctgggtaacgagatctggcttggccctgagctgcttagggacgggtgagtccttgggggcatggcacagagctggccctgtgttttccagggtcctgagctgtccagggacagggaggaggaggatggcttctcctgggagaaggtgggctggcctttcttggcaagctgtcctctggcccctggggagtggggtgggtgaggctgtgccttgtaggggggagacgggagggggctctgtgtgcaccattctgtaaaacacactcaagattctaaga

SEQ ID NO: 3619 - DNA, 1964 bp, Macaca Fascicularis
tgactttttttatttttttaaagtatgtatgggatctcatgttgcccaggctggtcttgaactcctggccttaagtgtttctcttttgcctcctaaagagctggaactacaggcatgggtcaccatgccctatatattttagatcttgattcaagtgcaccagttgaacatacattaaggaatcttgctgaccatgtatgtggttaggtttttaagaaatttggaggtaatgatgaatctaggatttgctcagaagcttccgggatggggttgtaggcaatgaatgggatcaacatgaagtaagatcacatccccaaaaggttgggaaatacgggtccattagatacaaatttcttacaatgcagaaaatgaaaaacctgcgtatttcacctgggttactgtgacagtctcaactggtcatcttccctgtatttcagcatcagccagggtactgactttgaaatggattatagcactgcttcaaatcctgcaacaggttcttttcaattttttctttttaaaatagtttccccattctacctgcagctgtttttaactcagtttttctgacttctgcactatagctgaactgacctggctattcctcgataccaagtcctctgtcattaagcatttaagttgtcttttccctttggaatgctctcagctgagctgtgtgtctaactcacttaccttcaggtctattcagtgaatcctgccttgatcactctattaaaaataggggacctgctccttaaacttgtcctactgtctctttacccttctccacttgtttttgtccatacatttgtagttccgatatttacaatgtgtgtattcgttatatgctttttttctgctggaatgtaactttaacaaggatgtaattttgtactctggtgtattccaactacctagaacgatggcatgtagctgtttactgagccggttcctggattgccagggaactcagtaatggcagtgggactggaagatgtttgggaaggtattgacaggatttcaaaacagtacgaggcttgtgggagaaatttccaagtggcaatattacagttgggtggagatgttcatgagaggatcagcttgtgggtagtagctgctgtgggagtaaatgggatttctttgagcatgaaatggactggcatgctgggtctgaccttgataggataacttacaggctggttgtagctcaactgttttttttgtttttttttaatttgggtataataaatgagccgttgttccccagggaaaacgtttcttctgtgtctatggataagcacttgtgcactatttttgcagtttttagatgtaggtgtccacacatttttgagatggggtctctgtcacccaggttggagtgcagtggtgcaatcttggctcattgcaacctctgcctcccaggctcaagccatccacctcagccttctgtgtagctgggaccacaaatacgtgccaccatatctagctaattttttgtagagagggttttgccatgttgcccaagctggtctcaaactcctggagtcaagcagtctgcccgcctcagcctcccagtcatggggttacaggtgtgagccaccacacaccggccacattttttgagaaaatatacccagaagtaacatactaagttggcacaaaaactaggcagaagggttcaggggaggcagtcttgggcagagcccatttacaatgccaaacccattcacattcagcagttcttaaaattgaccaggttgttagttgaattcaagtagtcagcatgaaccagtttatttggaataaatacattgaaaattaaacatgtcacaatgtactggcctcattttccagaggctctgtaaataccatagttgtgatgtttccagattgttatattgaatatacaataaacacaagttaaatttttcacaaaaaaaaaaaaaaaaaaaaaaaaaaaaaaa

SEQ ID NO: 3620 - DNA, 751 bp, Macaca Fascicularis
  misc_feature (1)...(751): n = A,T,C or G
cagagctgtgtatctgttaatgagatacagcgtcatttctgtgaaatgtataaatgtatgtgcaggtcaaattaatatatgacattctatcagtctgtatacaggtattcctgttttgctaagctgtgcagattctgtaaaaataaattagtgcagtcaagttctaacatatctcattttatagactccattgacaatggtccaacccaaaagaaaaattggaaatgactgctaaccacacctcgttatgataccaatgatgaaaaagtcacttggtgcacctctcaacaaaacaggatgctttctccaagttcttgtatatgcaaatcatttatgaggcaagttttcaacagacctagaaagcaaaacattaaaagcgtgttgttagccctcctctctgcccctgcatcaacagacagagctctgggaccttggcaatgactcagaggttggggctttctgagtaaagggacatttctttaagcatcatctatcaaatttatttcaatgtatgatgtttttacaactggtcagttcttttgtattcttacagctatggttatttgattgtcctcttacaatttgttctacatgaaagagttctttgttagtcagaatgcaacaaactgtcatcaaannnnnnnnnnnnnnnnncactcttttgatgtagattaaaaactttttcataaacttaacctgctttgatttgctctgtatttttcctgcagctgtaattgctgagtgcctgttg

SEQ ID NO: 3621 - DNA, 710 bp, Macaca Fascicularis
  misc_feature (1)...(710): n = A,T,C or G
ctgcacaagaggtctntcctgctcacctgaatattcactcttccccatagacactcactttccctaactctattcctagcacctgtcattattggaatttttcatttcttttttgcttattgtctgtcttccctacttagaatctacattccatgagggtaggtgtgatggttaatactgagtgtccacttgattggattggaggatccaaagtattgatcctgggtgtgtctgtgagggtgttgccaaaggagattaacatttgggtcagtgggctgggacaggcagacccacccttcatctgggtggcaccatctaatcagctccaaaaatataaagcaggcagaaaatcgtgaaaagactagactggcttagcctcccagcctccatctttctcccatgatggatgcttcctgcccttgaacatcagactccaagttcttcagctatgggactaagactggcttccttgctcctcagcttgcagacggcctactgtgggactttgtgactgtgtgagttaacactacttaatgtatctaccctattcgttctgaccctctagagaaccctgactaatacagtagggaatgaatccatcatgttcatttctgtattccctgtctgtaggacagtaataagtatttgctacatgatgactgaatgaataactaacggatagccccacacaggcctgtgcacacctgctc

SEQ ID NO: 3622 - DNA, 1964 bp, Macaca Fascicularis
ttcatgaccttacaacttagggaagtagagtctgctcatcaaaaccttataaatttacaccctcatcccccaagcagatacctctggcaggcaggttggtctggcggttagggggtcagcactttgtccacctccaacatcaaggccaagttgccatctacatcaccaggtcttgctcagctcctagtcccgttctgcctgtcttcctgtctacatgcaggggcctgtggtattcttattctgctccctagagggtcgtctctccatttctcttggggtttcctggaactgaagcgtggtcctctcctacagtgagagagaaggcaattttgaagacttaggaaaggagcaggaggctgcatctgctttccagaagcatcttcagcgtgaagaagtaaaatgatccagtgcatcagaagtatcagcatgcataatgaaaggggccaggggtcaagtgttctgcaggctctgctgccccgagatgccatgccagaggcggacggcactgggagagctctttctcctgctgttctggggtcctggatggaatgccttcagaaatcttgctgaagatattttcctacttggatgctgtgagcctgctgtgtgctggatgtgtgagcaggcgcttttaccatctagccaatgacaattttatttggatcagaatctactcaaccgctttttcacctacaagatcaaattggaaagttaattcagtagagaagatagctgtgtctgtgagctttctgtcagttcaggataaagaagctggttattggaagaaagaatatatcacaaaacaaatagcatctgtaaaagccgcactagctgacattctcaaacctgtcaacccttacacaggccttccagttaagaccaaagaggccctcagaatgtttggtttaggttgggcaattatactgaaagaaaaaagtggaaaagaatatatcatggagcatgttgatctttccgtaaatgacacatcagttactgttatatggtatggcaaaaactggccgtgcctagcgtcattgtcaaccttagatttatgtggtgtgacaccagtttttatggactggtataaaactcccaccaaacatagactccgatggcattctttaattgcaaagtacaatctgagtcatttgaccgtatctaccatgattggctgtgacagactcattcggatcttctgcctgcaccctggcctcctggtgggagtgtggaagaaggaggaagaattggcttttgttatggcaaatcttcattttcatcaccttgtggagagaagcacattaggctcggccactattccctatgaactacctccacatagcccgtttttggatgatagccccgagtatggactgcacggctaccaactccatgttgatctgcacagtggtggagttttctacctgtgtggtacatttcgcaatctcttcaccaagaaaggaaatattgaaaatggacatgtgaagctcattgttatacatttaaaaaataacagagaacacctacctcttattggaaaagttggcctctcatggaaaactgatattttggatggctgtataaagagttgttccatgatggacgtgactcttttggatgaacatgggaaacccttttggtgtttcagttccccggtgtgcatgagatcgcctgccacacccgctgatggccctagcttcttgggacagacgtacagcgtggactacgtcgatgcggaaggaagagtgcacgtggagctggtgtggatcagagagaccgaagaataccttattgtcaacctggtcctttaccttagtatcgcaaaaatcaaccgttggtttgggactgaatattagcagtaggtggcaatttattgttgttatctagttgtttatttttgactggctttgttcttcgtgttgaaagttaaaataaagcaaatctgcagaaaaaaaaaaaaaaaaaaa

SEQ ID NO: 3623 - DNA, 1768 bp, Macaca Fascicularis
  misc_feature (1)...(1768): n = A,T,C or G
atagtaaagaggcttgtttgaggggaaaagttgaattttgtttggggcatgttgctggagattgcattttagaaaaaatgcactcctttacttagaatcctaacaacagcttacaaggcccaacatgttctaagggcttcctggccagggccggcagaggatggtgtgtaccacaggctggctctgaccccacgcccaccactctcctttcttctttcattaactgcatggccttcagcaccctgggcacacacctgccatgggcctgagatgccgtcccaggcagccacagggctttgtccaagccttctctgagtaccctgcctagaactcccactcctcttttcccttctcttaacacacatcttgtctagggacattgctaaatcccacagtctctgcctcagagtaggcactcagtgtctggtgggtgaatcagctgatgacattgaatagggggatagcgtcacggtcagagtctggattcctgggatttaggaagaaagtgagagacatggaaaggaatcagcaaatacacaccagtgtagggagggggtttgtcagggaaagggaaagacaggactagagctagttctaacctgagcaaacggcaggtcaggacaactcagaccagcatgtgcaggtggacagcaatggctccgtgctggtggggtatgagtgaaggtcatcccccacagttcaataggtgagtccctccacaatacatggggccatgcaggaagggcacagggtacactgcctcccgacccagaaccggtccaggctgggtgggggcccacagggcaaaggcgagcaccggctgcctgcccccacctctttgtctaccacttaccactgtcactcacccccttgcacagagggccatgacgggtgtggtaaatgtgtctgctctgttgcagcgctggggcaggaaggacggggaccttctgtgccctgagcaccgtcctggagcgtgtgaaagcagaggggattttggatgtcttccagactgtcaagagcctacggctacagaggccacacatggtccagacactggtatgctgcccacatatttgtccctgccaccacaccacctgcagcccttctctgtcagggccagctcagggaggaggctcttcagaggggcccacccaggagtcagaagactgtctaaacacagacctgcccttcccctcccaaggtgccccagatacacaggaagcacgttgggaggcaggatgtcagcaatgggaacatagcccctgttgccagaggatgggccaggttagaagagggtgtctgggtgccccacagggctcatctgcacttctctgtgggtaaggaagatccaggaggagtacctgcctttgggcttgggctccctgttgagaggtctgacttttaacaagccacacatccacagaggtttccctgaatcccatggagctagaaatgtttgaggagtaaagaaaagtgaatgttagtaggtttgggagacaaggttctgagagccagggtgcatgctagcctggcagccatggtaagtgtgggccatgctctgttgcactgtctcccagcccagcacatgcatgtctgacctctgtagagcctgagtcagctctggtcagctctgcttgtagaaggtctgctgcattcagcccagaaggggaatgctgtcagaactctggcaggcagatcagagctcaggtgaaagttcaaaaacattcagttcctcctcgattttcctacttcaaaaaaaaaaannaaa

SEQ ID NO: 3624 - DNA, 692 bp, Macaca Fascicularis
  misc_feature (1)...(692): n = A,T,C or G
attcatggaattacaatgggtgggggagttggtctctcannnnnnnnnnnnnnnnnnnnnnnnnnnnnnnnnnnnnnnnnnnnnatgccagnnnnnnnnnnnnnnnnnnnnnnnnnnnnnnnnnnnnnnnnnnnnnnnnnnnnnnnnnnnnnnnnnnttggttacttccttgcattaacaggattcagactaaaaggaagagatgtgtacagagcaggaattgctacacactttgtagattctgaaaaggtactttttcggatgtttgcattttgtattgttggaataacaagacaaaatagtgcgtgggaaggtacagtgggtggttgagatccacagacttttggtgaaatcgtggtgtgaatcctggacctcttagtttatagctgtgttaccttggagaaagtgcataagctctctaattctgtttnnnnnnnnnnnnnnnnnnnnnnnatacctggattcagggttggtaccttcagtgagtatttttaagtgaacaagtagagtctcttaaatcaaaagtcatgcctaccttaagaaagtctaatatgtacaaatctaaatttatnnnnnnnnnnnnnnnnnnnnnttgaagacattttgaaggcttcttttggttatgagtttccctagtgcattgaaagtaattgactttggcttttctgaaatacatctgtacaaggaacaca

SEQ ID NO: 3625 - DNA, 1706 bp, Macaca Fascicularis
ctaaaggactgtgcccagagcttgatcatctataatccacagcacctgttaacagcctggccaaagtgagaccaacagaatttatcagtggcgtccggcccttcccgagttactgtacatacccctctcacctacctcaaaaacacggaagttcctttgcatcacacaaataaatagtgggagatgaggatgaaataagaccactggaggaagacagaaacgactctccagtcctctgggggccacagtaacagggacagagggcaagcacagtggcagggaggtggctgagatttgctggtgtccgagggatcatttagagtaattaggacagtctgcatccaagctctttggacagcttttacttgcatgacccaatgaaaacattaatgaaaatctcaatgattttcttaatagatagaccccttcataataagaaacaaaagtagacacagcatggcctcagctggcaacacctctgagctgagcctgcactcgggaggctgctccttcattctcctgccattcacactcaccttgccacccctgctcggtgtctgttctgagaagcacaggaatacctgaggtgaggcacaatgacagtcctccactgttaagccatggcctaactcatatcttacacgtgtccttttaattgaagaggcgaagttggccaaatagaagcacaagtggagtaaagagaacattccccacctgctccgttagggcagcagcatgctggacgtgtggaggtcactctgctgccggactccctggtgtttccaggcagccttaccttagctgtcctccattgtcattagactccttacctattttttcagttagccattcttgctgttttcatatatccaatctatagccctactttcactgagattttcatgaatgttttcagtaagtagttctcagaaacagatcttttcttaaagaattgtgatcataaagggacccagaggcaattgtgatgtcccctcttccatttcctgagttgataggaaaattagcactctataaagtgttgctggctttgactcagtattcagggaaaatgtgacagtcagcaaccccagtagagccaaagagcagccaggatacaaggggagaaatcgagtctactggccaccatcccgttcccatcaggtgatagccaaggtccagcctgtagacacgcctctgtctccggctgactgaaaaacatgacctggagctctttcagtggccgaaacccccgtcgccacttgggcatgggtgcacgcacagaataactatttgctgctgaaaactgaaccactttgatactgaatgagtagcttcagctctctgcgactgtgggaaaggtccacatttcttctgtgcctcaattcttcatcagccaggctactgactcctaaggtcgtagtccctggcatcatcattcagctgtttagaaagcccgttttcccacactgtaactcctggaactgcaggtccagaacttgtcccctccaccatttcctcatcacacggcctaaaggaaaaaagttttatttcatcctttcctcctcagccctgcaagccatcccatagttccttaaaaagcccaataaatggatttcagtgtatgtatcttacaggcctctgctactaaggtttttttttaacatgctcctaagctcccagaagcaaaaggcttttacttccacagt

SEQ ID NO: 3626 - DNA, 302 bp, Macaca Fascicularis
gggactttcaggacaaaggaaggctaaaagtttgtcaagaagttgcgcatattttggttacctatgagaagggttgtgaccgagtacagtggcagctgttggccgcgctgctgaaatgagctggagctcatgcgtcatcagctacatttttcatcacttcatagtacgttccatcttgagtaaattaagccacaattcggtacctagggtctcaaaaactgcaatttatttttataaatgaattgtaaaagaaaaaatatctaattcttttaaagttagaagaaaatttacctgccgacagg

SEQ ID NO: 3627 - DNA, 1046 bp, Macaca Fascicularis
agggagcccagattctacctctccttccagcagtcctactttctggaactacagtcgttctatgggggattatgcacaaactttaaagaagtttcagtatcagcttgcctgtaggtctcaggccccatgtgctaacaaagatgaagccgacctcagctctaaacaagctgcagaagaggtttgggcaagagtggctatgaatagacaacttcttgatcatatggattcatggacagctaaatttagaaattggatcaatgagacaatattagtgccacttgttcaagagattgagtctgtcagcacacagatgagacgaatgggttgtccagagctacagataggagaggctagtattactagcttgaaacaagccgccctggtcaaagcccctctcattccgactttgaacacaattgttcagtatctagaccttactccaaatcaggaatacttgtttgaaaggatcaaagaactctctcagggaggttgcatgagctcatttcgatggaacagaggtggtgacttcaaaggacgaaagtgggatacagacctgcccaccgattctgctatcatcatgcatgtattttgcacctaccttgactctagattacctccacatccgaagtatcccgacggaaaaacttttacttctcagcactttgttcagacaccaaataaaccagatgttacgaatgagaatgttttttgcatttatcagagtgccatcaatcctccccattatgagctcatctaccagcgtcatgtatacaacctgccaaagggcagaaataatatgtttcatacattgttgatgtttctctacatcataaagaccaaagagtcaggaatgcttgggagagttaatcttggtctatctggtgtgaatatattatggatctttggcgagtaacaggtcatatatttaattccagacatttggacttttatttcactgaaccagaagtcaaaactaaacatctctgagccaccgactcttctgaaataaaatacacatgtgtgtatgttaaaaaaaaaaaaaaaaa

SEQ ID NO: 3628 - DNA, 731 bp, Macaca Fascicularis
  misc_feature (1)...(731): n = A,T,C or G
tccagtaaaacttgattnacaaaaatagtcagctgaccagatttgtctcatgaagcatagtttgtggacctgaggtctagtgagttagaatactgcttaccaaattttaatgtttgtgtgattcacgtaggatcagtttaaaatgcaaattttgattcaatacgtccggagtaaggcctagtaaaagtgtaagtgctatgctctaaaaatgtcgagagcatgattatcaccctcctctgctgtttgaggggtagggagcatttggagatgccttgttgcaggaacccattcagccaagctgtcctggcaaaccatacctcccacagctccctccacaccggctgtttgtccaatctaactttgcaccggagcaagatgtgttttcccaagatgaggagaggaaggttagcccacgctgctggatgtggaagggaatgggaaccagggaaagaatggtaactggggaggaagggaaaccatgatacttttgtagttggaggcctaactgggcgcgctttgccataacttggcccctctgcctcctttccactggaagtgccagaaatcgcagggcagcagtcgctcacctgcctttgtagacaagaaaatgaaaccatcaaagggtgaatttcagctagcctattgccatcactcttttatggtataaaggatgagagaggcggtgagggagacattgccccaaacatgatgtccacatcctaaggcttgcc

SEQ ID NO: 3629 - DNA, 698 bp, Macaca Fascicularis
tcattgtcagtggtataaataaggaaccagtaatatgccagtggttcatgaattactggacaaatagcagacaatgggagtccctttacagtaacaagcccacttagctgtccttgagggcttagataccattccacatgaagtagttagagcagcatttcaataggtaatttgtgtggttgtgccagaaactcagccctactatgtaattacatacaggataaaaggtaagtctgctcacatctccttctacagaacatttcaactgactggaataagagcatgggttgcatttagtactcaatcagatattactagaaaaaaagttaataatgtgagcctttccgagagcagaaagaggaaagattaaattttggaatgcttccttctgtctaatccatcaggggccaaaatgcccagtaaaattcaaacacatcacctattaatagactcacaagtgagaaaagaggttcctagggttactttaggcaatccctggtaaactgtttaaaccatcgaacccctacagtcagttttcagtatcttcatttaatattttaataagtttcttgtgaatttaaacttctcttctttcttaaggttgtgaaattccaaactgattttatgtgatttcgaaaagtttagaaccagtgctgagtgtatgtggagagtttatattccatatgtgatatactatt

SEQ ID NO: 3630 - DNA, 717 bp, Macaca Fascicularis
  misc_feature (1)...(717): n = A,T,C or G
tgtgnnnnnnnnnnnnnnnnnagccagcacgaggangtnnttncnagtgaaaatgtgtnnngcggnnnnnnnnnnnnnnnnnnccccctgcagccactaagaagggcaaatagagaaaggcaactgaattgaaggattggtcatgtgaaaagggctacatttgggaagctgggaaaggcctccgggcttctagagcttctnnnnnnnnnnnntggggctggattctcatacccaggctgccccttggattgttctacccaagcttttccctggggtctgggctcactccataaggtaaggtgcctttcaccttatgnnnnnnnnnnnnnnnnggacannnnnnnnnnatggacagactgccctagaggcatcacattggctcctggggccgtgaatatcttgtcccccagcggggctgagtgtttctgtcacagannnnnnnnnnnnnnnnngtgaaaatcgttgcatgcatgttttcatctgagcacgtccttctcccatactccctatcacccagccctgcctgtggttgctggatggtgattgcccttggacatcagtccaatgacnnnnnnnnnnnnnnnnnnnnnnnnnnnnnnnnnnnnnnnnnnnnnnnnnngcctcccagccctgcagagagcnnnnnnnnnnnnnnnnnnnnnnnnnnnnnnnnnnnntcatttcagaagagctacattgtgtcacnnnnnnntttta

SEQ ID NO: 3631 - DNA, 757 bp, Macaca Fascicularis
  misc_feature (1)...(757): n = A,T,C or G
atttattgaaacgnnnctgtatgtcaaaggagtccacaacttcagctacacaactttttgtatnnnnannnnnncatacttttgtagcttttatttcacatttaatttaaaatgacttttagcactannnnnnnnnnnnnnntttactccagacctataagnnnnnnnnnnnnnnnnnnnnnnnnnnnnnnnnnnnnnnnnnnnnnnntcatgtctttggtgctttggccctaatagcactggacaacaccacgaccacatggaaacatatttttggaagcaaaactttaattttgtataacgtatgctatggagagctaagaaaatttaaggactacttgttttctattttttttttcttaataaaatggaatccactgtgttgaagactcttaatatcatgtgcttgtctaaccattttttgttttataaattagaataaaatctagttgtgattnnnnnnnnnnnnnnnatttgtttggaaagctacatcttatttgtgaaatgttttttaaatcagtaactataaactgattcagcttttcgttaagctttgttcttggctgtaatacttgtgactcatgaagaattatgttgacaaacaggataaattccacatgcattttatttcccagtgagtcgtataaactttatttttgttgaaggttgtatgttaaatcaatgttacattcttatatcacttcttgagaaggaagttccgatttgaaattgtatcatttccttcaaaatgaagggc

SEQ ID NO: 3632 - DNA, 716 bp, Macaca Fascicularis
  misc_feature (1)...(716): n = A,T,C or G
tcaatccctagaagtgacctcaaacagtcttcactggaaccacaacaacagaaacttacgcatggcacatggccatgcagcacagctcccaatatctggtccactaagttgactcttgagcttagtgtgggaaattcttgcctcctttctnnnnnnnnnnnnnnnnnnnnnnnnnnncagaaatgcctggaatgattgtttggggaggaggtgttttgtttcaatataagctggccagtctggaaccaaaaggatgaatgtttaacttgtataatcttcttgcagagaaacaggcaagtgtttttgcaagcataaaaggcacaaagtggagtttatctttggtcagagagatgaagaagtaaatcacaaggcaaaatttgttgtttgtttgaaggcgagagcagtattaacaagcaaataaaatgccttgtatgatttccagagttacaattatagatcctaatcttgcaaatacatgtcaaccaaatgcacaacattttgggaaggatggtaaaattgtatgacggaaaaactcgtaactatttaagctatattgttttattaataaattgggtacttacagaattcttctaaaagttgtggtcttgtttctcttttcaaggcaatttcctaacagtaatttatttcatgtacgcaatgtggcctcagattagaagtagctctttcatagtacaatggaaacatggatcactgct

SEQ ID NO: 3633 - DNA, 603 bp, Macaca Fascicularis
  misc_feature (1)...(603): n = A,T,C or G
atnnnnnnnnnnnnnnnnnnnnnnnnnnnnnnnnnnnnnnnnnnnnnnnnnnnnnnnnnnnnnnnnnnnnnnnnnnnnnnnnnnnnnnnnnnnnnnnnnnnnnnnnnnnnnnnnnnnnnnnnnnnnnnnnnnnnnnnnnnnnnnnnnnnnnnnnnnnnnnnnnnnnnnnnnnnnnnnnnnnnnnnnnnnnnnnnnnnnnnnnnctgacctcatgatccatccgcctcggcctcccaaagtgctgggatgaaatatttgtcttgatcagggtgatggttacacaggagtatttactttgtgagaatccatcaagctgtcctcttcagatttgtgcacgttattgtgtttaagttattcctaatttattggcagtttatttccaataccctctgcaagttattctgatgtgcagccatcgttgagagccagcattttctacaactgttaggccttcctctttccctttctggagggccattgtgtttatcctaaaagtcacattcgcttggttttgtttcatgttttagatcttgaaaatccaaactgtgggcatcccaatctatgtaagttttgcattcatcttcccaccatcctgacagtctc

SEQ ID NO: 3634 - DNA, 553 bp, Macaca Fascicularis
caggtgtgatttgtatcaagcattatcataaaaagcagccagagccaacgctgaaatgtaaaggaaaaataggttctgtaattccagtaaatcatttccacatgctacaaggataatcgcaactctgctcagtggacatgaagataaattagggaaagccccaccaaccccgccccccactccgttttcctcccatggcaatgactttaggcgcctgtaagaggcacaaaagcagcaaagcttcttctaccacttcttctggtaggcttcagttaactgggacttttgctctagcgtgaggagggggccttctaaggaaagtcatgctgggtaaactgtgcaatgttacagagcacattgagtctgtggtcatcatggttcttctatcttcactgtcacctgtatcctgttacacatactcagctcctaattgtaagctcaattttggtattagcaaaagcaactgtcagtttttcctcaattactcacactttttcttgccgaaataaaataaacaaagaaaacaagtgtgggtcatcacacatctcgggag

SEQ ID NO: 3635 - DNA, 755 bp, Macaca Fascicularis
  misc_feature (1)...(755): n = A,T,C or G
aaagcagtgctatccatagaaaagtgagccatgtaaacaggcaaaattcattttaataatatattttatttaacccattgtatctaaaatactgtatcaatgtttaatcagtatttttaaattgtgggttttcacattctttttgtactacattttcacaatcctgtgtactttacatttaacagcatatgtcagttcatatattttcatcagaaatacttgatccgtatttagatttcataaatttacagttgacannnnnnnnnnnnnnnnnnnnnngattgtttcagacgtacctagggattttccaataactgcattgtgtatctgggctttgcaattaatttttaaattttatttaattttaattaatttaaaataaggcattttaatttaaaattaagatgcagttggggagctgaatgttaaattgtatttaatttggattcattttctcagtcacactggccataatttaggggctcggtagccgtatgcggttatcagctgccctattggacagcacggcactacaccacctggtcttgctgcattaagaaatgagatggcttcattggcttactgccctcacgtgtgagggcaacttcctacctctgtcagtgagatttcttttgtgctgccatgagcccatggtagccctcagggccccagatttgaccagatctctagnnnnnnnnnnnnnnnnnnnnnnaagactgaaattaactgatcttgaaacagaacccatcaatcaa

SEQ ID NO: 3636 - DNA, 3642 bp, Macaca Fascicularis
tttgattaacgtgatccaggatcgcagcacccccgacgggcccgctgatccccctctgctgcccatcccgcccccgccggcgctgcctccgcctgcgtcaaaggagccgcccccgcagccccctctgccaccgctggagtggcctgagatagagcccttttcaggcgacccagtctacctggctgaattcctgatgcagctagagaccttcatagccgaccatgaggatcattttcccgggggcgccgagcgggtggcctttctgatctcctttttcactggcgaagccaaggactgggccatctcggtcacccaggaaggaagccccttgcatgccaacttcccgcgcttcctggatgaaatccgtaaggaattctgtggccccatccccccacgtgtggctaaaaaggccattcgcaagctcaagcagggccactgtaccctcggcagctatgcagatgcttttcagttcctggcccaattcttgtcttgggatgactgccacctccaaaaccagttcctcaaaggcctgtcggaattcttccgcaaagagctcttatggtcaacagaaatggccgacctagatgagctgattctcgaatgtgtggagatagaaagaaaagtgcgcgttcccaagcctatcccgctccctggggttcgaaatatcctcttcccttttgctcccaatgaggaagaaagtgaagatgaagagtactacagtgaagatgaagaccaggaggcatgcaggcacaggcttcaccccaaagaccagaggaatcgcatgagggcttttcagcaagagatgaaggagaaggaggaggaggagatgaagaaggaggaagaaatgaagaaggaagaggaggagaaggaggaggaggaagaggaaatgaaacagaaagaggaggaggaggagataaggaacaagaatgaggaggaaggagagagtaaggatgaagaagatgaagatgaggatgggggccagaaaccagagcgggagccacagcaggagccagggactgaggagacctatggtgaggtggaggaggagccactggatgaggcccaagatgatgatctagatgagctaatggagatggagccgacctttgttcacgcctcatcccagacttctggccccacaaatggttaccacgccgaaaacttcctgggtgcatcgcctcccataatacagcctagcagacggaggaaccagaatcgagtcccacttctggaaggccttccaggcaccaattcaccattctacagctcccccccactgattcgccgcacaggtcgcttagggcaacgccaagttcgaagacgccccccggtgcttttccgcctcactccgagacaggggggccaccgagctgctcgtggccgaattcgagtgtgagtgctggggccagatggccacccagaacacacccttcttttgcatcccccacccctgctattgctgccatacctgccccatttgctgaccaggacttcagggagtttcagacctgcagaacctgaagaagacctgcagaattccagaccgtcttgcagccatgaccagagagtaacatgtgctcaaccagggccacctgggaaaggagggatcagcaatagctgccctcttggcatgtactctgctcagtcctgccacgagctggagagcaagtttctgggcctgttcccataaatgaactggtcaccctcttgtatttcccctctggttgttcctaacccacacctcgcctgcgtttcttcaccctgtgttctacagttttattctctgactgacccaccaggacttcacccaatgcctcactgatctgccccaatgagcaagaggacaggctaccctgaactcctaaagccaatgaggccagttgctagatacaagcaggatggtgagcaggatggtatccagaaatgtccctagaagcctacactcgtttcatgccacacctccagcagagggcctggaagaggacccgacatctagcccagtgagagtgtgcaaagccacatgtcaaatggacaacttgaccgacatttgcccttgactgactgtgcaggctggttccacttacagcacttgagtctacctttgcatagattcctgtatcagggctcttggactgacttgccacatctggagccctttactctcaccacattgccctcctgggcacccctggtggacagcacccaacattgcaggctccaccactttccttgatgttgcctaaagggtagccagttagggtttgggggaggagaaggaggaggaagaggaggagtagaaagaagcagcaacgatcattctgccattgtaaagagtgactctttccttagggatggtggtcttctccccttgccaggccttggactgcagcctccagtcaaaagtctttgcaggacactttctatccttggagttgcagaggaggactgattggccattccttctgggacagacagagagagggcccatggcctgctctgagctcccttcaatttcaaggaacccttagttctgagaggagagaggaaggctgcatccaccatggcctcacagctgggaccccttcatgtctctgacatgggggccaacccctggcctgctgctgtgcttcagtgacacagtaaagcttaagagggtggctgcctcctaggaactcctgggacttctgggtacaaactcaggtgcccttataaagagacccgctgcttgccttgagtccagaaagcactgcttctgcagtgaaaaacacacactatgtcagttctggccacaaaatgccagccaaatccactgctggcctgaacttcccctggacactggacttattgcacagtgactggcagcagagcaagtgcagccagggtttgtggccaaaggaaagaaagcatagtaaattcaacctctgttcctcatgggagtctgaccgataacctcaggctgaccttaggatcttgggcctggaggcaagaggaaagagctggaggaagaggagtcgcaaagaaacccagtcctctgactggtttctggtgaggtctctattcatcagtgggagaatgtattccaggaggagacctgctattcttcgaggtggtggatcctgtttgctgatggtcgacactctggccctactacctcatgtccctgtgaggagtgtgaaggacgggtgccttaaacccacacttccaggggcccttcagcacaggtcctgcctgttcccatggtgcttctcaccccgaaccctcagagccacagccagggacagagcagatgagcagtgagctggtttccaccctctgggggcaggaggggcttgggcttcccttggaccctcttccttcctttcccagatcttcaatatttgttgtgatgtaacagccataagagctgtaagaggaactgtgggctttgggagctttcttgggttgaaagaggggtggggggaggggaagcatgcaggggtatgaaggcagcccaaggtctcccagaggctcgggaggaaacttgtttggaatacatgtgttattgttgcattactgtgttgtgaagataagaagctgctctgtatgctaaagctttctctcctcaataaaaatataaagggtgtgtaaaaaaaaaaaaaaaaa

SEQ ID NO: 3637 - DNA, 1592 bp, Macaca Fascicularis
atttgcatcccattaaaacaaaattcaaccctccaaaatagacattaatccagacttaacaacaattgatcattcacaataaccagcattcttgcttattccctagacatgagaataggcaagaagagaaatacctatttatttaatccaaaaagaaggctgaaaaagataaacaatatgacaagagataggatagaaaacaagtacaaatatggtatacataaacccaaatatatcagtaactgcaacaaacgtaaatgcaccaaacactccaattgaaatgcagattatcagactgtgtattaaagtaagacccaacaaaaggcaagccacagagattcactttaaaatatgaagatactaccatatgatccagcaattccactactgtgtgtgtatgtataggtgtataggcagacagacagatagacagacaaacagaaaataactcaatgtgttggagagctatctgtactccaagatttattgcagcactattcacaatatacagaatcaacctaagtgaccattaatggatgaatggataaagaaaatgtggtatctgtatatacaatgaaatattattcagatacaacaaataaaatcctgtcatctgcagcaacatggatggaaacagaggtcattacgttaagcgaaataagccaagcacagatattgcatgttctcactcatatacgggagttaaaagaggggatttcatttcatgaaaataaagagtagactggtggtcaccagaggctgggaagggtaatggggaaggaggttgaagaggggtttattcatagacacaaatagttagaaagaggaagacctagcgtttgataaatcagcaaggtgactatcgttaacattcatctattgtacatttcaaagtaaccgtaaaagaataattcaaatgttcctagtataaagaaaaggtaaatactgacagtgatggattcctaaatatccaaactcagtctttacatagtatatacatgtaccaaattatcttgtatatcccaaaatatgtacattaattatatatcaaaaaataaaactgttagaggaaaacaaaaataaaatataaagacacaactagatttaaagtaaaagcatgacaaaagtacaccatgtatacattaagcacatggaagtcataaaaggataaatgtataccagactaagtggatttcaagataagaagcattagagatgaaaaagaacatttcatgctaaaagagcaaaatcaacagagaaatgtaacaatcttcaacgtgtctgtggctaataactgtcttgaaaaatatgagcaaaactggcagaactaaagagagaaatagaagaaattccaacttggagttgtagattttgactcttctctcagaaacgaattgaaaaaggagacaagaaatcaataaggatatagaaaacctgatctcagaacattatacccagcaactgcagaaaacacattttcttcccaagtgcatatgaaattgtcccagatataccatattctgggcaataaaatgagtgttaatacatttcaagactaatgagcaaaaaaaaaaaaaaaaaaaaaaaaaaaa

SEQ ID NO: 3638 - DNA, 692 bp, Macaca Fascicularis
atttttgtttggcttgcaatgtaaattatattgtacatctgctcctctgttattagatttactttgtgaataatatcttttaaaacttgagttatcaaaaacttaaattatgatgtcatcaactaataccaggtaaatatactaatatatatgtagggcatgattaaattgcatatattttgaaatgtcaaactattttttgttttttaaaaaaatgaatgcatctcttaaacctgtaccattcattttaaaagtttcatttggtatttcatattatattttaaaatatttttctgtatctagtagtacaggtttaaagaaactttttctgattgaaatgataaaatatgcctcatttcactagaattttaagaataatacatgtaaaagtataactcatatagaattataaatatccacaatatcttgcttttcatgtaacaccactttttacttattttgttattattctaaatcatccacaatgtaaatagcatgtttcatgatgtaaaatgtctttgtatttacagactgcagcacaaggtgaatttgtatatgaaaaatgagtgatggaaatttgggattcttataaaacaaagtggaaatgatcgttgtgtgttatatttacataattcattacaaaattgtctagttaagtcatgcatttatttaccttaaaaatgtccaaactg

SEQ ID NO: 3639 - DNA, 713 bp, Macaca Fascicularis
  misc_feature (1)...(713): n = A,T,C or G
gcccactgcgactggtgctgctggatgctggcattgtggcggagctgcaggcctccgannngaggaatttccgggcagttttcatggctgtggtgatggggcagggccagagagtggctgagctgatcctgcatcatgcccgggccagcgagtgcagggatgtggagggnnnnnnnnnnnnnnnnnnnnnnnnnnnnacccaggccaggaagaacaccatcaccctggagaagcttcatgtgtccagccttctctccagtgtctttaagttgctgatgactcacaaggtaaagcttgagagcaactttgcctccattnnnnnnnnnnnnnnnnnnnnnnaggggcttggccgctcgctggaccccaaactggacatcctggaggcagcgaggcccttcctcctcacaggcccagtgtgccctccgtgatggggcagtggcctgtgtgggcctttgtcaagagctggaggccacttccaagagcctctcctatggcagctgggatgtttaaaattgggacaccaatttcaaatgtgaccctccagtggtagaaggcacatcatggcttcctccgcttggtttgagggtctgttcaaaagctttgggccaattagggagtaaaaggagggaaggggcctatccattccattgtggaagctgggccaggtgccagggacactctccttcagggaaaangttctgtgtaggaggacg

SEQ ID NO: 3640 - DNA, 679 bp, Macaca Fascicularis
  misc_feature (1)...(679): n = A,T,C or G
cggccgcgcactttcacgagcccccgaagaaaaagcggtctgtggtgttggacgagatcctggagcagctggaaggcagtgacagcgacagcgaggagcagacccttcagctgtgagctggcgctgagaggggctgctgagctagaattcccacctannnnnnnnnnnnnnnnnnnncacagcttgggacttggtctctgtcctgccccatcctcatcacttgggaccacgagcccnnnnnnnnnnnnnnnnnnnnnnnnnnnnnnnnnnnnnnnnnnnnnnnnnnnnnnnnnnnnnnnnnnnnnnnnnnnnnnnnnnnnnnnnnnnnnnnnnnnnnnnnnnnnnntctgctcatgggcccagagccctgtgaaatgcatcaaggtcctctccgctggccaacagcatcctcaggcttctgtcaagtgcccgtgttcacattttctcnnnnnnnnnnnnnnnnnnnctgcctggaagggtcnnnnnnnnnnnnnnncagagggcaagacggagagggcagagcaagaactgcacggcatctgactgcggtcnnnnnnnnnnnnnnnncattccctgaagtgtgacctcagactaatgacgtcctgtctgagcctccgtttttctctctagnnnnnnnnnnnnnnnnnnnnnnnnnntcagatagaagtgccagagttaa

SEQ ID NO: 3641 - DNA, 165 bp, Macaca Fascicularis
tcgggaaagtgttttaaaaccctttgcggtggacaatggaaggcccggcttcatcggattcctgtttgctgatccacatctgctggaaggaggacagagatgccaggatggagccaccgattgagatagagtatttgccctccggagggtcaatgatcttgatct

SEQ ID NO: 3642 - DNA, 748 bp, Macaca Fascicularis
  misc_feature (1)...(748): n = A,T,C or G
gaagggcacattnnnnnaggggcatttcagnnnnccaaagaaaagaatgtatgcctgggaaagacagcaggagattggtgactggccctaatggtgcatgaaaagtgagggataggctgttagaatgtattaggtcatgggctaatattatttccaaaattgattggctggttgccaagaaatatatatatttgtcactagggcataaccaaagaatcaagtgatttcttgccatccttgcatagtcctcaagtcgtctcatcatctatgtgtatatgatggatgtgaccatttatatgtcatgtgttgagattaaagagtgtctggatgacatgttaattttattgagcatgagaaggtatttnnnnnnnnnnnnnnnnnnnagatgatgaaattttgatttctctgaatctcagagtaatttaagatgggcaaatccaatgagttgatgtaacccatctacattttgtggctatttcatgtataaaatgaaaggctttagttatttctagaggagtcccatccaacgctatttggcgactgttaatatgttataattgttaggcagtggaaaannnnnnnnnnnnnnnntgatttaacctcagtccaaagaacagtctctatacttgctctcatttactgataagctgctactagttaccatttgattgtcttgactttcgtcttcagttgnnnnnnnnnnnnnnnnnnnnaaacaaaacccactgtgtcttaaaataaaatgttc

SEQ ID NO: 3643 - DNA, 738 bp, Macaca Fascicularis
  misc_feature (1)...(738): n = A,T,C or G
cagtatcaggagnnnntnncgtnggnnnnntggtgaagatccccttcgtggctgggggtgcgcctgnnngtgcagtcagcatgtagctgcctttacatttcattctcnnnnnggctaaaaactgcagctacaagtgttacngtcttgaagcattctacnnncattcatttttttttttttaattttagaataacagtgtccccagaccaaaggaagcctgctagctcatttcatgtatagatttcccatcttcaaacagtttaggtgtcttcgttgctctggtcacattctgcataaaagaaatcctcttaagcctatggttaagaaaagccttgaagtttatattcagttaaaatgtatgttggtgaagatagccagtgcttctaattttgacttagtttcatacaataaagcctatatgtgaaatgcgcactctggaagatattgttcgtatcaatattttgctttttataacaagggtttgttcatattgatatcatttttgcaggatttctttgtgatttctgtcaatttgaaaatgctgacatgaaacattaacacatggagaccgtgccctgtggccctgnnnnnnnnnnnnnnnnnnnnnntgtttccttgtggattcactgcaactgtcggatgcgagtttctgtcgcagtcatttgtttcctgatacaattgctcttattcttttccaaaactgtaaaaaaatctcctccctcaaatgcaaaggttgtt

SEQ ID NO: 3644 - DNA, 567 bp, Macaca Fascicularis
  misc_feature (1)...(567): n = A,T,C or G
cccaaggattcnnnncccagactgtgaccttagatcatactnnncaccccccaccaatgcctcgactccccccaaatcacaaagaagaccctagacctataatttgttttcaggtagtaaattcccaataggtctgctggagtgggcactgagggctccctgctgctcagacctgagccctccaggcagcagggtcccacttaccccctccccaccctgttccccaaagatgggagagaggggattccccagcccaacgcagagttttcccagcaccctcctgtaagcagaagtctcagggtccagacccttccctgagcccccatccccaccccaattcctacctaccaagcaagcagcccagcctaggaccagacagggtgagcctcatacagactgtgccttgacgcccccagccttgggagaagaatttactgttaacctggaagactactgaatcattttacccttgcccagtgaaataggacctaaacgtctcccttcaggggaaagtgggtcacctggattgggggtagcgannngatactgttttgtaaactacattcc

SEQ ID NO: 3645 - DNA, 3497 bp, Macaca Fascicularis
ttacgtaggaaatgatataaccagcatgttccccaaactgtgtttcatggaccagtatttcagcctgataaagagaccataagaaaaggatggacaaatgaatttagaaataggatattatattgccctcttggagaaacacagtgcctcttagcctcttaaacactcttaacaggtcctgaactaagggaactgtttagaagtttggtttgtttcccaaatttatttgattagagaacaattttagaaaatgaaacactcacttctgccttgtttcttccagtaagggatgggaaattaccaccatcttgtatcttccttttagataggaatgcacgtagtactgagtgacatcatttaaatgaaagttgcccagtagtcttgtcatttttttgtgcatttctttcacacctaatattaatgctctcaaggtttaaatttttatttgtaaaactggcatctttgtccaatgtaactcttttttacatccaagaagagcagtgtatcaaaattaaaacgtactgcttttatcattatcctccagaagagagctggaggattcttttttcttatttctaagatattcttttcccacttcttcactttcctgaaattgggatgcgtatgcaatatgtgtgtgtttgatgttgtagattttttccccctagaaaagctgttgtaaagtcaatgtgtatgtcttctattcatctgtatcttaaaactgaagaaatctggtcttttggtatcttatactttcttcagtggtaagtttcaagtaagacaaatatgtgaagctcctgtgtttctggggaacagacacagactcaggctaccttaaggagcaggcagattactataaacataagaagggactagactagaatgttctttgggcctgaggcagttttctggatcagctgtggtctctatttctccttcatggctgatgtggtctatttgtttgtgcctgtctgttctttagttctactatcacagccaatcttttctctttttaccagtccaaatttagcaaagagccattctgattggtttaattatagacaccttaggggagcatagctgaggacccagacaaaggctgtcaggccatcctgggtcagatgccgacagtgatgctgtcagtggtccatcctagcacaaaaatgggcctgatgctactgccctgcagggaaggaggctgggcatactaagcattcccattaatatattcaggcaaacagaagtagtctatccctggttgatctaaaggacaagtccaagaaatgacttaacaagcttcttaattatgacagacctcttatgtgaggctaggtagctgagaataaggacaagagaaatttctaggattcagaagtaactggggctgcatttcagattgtcttttacttaccaccaataactgtataactgtattggatgagttggagttctacaggcaactcagtgaagcagagggaacaataaaacttgaccagaaaagtaatataaattatgaaatttgaaaatgtagtctacatttcgtaaactcagcagtttgcaacatgtgtattacactttgatatgccaaacaacttttctataacaacttaatcaatgggtatacttttgccattttttcctctgaagtttttactctacaattcttgagatgttcagctctaacacagacatgtgaattgatggttctctctcattcttttatgagtgatgaacatacagtactacttctatgggcctgtgtgccctagagatgactgtaacctgctattgatcagctgattgaagataaatggcttagctgcttgtattgcagattacatcattaacatggtcagtaaaccatgaattgttcaataaggcgtttatcttttttcattttacttctgctcttttaccatttttattagaagagacaaaattacccacactaaccagcaagatcagtagaaaagagatccagtagggtaccattatggctgcaaagttgcagacctctaacttctaatggtttaatggtatttagtatgtttttgaactgaagaaaatatagagttttaataatctttttttgtgtttcttttacagcttccttttgcctcatatttactagaagcagtactggaaaaaataaatgaaaaaaagaaactagttgaaggatatttcacaattatgaaagatattagatgatattaaaatggagagctttattacaaatgtgaaaactttttatgtggtgtgattggaatatatgcattgcaatcccgatacagtatctgctccaactatcaatacttaggttcaatacaaaaataagtagtctctgaaaataattaattgctgaacaagtgaaactaattaagtgcatagccatttaaaaggaaatagtgtagcatttgattgttgaatacaaatattgccacaaatcaatgcaaacttaaaaatgattttccttctagtgcattaaaagaaactgaacaggcttggcacacaaattggtctgagcataggaagaaaaagtatcaactaaggatttaatgttttaagtttcataaagaaactggattttttacataaaactgctacagatggccataagtggtccagggagcaacagatttgtattacgagcaaatataaaatgaagcatcataacttgagcatttattgaaataaattgtgtggtccaattgaatctgttctcattgatgtgccggtttatgtaggagatactgtgtatttgtacaactatttggcaaaaataaaaacatttccttctctcaaattcacaatagtatatgttgtgtaatcatataaattcacaggggaccacaaacccagtgtatgaaattaggctctaattaacagaactactactgtggtcaactaattaaagttacattcttaactatgatgtcattcttgcttagattcctgaacattcccacctcatttcacctcttcaccgtgttcctgccatacccttttcggttcctctaattcaccaaactggtgcctgcttcccacatttgcccttggtcttctctctttctagaatactctgcactcaactttcctcatggctggctccttctcatcattcaggtccagcttccctggtccctcagagacacattctctgaccagcttactattttatttcctcatagcacaaaattatctatctgttcatgtatttgttttcttgtttattttcttttttcccctctttagtatgtaggtcccatgagattaaaacaagggttggcagattatagcctgcagggcgaatctggcctgctacctgttttgtatggcccacaagctaagaatgatttttgccttattaaatggtttcaaaaaaatcaaaaggagaataatattttgtagcatgtgaaaattatataaaattcaaattttggtgtccttcaataaagttttattggaacccgaaaaaaaaaaaaaaaaaaaaaaaaaaa

SEQ ID NO: 3646 - DNA, 2451 bp, Macaca Fascicularis
aaaatatccattgtggaaaatacagactagtatgatgaaaaagtcttaaactcatctaccctttggtaactttggttgatgttctggcatatttccatccagtctttgttccgtatataaatatggttttgttgaatcaatgctacatctcaaacattttcccatgtcattaaaatccttcatatgccttttcatatgctgtaataataatctgttatatgggatgcctgacatttaggttattttcaatgttttactactgtaaataccagtgctgtgaacatttttgtggattaattaaccacatttcagattatttttttaggatagtttttaaaaatggaaataccaggtccagggcatgcatatttttaaggttcttgatcacaggctcccagttctgaagccagggctttgagatcccttaataaagactttgactttctggtccatttagcagaacttcatctacctggaatgaacaagaatgaactggctacaacctcatttcatgggttttggttctccacaggatctgcctcggtctttcagacattcctaaggaaaattgtataataactattacgggaatgcagttatctcatcatggtcagtctttggagaagtgggctgagaaattacatgtgttctattctctattttcattcctattgttaccttcacactgcctcaaaaccttccttttagatactcccggatatgagaatatatgttaattttagggttttacactcctgagtgaaacacagtgtcatcaagtacgtgaatgcccagctcataaatgactttctcattctcttcccacccagtcacatcctccaggcgatgaccttcctttatttctcattccgcttacttccttgacccctcagcatttcagactgaaaggacactggtactgttgtccttgtcagggcctgtggctttgcctctcgttccctggtgaatgtcaggaaatagaaggctgagcctaatgtttataggttctcgatttttcccccttggggacaagctgttgacttagctctgactaggagtaataaggaggcagtggggccaggctgcatgacagctggttttcagacccatataaaaaagtactaattttattatctcaagccatgcctggcctgttgcaaagcccagtgtgggtgtcttggggcttgtatttgagattggagcttctctgacctccaataccctttcctcaggggccatagtgtgtgtcacatgaatggcaaggtgaggtgaggcttgggggagctcctggtgctgtgtcacaccacctttcctgtgtgcattactctgtgcttgttcttttgcatacatctgctgatttgaacctcacggctctgacttaaggagcaggttttatgctgggggctcagagagaagtggacagcagattgttggccctcccaggaagaaaagtcccaacgagctggtggatgatctctttaaaggtgccaaagagcatggagctgtagctgtggagcgagtgaccaagagccctggagagacctgtaaaccgagaccatttgcaggaggtggctacccgccttggggcagcaccagaggaagagtctgcctatgtggcaggagaaaagaggcagcattccagccaagatgttcatgtagtattgaaactctggaagagtggattcagcctggataatggagaactcagaagctaccaagatccatccaatgcccagtttctggagtctatccgcagaggggaggtgccagcagagctgcggaggctagctcacggtggacaggtgaacttggatatggaggaccatcgggacgaggactttgtgaagcccaaaggagccttcaaagccttcactggcgagggtcagaaactaggcagcactgccccccaggtgttgagtaccagctctccagcccaacaggcagaaaatgaagccaaagccagctcttccatcttaatcgacgaatcagagcctaccacaaacatccaaattcggcttgcagacggcgggaggctggtgcagaaatttaaccacagccacaggatcagcgacatccgactcttcatcgtggatgcccggccagccatggctgccaccagctttatcctcatgactactttcccgaacaaagagctggctgatgagagccagaccctgaaggaagccaacctgctcaatgctgtcatcgtgcagcggttaacataaccgcccagccagctgcctggcgtccctcctgtgtttcccatggccagtggccatgccccatgaggatcgcccttcctgcccccttgtgcacacccagcagtccagtgcgacggtctcctctatagctctgggttcttagatcttggttggacatttgttttctccttagttgcatttcctgggtttttgtgacgatcaatggactttaagaaaaaaaaaaaaaaaa

SEQ ID NO: 3647 - DNA, 571 bp, Macaca Fascicularis
cagtgcaccggatgattcacactggcgagaagccattacaatgtgagatctgtggatttacttgtcgacaaaaggcatctcttaattggcacatgaagaaacatgatgcagactccttctaccagttttcttgcaatatctgtggcaaaaaatttgagaagaaggacagcgtggtggcacacaaggcaaaaagccaccctgaggtgctgattgcagaagctctggctgccaatgcaggcgccctcatcaccagcacagatatcttgggcactaacccagagtccctgacgcagccttcagatggtcagggtcttcctcttcttcctgagcccttgggaaactcaacctctggagagtgcctactgctagaagctgaagggatgtcaaagtcatactgcagtgggacagaacgggtgagcctgatggctgatgggaagatctttgtgggaagcggcagcagtggaggcactgaagggctggttatgaactcagatatactcggtgctaccacagaggttctgattgaagattcagactctactggaccttagtggacaggaagacttggggc

SEQ ID NO: 3648 - DNA, 727 bp, Macaca Fascicularis
  misc_feature (1)...(727): n = A,T,C or G
tctcnnnanccttcnnnnagttttccccagtgctcccgatgttctctttggctttcttctttcgggggtgttgactctgagagtttgcttatttaaaatatgcagactgtgtcaagtcgcacagggcagcaggtgtgtcaggctgcccatgctccctgccccctgcccctgcccagcacagagagccccgtgtgggaatccagttctggggctcacacgggctgtgggcaagtccctgccccctctctctgtccctttttcttgatctataaaacaggaggaagaaaaggaaaagaacaggagagaagtcagataaactccaatttttcttgtagttctgaatttctttctttggttgtcaaaggcaagttgattcctttttttaaaccacccttcatgaccttttctgaaacaggagcaagatttaagtatcactaaaagtgtttgtcaatttgacttttccacgcatgcacaaacatacgtttggcttacttggcatttannnnnnnnnnnnnnnnnnnnnnnnnnnnnttggtctttagggacacagtttcttccctaggacctactcagtatactgtgggaagggctgacttctctacctgatgccaaagacctgctgtctgtggcagccacaactatattaataaccattataactatgtattaactgctattaatcctctggaattgatcaaatatcgaaaataacgtctctttgtttttg

SEQ ID NO: 3649 - DNA, 762 bp, Macaca Fascicularis
cacaaacgtatggaagcacataaaagttacataaatataccagggagcctgtgctctccgatcgctgtgccataagtgcttgtgaggtatttgcaaagtgcatgatagtaatgctcggagtttttataattttaaatttcttttaaagcaagtgttttgtacatttcttttcaaaaagtgccaaatttgtcagtattgcatgtaaataattgtgttaattcttttactgtagcatagattctatttacaaaatgtttgtttataaagttttatggatttttacagtgaagtgtttacagttgtttaataaagaactgtatgtatattttgtacaggctcctttttgtgaatccttaaaaactcaactctaggaagcagctactgtttattatactaaaaggctgaaaaacctccaggccagactgctaagctctgaaattcctgagaggtctcagaccgggattctacttgttccaagaaagggtaaagcttctaaaccatcttattcttgtctccaagcatgaacacaggagcatgttaagaaaatctttacttcttccatgtggagaaatctacatattttgaattagaaacaaacaccctcacacccacttgaagatttttttcttgggaacattatgtcccatagatcagaggtgatgttgtctttgcctctactggccattgagaaactttgatgaaaaaaaagaacggtatagattttcaaacggatataaaatatttttatgctatgttatgccg

SEQ ID NO: 3650 - DNA, 754 bp, Macaca Fascicularis
  misc_feature (1)...(754): n = A,T,C or G
acagagccactgaannnnnggcngnctgctgtctcgtnnccctccatctgatccccannnnnnnnnnnnnnctaaagcatttgtgctctgtgccctatcttagcccctactatgtaattcaagagcaaagggaggccccaaggtgaaaatagggcactgaaaggctgtggtctggaggagcctaggtccagcacccctttttcagtatgagccccagttcagccggcctcagcctcttgctatgatggagatccacaagcctggccaagcttggnnnnnnnnnnnnnnnggactgagcccaggagagcgggggcagtcatgtgcctctggtaggaagggcacagttactggtaaggacacagagatctagtgggaagtaccatannnnnnnnnnnnnnnnnnnnnnnnnnnnnntggtcaagcgagataaaaagtcagagctggaagggccctctcattgaaggcaggcaagcaagagaggacaagggatgtggccgccgacaatgagcacagcactggccccagaatgcaaacccctccctcctcctcacgccactgcctctccccaggtgtaacgcccgtggccaggatcggnnnnnnnnnggttccagtcaccagccaacccttttgaattcctctacttcttctacctgaccccctctcctcactggcctggggccgaggaagtttgagtctgnnnnnnnnnnnnnnnnnnnatagtgaaagcctgaaacataatggttnnnnnnnttga

SEQ ID NO: 3651 - DNA, 3328 bp, Macaca Fascicularis
aaacggaagagtccagtagcctacccacagaaagccaagaggaggaggtgacagaaaattccacactggaatccctgtcgagtaagaaactgacacaaaaactaaaagaagacagtgaggctgagtccacggagtcggtgccgttggtgtgcaagtcagcaagtgctcacaacctcagctcagagaagaagcctggacacccacgaacgtcaatgttacagaagtctctcagtgtcatagcaagtgccaaggagaagactcttggattagctgggaaaacccaaacagcaggcgtggaagaaagtgctaaatcccagaaacctctgccaaaagataaagagacaaacagaaatcactcaaattctgataacacagagactaaagatcctaccccccaaaactcaaatcctgcggaggagccaagaaagcctcagaaatctgggattatgaaacaacaaagggtcaaccccaccactgccaattctgacctgaacccaggcgccacccagatgaaggacaactttgacattggggaggtgtgtccttgggaggtttatgacctgacccctggtcctgtgccttcagaatcaaaagttcaaaagcatgtatctattgtggcttctgaaatggagaaaaaccccactctttccttaaaggagaaatctcaccacaagcctaaggcagctgaagtttgtcagcaatccaatcagaagtgcacagataaggctgaagtatgcctttgggggatccaaggccagtccattttggaagatgagaagcatttcatttccaagactccagttctccaagagagggcaaaagaggagaacggaggtcagcctcatgcagccaaagtgtgtgctgggcagagtgaagaactgccccccaaagctgtagcatcaaaaacagagaatgaaaatctcaaccaaataggacaccaggaaaaaaagacatcctttgaggagaatgtgcgtggctcctataactcaagtaataacttccagcaacctttaatgtcacgagcagaggtgtgcccttgggagtttgagaccccagctcaaccaaatgctggaagaagtgtagctttacctgtttcttctgctctaagtgcaagtaagatagcagggcctcggaaagaagaagtctgggatacttttaaagtgtagcatccccaggaagaagaggaaaaggagggaaccccggattggataaagacagaagatataagaatcaaaaattcccaagaaggatttgtcaatcgaggaaaacatgacggatggtgaggtgaagtcagaagtatgggtagaagaggacctgggggacaagagcaacaatgtcataatgaagtcagactttggtcaagaaagtccttcccctggtaacactaggaaaatctttccatttcagcatgtttaaggaaaatagtccacaatgtctgccctgatcaatatgtacccatgggactttgaagatcctaggccaggtaaaccaggaggcacagaagacgtaccagatttgcaaagaaggaaaaggtataaacgtatataactgaaattctaagtagctgtccgagaagaacttactttacctatttaaccttgatagcactgctaatttaatgcatcccaaaaatctcttttatattaatgattgctttcattttcttatcaatgtatgtttcagtacatcgttgtgtctcatattcaagcattccagattgtataatttttgcaaataactttggtattatgtgacacaacacatttatgcaatctgcagctactcaattgttattgcaccttacagaatacctgctatctatcaactttagttgattcttgaagtacagtaacctttctctggcttcggaagccatcactgttactataaaaactttcagttttggctgtggtttatatattgtgactttgaatttgactctattatttcacatcatggtttgttatactgtcttaatcagggttttttatacaagttgagttacttgttttgcatttcttgttaggactcagaagctttattaatattggagatcaagtggtcctacttagtcatatgtctcaataagttaaggacaacttatccattgtttattcaaagtcagagatagataacaccttcattccaattaattgtcccttttaactctttcagtatttcatacttagcatttcctaaggaagaagctaagagtgagaaaaatatactgtgcattattattacctttggaaagggaagactctagggatgacatgagaagtatagcagtactacagacccgggaagtttgcctttcaaaaaaacacaggtagctcctgatagcactttcaagggattatttttttaaagcaaaaaattatggtagcatcaagatcgttgtatggatatatttttattatatgcactggaaatacagtattttaaaataccttaaactatttattctcgtaaactcttattcattgcttcagctagaggtagaatttgctgggctcaaatcccaaagaggttttataaccttatttattcaaagcctataaggtggtatggaatcttaattctcccaagcactggaaaatgtctaagtcctgcaaattgccattgtgagccacttgctcaaaatgtaacatgtaaggtctatttgcaaggcaaagcagcccccaaagcatattttataaagcttattgcattccacactgatctcttggcatgggaatcctaagctgccgacttagccctgccgatatgatcatgcaatgagattccaaagctcggtctcaaagaatcactcagaaatagaactgagacttccctttttctccctgtaaacaccgaagtatcaactgcttatttggccaggacactcccagcacaaataactatttgtttatgtcacaagcagcaaggaggacatgctagggtgataaaagatggagaaacagaatcagagagtggatatagggctgttcttagtattattttcagtggaaggtaaaaacagaattctccatattcatcgtcaaatttttctcagtgatttttttattcaggagtaagcaagcacttcactgttttgcaaagctgtgcacaaatcttcctcacccatttgctggctttatgcattactcaggttggtggggtcagtttgaaaagatatagaaattctatttttgtgtctttacaccatttatttctttgatctcttccttttcaatgaagggcctatatgcttggtgacctcctttaaggaatctttgtgaattgggttggaagttcctagacccacatacttgtttcatttaagccg

SEQ ID NO: 3652 - DNA, 703 bp, Macaca Fascicularis
  misc_feature (1)...(703): n = A,T,C or G
gtcataagatnnnnnnnagctgaagccaaaatatgcttcaaaagaagaggactttattgttcattgtagttcatacatacnnncaaagcatctaaactgtagtttccatggcaagtcaattacatccataagtggagaaggaaatagataaatgtcaaagtatgattggtcgagggagcaaggttgaagataatctggggttgaaattttctagctttcattctgtacatttttagttagacatcagatttgaaatattaatgtttgtcttttaatgtgtggtatcagctggactcagtaacacccctttcttcaggtggggatggggaatgcattattggaaaatggaaagaagaaagtaactaaaagccttcctttcacagtttctggcatcactaccactactgattaaacaagaataagagaacattttatcatcatctgctttattcacataaatgaagtgatgaatctgcttttatgcagacacaaggaattaagtggcttcatcattgcccttctacttcaaagagaatttatcccaaaatgctaagataaatggaagactcttgaacttgtgaactgatgtgaaatgcagaatctcttttgagtctttgctgttttgaagagttgaaaaatcctgttcagcatgggtgcccaccaaaaagtaatcttaagccatctcgatgtnacaatgaaacaa

SEQ ID NO: 3653 - DNA, 3275 bp, Macaca Fascicularis
  misc_feature (1)...(3275): n = A,T,C or G
aatcgatttgagtgagccagcgtgtcaatacaggctagcacaggactggcctcagggccacattggggcgaaatgcatggcaaaagcatggccaggcaggaggtgggacctgtgaggttggctacagcgaccgtgggcgctgggttcgcggctcctcagccctgagaggggacccaggcccaggcgggctcccagcctccagatcttctccccttgagacctcgccttctgcacagcgacagcaaagagcccctgagtcccactctgcagggatgtactgcatttccagaaagttccttccgggtgcagagtgacacgtgagccctggggattcgctccgacttggtactgattttctccacggaggacccgcagtcacggcccgtgtctgcacagcccctcggatctcgcggaggaattcagccggcccctcccccgtgcggttccctgctgttcaatccgaaaaccatggaggcaaagtcgggccgggttcaggctccatgcaaagtgccctttgcaaggtccccctgtggccaagcccagctccatgagggtacagtgagaacacgggagaggacttagagactgcctgccaccaccgagggaggcggagcgggattcgcacccccgtcatcgctgggcccacacgccgccgacggcttccgcgtgtggccatctgtctctcagaaaccctctggcagagggacccagcagatgactcgggggctgttcacactctgaaacctgcttggagtcaaaacactgctggcgagcctccgcggcaaacccaacccagacagtcttccatggtggcccccgcagtggcgggcactctgcccactccctgccagcccttgcccgctggcctccaggcccggccaggcccctgaccggtctcctgacccagcatgctgctcccccttgggcctggcttccttgccggctgggattcccaggcctctctagcccagccctgcagcaggagccccgagggaggcttggcagctgcagaggcgagtgggccacgcgtagcccggaggccagcaggaccaggagcccctcacagcgcagcagccacagcatcacaagccacttccactcctgggcgacctgggggcccccatcccggtctgagctgccccttattgtgacctggggccccctgtggtgggctcccctggtgcccccagatccagcctcagggaggttccagatgccggccaggcctcagcgcctccacccaggatcatacattcccatctcggcgcttccgccctccatcctgctccatgctgcctctgcttgttattccagcacattccggggcgatgcctgctgcagtggcgcagccagtacctccaccctaccccccacatgacccaccagcccctccgcattccctccgctctgtgccctcactgactggaagcctgcctggcccgaagggtcctcacctggtgagggtggggtgtcgccctcacctcccttccaccccagcccacccgtgactcagccccgaaaccctcacggctctgtcctcccagagggagccggtgacttggttctgatggtgcctggacccagccccggcatgttcagaatccttgtcctttaacctgcctccacctgtggtcgcctctgcctccctgcctgaccctgcaggccctgcggagcaaacactgctgcctgcaggagtcccccggggccctgaggaacagagacccgagcctcctgtggccccagcgagggttcctcggggggagacagtgagcccaaagctctggctctcgaggggtggacagagtccggctggcattgacggggtgcccctctctactggcttccacagtccttgagagcaaagatggtcccggcagtggagcagagggcatgggtggggcatccagtctccagggagccactgttgggtggggaggagcccgaagtgggctccggacccccgcggggagcatgtctccttccagtgggggcggctggttgatctgggcacaggggcaggagtagccccatctggtgctgacctcgaggccgtgcctctcggggcattttggcagacccacctggacctgggcgacagcctgatttcctgcagctgtgacccacaagggtggcagctctctcagtcttgacttaccaggacacaaacccaggccatttaatgtgcaggcagccccaagtcccggcagggccagaagcagaccgtggctggggacgaaagctgcatgctggtccctggggccccgctcactctgagctcctgagaggagggaagtccccacgccccactgggtggagtgctccttggcctaggaccccatcccatgtctgctgccgtgggggcggactctgggcagagagaggccagacgggcacccaggtgagctggaacacatccctcctgcttcccccagggtccccagaggcgacctccctcctgcacaggtgtctgtcacccttaccctctaggacgtctttgccatgtgcagcgaacccctggacaatgttgcgtgccacatcgccggatttgggctgtatacagaccgaagcatgtggcatgacgccttctgccgtcagcgagttctttgtctctcgatagtatgtgtccaggctgcccttcaaggtggcagtgagggcagttgtctcttgcacgctgtgtacagttctgtcactgacccttacacacagccttggagacgggagagtgtcgggagcattctgtgcaagtgtcctggcatgtgcgggcgtctccatggcacaaacccgagccggggaccaccccctcccctgcttccatgattccaccaactggggggggcagagccagggctggaggcacgccccgggtgacagcaggtggccatgccggtgagtgcacgcgttctcagttaatttatcctaaatatttgtaagtttcttgattactgcagttgcatccccaagataatgcccccctcaccacatagaaggcacatgtgctggccgggcgcggtggctcacgcctgtaatcccagcactttgggaggccgaggcgggcggatcacaaggtcaggagatcgagaccacnnnnnnnnnnnnnnnnnnnnnnnnnnnnnnnnnnnnnnnnnnnnnnnnnnnnnnnnnnnnnnnnnnnnnnnnnnnnnnnnnnnnnnnnnnnnnnnnnnnnnnnnnnnnnnnnnnnnnnnnnnnnnnnnnnnnnnnnnnnnnnnnnnnnnnnnnnnnnnnnnnnnnnnnnnnnnnnnnnnnnncaaaaaaaa

SEQ ID NO: 3654 - DNA, 768 bp, Macaca Fascicularis
  misc_feature (1)...(768): n = A,T,C or G
agaaagggctacttgcctatgggctcngntggctagagagaagagtaggaaaccagagtgcatgtgggtgtctaatacggaggagagtaggaacannnnnnnnnnnnnnnggtgactccgagtccagccccctggaggaggggtcagggagtaggggtaaagtagcacaactactgtttttttttctttttctattattattgttttttaagacagaatctcgctctgccacccaggctggagtgcagtggcacgattnnnnnnnnnnnnnnnnnnnnnnnnnnnnnnnnnnnnnnnnnnnnnnnnnnnnnnnnnnnnnnnnnnnnnnnnnnnnnnnnnnnnnnnnnnnnnnnnnnnnnnnnnnnnnnnnnnnnnnnnnnnnnnnnnnnnnnnnnnnnnnnnnnnnnnnnnnnnnnnnnnnnnnnnnnnnnnnnnnnnnnnnnnnnnnnnnnnnnnnnnnnnnnnnnnnnncgcgcctggccttatttctttaaaaagtgaaattaagagttgttcggtatgcaaaacttgcaaagatggagaggaaaaagaaaaggaagaaaacatgtcacccattgtctcaccagagactatcattatttcattttgttgtatttccttccactcttttcttctccacataatttgccggtgttctttttacagagcaattatcttgtatatacaactttgtatcctgccttttccactttattgttccatcactttattcnnnnnnnnnnnnnnnttttacagaactttttataa

SEQ ID NO: 3655 - DNA, 1396 bp, Macaca Fascicularis
  misc_feature (1)...(1396): n = A,T,C or G
tcagcaacgtcaagatggacatcctnnnnnacatgaggcggcaggcagccctgggggtcaagaggaagtaactgaaggctgtctcatcccatgtccaccatgtaggggagggactttgttcaggaaggaatccgtgtctccaaccacactatctacccaccacagacccctttcctatcactcaaggccccagcctggcacaaatggaatgcatacagatttgtgtctgtactgccaggcatgtgagtgtgggtgcatgtgggtgtttacacacaggccaacagggtgtgcgtgactgtgtgtgtgtatgggtgtacagccacgtgtctacctatgtgtctttctgggaatgtgtgccatctgtgtgcctgcagctgtgtaatgctggagaataaccacctttctttccagttcnccattccaatgatgatagttcacttacacctaaacccaaaggaaaaaccagctcgaggtccaattgttctgctgtaatcgatacctcaaccttagggccagcatctcccactgcctccaaatattagtaactaccactgacgtccccagaagtttctgggtctaccacactgcccaatccccaactcctccttcctgaagggccctcccaaggctacatccccagcccacagttttccctgagagaaatcaacctccctgagatcagccaagacagatgtgagagcaagggccacgtaccccatgtcaggggtggcgtcttcatgagggaggggcccaaagcccttgtgggcggacctcccctgagcctgtctgaggggccagctcttagtgcattcaggctaaggcccctgggcagggatgccacccctgctgcttcagaggatgtgccctctcccttcactggtccattggcatgagactcaccccctgtcccccaagtaaaagcctttctgcagcagctgagcctaccgtgtgtggtgctttttcaatggtggctgcccccgcctgggtggggagtgaggaggagaaggtggggcagggtaaagtggggaggatgagaaaagaacaaatacaacaacaaaaactttttacagtgggtgcaaaggtaactgtggttnnnnnnnnnnnnnnnaatccaaggctacctccccaccccacaattctccgagatcagccaaagcagagtgcaagggccacataaccctgtcaggggtggcatcttcatgagggaggccccctccgccacaaaaaaggggcaaaaatcacaattacttttgcaacaacctaatagctgggtgcagtggcgcactcctatagccccagctacttgggaggctgatgtgggattttgaggctatagtgcgccgtgactgagtctgtgaatagccactgcnnnnnnnnnnnngcaacatagtgagac

SEQ ID NO: 3656 - DNA, 733 bp, Macaca Fascicularis
  misc_feature (1)...(733): n = A,T,C or G
aatacagnnnnnnnnnnnntaattcaactgcacttaacactaatgtccatnnnnnnnnnnnnnnnnnnaaatcctatactctagttgaggaagatcttccataattttatggtattacacagggaaagctatgactgcannnnnnnnnnnnntatactattaggtgcatgtattctcttttcactaacttatacnnnnnnnnnnnnnnnnnnnnnnnnnnnnnnnnnnnnnnnnnnnnnaggtgtnnnnnnnnnnnnnnnnnnnnnnagtaagaattgccagcccctcattgtgcgggtctgcgtggagctttnnnnnnnnnnnnnnnnnnnnnnnnnnnnnnnnnnnnnnnnnnntcatgcatatannnnnnnnnnnnnnnnnnnnnnnnnnnnnnnnnnnnnnnngagtgggttaaccaggtcattacatcttaatttaataacaagcattactgtnnnnnnnnnnnnnnnnnnnnnnnnnnnnnnnnnnnnnnnttttttttaacctgttgtgtgcgtgtgggggttaggattagtnnnnnnnnnnnnnnnnnnnnnnnnnnnnnnngctgtgcagaagannnnnnnnnnnnnnnnnnnnnnnnnnnnnnnnnnnnnnnnnnnnnnnnnnnnnnnnnnnnnnnnnnnnnnnnnnnnnnnnnnnnnnnnnnnnnnnnnnnnnnnnnnnnnnnnaactgcatcatgttctggcactgtatnngaatgacata

SEQ ID NO: 3657 - DNA, 680 bp, Macaca Fascicularis
  misc_feature (1)...(680): n = A,T,C or G
agacgacgactgaaagcgcctggactcggggacccccatcacnnncgcccgagcctcgggtaacttcaggtagcgggttcggcctcccactcaccctccagtctgacaacggcccagccttcgtctccaaggtagtccaacaggtggcagccctcctccacatcacctggaaactccacatcccttatagaccccagtcctcaggatccaagaaatcacccgagtcaccttcaatnnnnnnnnnnnnnnnccctacacccaactgccaacctcagaccctaactacgccccttaacagcaggaagcagccagccagaccacggcgccccagattgttataatcaataagaggttggactgtctgggtgaaggggaaaaggacaagatggaggaaggagaatagaaaagatgcagtccctactacttccacgttcttcatccaacttacccgcacgtgggaaaatgcagcccgtgccgggaaaaaagcagaccaatggagcaggcatgaggtgaggacaatttgaggaaacaaacttactatggagacgtccctggcacgcccttatcccacccactgccctccaccctctgccctccaccctcggccccattgcttgtggaccgaggaacnnnnngccggagagcgcnnnngctcgacttctctggccccacttagagga

SEQ ID NO: 3658 - DNA, 750 bp, Macaca Fascicularis
  misc_feature (1)...(750): n = A,T,C or G
gaggtacagtnnnntccatctttgtgcactcgtgtgtctcaaaccatcttnnnnnnnnnnnnnnnctttttgctcagtgtccacagcaagatgacgtgattcttattttcttggacacagactattctgaggcacannnnnnnnnnttaagatgggaaagagaaagcatcagagccattcatttggagaaaacgtnnnnnnnnnnnnnnnnncttttgtagtcatttcaaaagagcacctgagtcatgtgtattcctggcctttgtaannnnnnnnnnnnnnnnnnnnnnnnnnnnnnnnnnnnnnnnnnnnnnnnnnnnnnnnnnnnnnnnnnnnnnnnnnnnnnnnnnnnnnnnaatcctcctgtgatgcaactgaggaatcgggtggccgggcaagctgggaagagcaaagccagagctgcgatgcctaaatacccacaaaagaccgttcccagtatacttaagcacaggatgtttnnnnnnnnnnnnnngtatttatcactcggacatctgtttataatataaacagacatgtgactgggaacgtcttgctgccaaaagaatcctaggcattggctcattgtatgtgaggctgaaccacgtgaaattgccaatattagactggcttttatctacaaagaaggagtttcatggggttcgacctaatagttacggaaactacagtccttataaaccattggcatggtaataaacagatcttaaggataaaaattttgtaactgggcct

SEQ ID NO: 3659 - DNA, 2578 bp, Macaca Fascicularis
attgtcagacccgttgtttatttccctcacattttcctaggtctgagctctggggtatttcttcaccggaaaagaattttggaggggtgggaggttgttttgcacatcctttaaactcttcctatttaagcattttagaggaaaatgatgttttccttcatgaaaacagataaaaacaatctcttgagtttccatttccactgagttcttgctacttagcagggaatacagtcctataaaaagagattaaagacctgtaaatatcttttccactaaatttctgagtataattttagtgctttactcacagccaagccatgagttcagttttgagatgagtgtttttcaaagtagagtccctggaggacactaagagggcgttctgtggatgaaaagtactctctggcaaaaagaacacaagcttagtgaggccgggtttcagccacataaacaggtatcattgattcaggactgtcagaatcttcaatatggcggttgcgcattggggatatggaagagagagatttccagagtctctgaccgtggaatcttcgaatgctgctgttctgcagaacagattttgagaagtaccgtgtgaaaatcccttatgttacagcatcatcatttattcctaaagaagcctcagaggtattaaagctgctcttttctgtgtagattcaataggcaaaatttcagctcctttttgaagcaaaaaatttatttttagaagatttaaagtgatgagatcttgtttattcagtagttctttcaccactgaagacctcagtgcctttcccgaatactgattccaggctagatttttctgggatatagacattttcgttcttatattgcctatatttagacagaagtttgtctaattcatccagcaccttactgttgccacatgcacttctaaagtgaaatactttgggacaaacctgaaggttttttcccttctagatgtcaactttcagaattatggaaaaatcaaccaaataccagtttaaagattcactccttcataatttaaacaagcccctgaagccctgtctccagtaggaattgttccctgccagtttgttctctcctcaggttcattgtttggcccacacctcgtcccctcaacactctccaaggctgtattccagttagcctactctgcctgcaatgtagcttttctcagtcactagaaaatgtgaaaaaagtatagtttgaactgtggaggttattaatctctacgacactgtcaaaggaaagagggggagttttatagctgcaggttattaacactcttgacaatagaaaagttgaccttttctccccctttgcatttaggctcttgcctctgctttagaaactggcagtgaacagaatatgcgttgtaaaagtagtgagagatgaaccaggcatatacttgataatccaattgttgggttactgaacctagggtattgtagtttaactttcaattccagggtggttggttgtgacagtaaatgtttccgtgccaccaatccttgttttctgttttatcccacctctacttcccatgtaaggaatatattgacacctgggaagagttagatccaccctcattttgacaacaccattacgctgggtaagatccactaggctgtgaaaacacattcataaaacacctaaggtagaatctaagaacacagtcttcctcttttcttgaggggcaatccaaacttataaacttgatacattacagagcactgtcattttccgtttcagccaatctggttcttattcgctgactgtaattacaaatgtaggtgtatgaattagttggttaaaacctcccaaagtgtgtgtgcatataagtgcattacatgtaactactctgagtgcagaatacctaatttaaatgagtgacagggagcacaacatcattggaattgtcggggaaacagaaattaggtgttttacagtcccgtctttgtctctggatgctgacttcatgtattagaagccagaggagcttcaaaatatgtacagaattgagtgggatattgggtgtaacctattaccatgagaaattggcaggaaggaaatcacttgttttctgcatgttcttatgtaaccttgaacaaactgttctgtttaataaaaaaaaaaaaagtctttactttttccttgcttaaaaaaatgagtttagctttccagatatttttgatagccgcactcgttagtatgccatctttttttttaaactgcctctctgcttgctttctccttccaacttcctaagttaaccctcaagtgagaatctcagcaaattgacttttagtaatattttaattactgagatgatgacagtgtggcccagtgtggtgaatcccatagtcatttcactcttatattctaatgtcaacaggattgtgctagtttagatgccctatttgtgtctaatcattttgtgtcgaaaatagatggggaagaggtcaaggacatagtctgtgaaaacggtgtgaacccggacctctgatcttcattcccgttccctttttctcccaacttatttgttcctatctcttcctttagtaaaaag

SEQ ID NO: 3660 - DNA, 755 bp, Macaca Fascicularis
  misc_feature (1)...(755): n = A,T,C or G
aaaaaaaaaaaaacannntaagattagttaataaatacttggttttatgttcattccattgtaggaacttactgattattacaaaacagtcaaaataggtcatagcaaaatgaacatttaagattaggttaaaacattcnnctgaaattttagtattcnnnnnnnnnnnnnnnnntactatattatatgaaaaatgatatttgaatcaaannnnnnnnnnnnnnnnntagccactcctttctaaaatgcaaatccaccctcccctcacccatgctttattatttatacatacacacacccacagacacacacagagccagcacccannnnnnnnnnnnnnnnnnttcaagacttctaggacctggatcatgtaagtagtagatgagaaaatgaagtaagaggtatagagcaataacaataaaagtcaatgatttcattttacaaaaaggtcattgtgtagtactcagatatttttaaaagcaagtattattatgactcaagtatatcatacttctaaattattatgattctcatctaatttcaagccacatataggagccatttgaaagcattttgtgttataacctatcaacaaaannnnnnnnnnnnnnnnnnnnnnnnnnnaaatttaccccatggggaattaaaatttttatctgcaagtatttctattgttgtgagactttaggacaagacaacatttggtattaacatagaagaatattctatggcttttttagctttaannnnnntac

SEQ ID NO: 3661 - DNA, 2021 bp, Macaca Fascicularis
  misc_feature (1)...(2021): n = A,T,C or G
ttttgcacattctattcccttgaaatatattctgtcttctttagttggttacttcctctgagatgctcagtcgtttattctgtatgtattttttaccacttactatatgttaggtactgttctaggtgctggagatagtaatgaataaaagaggcaaagatccctatgctcatggagctttgtgttctggcagaacccaggactgggttaggtgcttttgtcctcacacagtgccttaaacttaaaagaaaaaaaaaaaaaagtagacagtctctatgatttcagcttttctatcatgcacctttctgaatccttctaggagatggaaccacagctaatgaataaactgccttctctctcctttattatcagaacctgctctgatgaaaggatccgaaacttattcatggcaaataaaaataagggtttaaaaaatccctcccagggatattttattccagaaggccagagaaactttaagcttggggaattttaagcaccagattgcctaaaataaagtttaaaatttggaaacaagaaagaaaaaacaacctagaatggaaccagttaagttatggtgggtagtgtcactgtatgtcccgaagtcagtagccttgtttacctcctgttacatggatcttgggaagattggtaagccattttagaggaaaggtgctgttatcttataaatggtaattaattaatgagtgtgattttaaaaatattcttagtggccannnnnnnnnnnnnnnnnnnnnnnnnnnnnnnnnnnnnnnnnnnnnnnnnnnnnnnnnnnnnnnnnnnnnnnnnnnnnnnnnnnnnnnnnnnnnnnnnnnnnnnnnnnnnnnnnnnnnnnnnnnnnnnnnnnnnnnnnnnnnnnnnnnnnnnnnnnnnnnnnnnnnnnnnnnnnnnnnnnnnnnnnnnnnnnnnnnnnnnnnnnnacccaggagatcgaggctgcagtgagctgtgatcacaccattgcactctggtctgggtgacagagcaagaccctgtctaaaacataaaagttaaatttaataaaataaaaagtttaaaaaaattagcatggtgggatgaacctgtaatcccagttccttaggaggctgaggtgggtggatcatttgagcacaggaggtcgaagctgcagtgagcagtgattgtgccactgcactccagcctgggtgatacagcaagaccctgcctttatttaaaaaaaaaaaaaaaaaaaaaagggaaaatcttagaggacggatgcaatacaaagctctgtattataccttttgaatcccattgggggatctggttgaatctaagattttgactgcctagtttatgaagatttcctgctttaggcttgagtttgaattggaattttaaaaagagaagtaaatgctgtgataaattgatgtaatattctgtacagtgaaatggtaggataggaaatgaaaaaaagacaggttcatagaaaagtgagtataggggccaagaaagtgattgaatatagaggcaaaatgatgtagaagtggtaaatgggaaatctatgctgaaataatacagagtattaactaaagttggccttgtagtagtcagaggaagagaccacagttatgttctggatttttagagccccagaaagacccttaaaatctgccttaaaatatattttccatttactagtgaaggctgaacattcttttaaagatgtctttgtccttgtataatacaatatacccaaaagggaaaacactttatagcctttacagactaacttggtctgctttgaaatttggctcaggtaggccttgccatggagttacctgggggctattaaagaagtttaagtacagaagttttcataattacttccttaatttcttcctcatagtttgattttaaattagaagagaactactggaatatatgtatcctcttcaatcacttcccctagcaagcttcattagtctttgaaatgtttctccctgtaaagaacattggcaaaaaaaaaaaaaaaaaaaaaa

SEQ ID NO: 3662 - DNA, 122 bp, Macaca Fascicularis
ctaccaatgcgggccctttgcacccatactggcctcagcacctaagactggacaactttgtacctaatgaccaccccacctggcatatacaggctggccgtctatctcatgtcacaggggtc

SEQ ID NO: 3663 - DNA, 738 bp, Macaca Fascicularis
  misc_feature (1)...(738): n = A,T,C or G
cgggttaccccctcttgcctggggaggatgaaggggaccagctggnnnnnnnnnnnnnnnnnnnnnnnnnnnnnnnnnnnnnnnnnnnnnnnnnnnnnnnncgagccaaaaattttgtgagctccaagggttacccccgttactgcnnnnnnnnnnnnnnnnnnnnnnnntctgtggtcctcaacggaggccgttcccggagggggaaactgaggggcccaccggagagcagagagtgggggannnnnnnnnnnnnnnntgacgatccccttttccttgacttcttaaaacagtgtttagagtgggatcctgcagtgcgcatgaccccaggnnnnnnnnnnnnnnnnnnnnnnnnnnnnnnnnnnnnnnnnnnnnnnnnnnnnnnnnnnnnnnnnnnnnnnnnnaggataactgagannnnnnnnnnnnnnnnnnnnnnnnnnnnnttacctccaccttccagctcagcttccaaactgaggactaatttggcgcagatgacagatgccaacggnnnnnnnnnnnnnnnnnnnnnnttgccaaaactcgttagctgagctcatgtcccctgatgctggtaatctgaaagatacnnnnnnnnnnnnnnnnnnnnnnnnnnnnnnnngtagnnnnnagnnnntgttttnnnnnnnnnnnnnnnnnnnnnnnnnnnnntcttttcagcacttaattttaatgtaagaaaagttgttcatttnnnnnntcaatacatgagac

SEQ ID NO: 3664 - DNA, 552 bp, Macaca Fascicularis
agcccacctcagtcgcagagggtccctcggcaagtgccctgagagtgggccattcggaacattggacagaagcccaaagagccaaatagtcacatttggagaacccacacaggcctgagatacaaaacacttcgaggcaccccaaattacctgcccatttgtcgggacgcccacccacccagtgttacattcggcctcaccagagtgggtgtccccggggcacatgcggacggaccccttgcgcccccaggtttgcagctctcccctgggccactaaccatcctggcccggctgcctgcctgacctccgtgcctggtcgtggctctccatcttatctcctccccgtgtccccaatgtcttcagcgggggccccctcttgggtcccctcctctgccatcaactgaagacccccacgccaaacactgaatgtcacctgtacctgccgcctcagtccaccttgcggcccgtgtttgactctaactcagctcttttaacgctaatatttctggcaaaatcccatgcttgggtttttgtcactaacctgtaaacgct

SEQ ID NO: 3665 - DNA, 681 bp, Macaca Fascicularis
  misc_feature (1)...(681): n = A,T,C or G
atcacaccccatgttcaaaaacctttaatgggaaaaatcaatttacaaagggactaagtggaaacaactgaacgggctgattaaataagcaatgctctattcttgcagtgcagtcatacaaatcacgttatgcaacaatgattttcagatggagtcagggtgtctcaccgggtcaggcaggcgtcacggctcctgcatctgccctgatcccaggagctctagttttacccattttggcttttgaggtccctagtaaaatgttatttcaaacagagcgccaatgaagaaaatttttaaagatcattattgaaaaagaatttttaatgactgagaaagatgataatagaattataagcagattacaaatagaatgtgttttatgtcccttttgggggaaaaaaagaagaaatatgtgtacagaaaacaatcagggctgggcccannnnnnnnnnnnnnnnnnnnnnnnnnnnnnnnnnnnnnnnnnnnnnnnnnnnnnnnnnnnnnnnnnnnnnnnnnnnnnnnnnnnnnnnnnnnnnnnnnnnnnnnnnnnnnnnnnnnnnnnnnnnnnnnnnnnnnnnnnnnnnnnnnnnnnnnnnnnnnnnnnnnnnnnnnnnnnnnnnnnnnnnnnnnnnnnnnnnnnnnnnnnnnnnnnnnnnnnnnnnnnnnnnnnnnnnnnnnntc

SEQ ID NO: 3666 - DNA, 735 bp, Macaca Fascicularis
  misc_feature (1)...(735): n = A,T,C or G
atgagtgcaagttccagctctgtnnncagcgaccctgaaagcacggagcgagagctgctcaccaagnnnnnnnnnnnnntgttcannnnnnnnnnnnnnnnnnnnnnnnnnnnnnaactactggtggactgactcnnnnnnnaattaaccaacaaaacccttgtaaaactttctttcttttttcttttctatttttgaaaccaacttgcaatgctgttcatggaggatgctcaggaagatgagagaaaattagtaggattagttggagagagtgggagatagatgagacctctgctcgtaagatgttactttcatttacaaatcctacaaatagagaggcagaataggtggggtatagaaaaatgtcaggctctcatagttcccctttaaattgctaaaaaatttgtatactcataggccatgaggaacaaatacttttttttttcatggtcccttccttttgtttttgtacaaaaaaaaaataataataataacagttttgctacaaatatccgagtagcataacttcacattgtgttggaagatttgtcattgaggaaaacatctgcttaaattacaggaatttttgtattatacagctctgaaaattctgccatttccttattaactagcagctttagtttgtagtttatgaaatctcgaggggctcttttactgggatttcttatttctgttttttgctgttttcnnnnnnnnnnnnnnnnnnngggtcaa

SEQ ID NO: 3667 - DNA, 282 bp, Macaca Fascicularis
gaggtgggccccctggaacacccatcatgcctagccctggagattccactaactccagggaaaacatgtacactatcatgaaccccatcgggccgggcgctggcagggctaatttcccgctcggccctggcccggagggccccatggccgccatgagcgcgatggagcctcaccatgtgaacggatccctgggctcgggcgacatggacgggttgccgaagagctctcccggcgccgtggccggcctgagcaacgccccgggcaccccgcgggacgacggcg

SEQ ID NO: 3668 - DNA, 692 bp, Macaca Fascicularis
  misc_feature (1)...(692): n = A,T,C or G
gnnnatntttgtannnnnnnnnnnnnnnnnnnnnnnnnnnnnnnnnnnnnnnnnnnnnnnnnnnnnnnnnnnnnnnnnnnnnnnnnnnnnnnnnnnnnnnnnnnnnnnnnnnnnnnnnnnnnnnnnnnnnnnnngctagaacatctatttttatacccagagagcgccctcttaggacagaaccannnnnnnnnnagccgggaagccatcctcctggcgcccagcatcggagctgctacccgtgatgggcgggctcaggagagaactgggggtcgcggtggaagttccacagctggccgcgtgggggagcccttgcactgtactgccgccgcctgactgcgccgctgcctgcgcagctcctgggccggatttcttttcattcccttcctctctcccggggtgcctggcccnnnnnnnnnnnnnnnnnnnnnnnnnnnnncgactcctctccggttgcaacaccagagagaaaggggcctccacatgcccaaggaggtggggtccctccttgacgatgtagccctactcttgggcccccaaattagcagagtaatcaaagcttcctaccatttggcctactatgccagactattcccttgagcggtttcattccaaaatatgcagggctcaggctccctactccgggcctgtctgctttgcttcatccctgaaggatgaggggcaagccggcc

SEQ ID NO: 3669 - DNA, 2338 bp, Macaca Fascicularis
aacgacgacggccgacttcaggcctgcggctggagcctgcccgccaagtacaagcagctgagtcccaacgggggccaggaggacacgcggatgaagaacgtgccggtgcccgtgtactgccgccctctggtggagaaggaccccaccatgaagctgtggtgtgctgcgggcgtcaacctgagcggatggaagcccagtgaggacgacggtgggaatggagtcaagccagcgccaggccgcgaccccctgacctgcgaccgcgaaggagacggtgagcccaagagcgcccacgggtctcccgagaagaagaaggtcaaggagcttcctgaaatggatgccacctccagccgggtgtggatcctgaccagcaccctgaccaccagcaaggtggtgatcatcgacgccaaccagccgggcaccggggtggaccagttcaccgtctgcaacgcgcacgtactgtgtatctccagcatccctgcggccagcgacagcgactacccccccggggagatgttcctggacagcgacgtgaacccagaggacccgggcgtggacggcgtgctggccggtatcaccctggtgggctgtgccacccgctgcaatgtgccacggagcaactgctcctcccgaggggacaccccggtgctagacaaggggcagggggaggtggccaccatcgccaacgggaaggtcaacccgtcccagtccacagaggaggccacagaggctacggaggtgccagaccctgggcccagcgagccagagacggccacattgcggcccgggcctctcacagagcacgtcttcactgacccggcccccaccccatcctctggcccccagcctggcagtgagaatgggccagagcctgacagcagcagcacgcaaccagagccggagcccagcggggaccccacaggagcaggcagcagtgctgcacccaccatgtggctgggagcccagaacggctggctctacgtgcactcggctgtggccaactggaagaagtgcctgcactccatcaagctgaaggactccgtgctgagcctggtgcatgtcaaaggccgtgtgctggtggctctggcggacgggaccctggccatcttccaccgtggtgaagatggccagtgggatctgagcaactatcacctaatggacctgggccacccgcaccactccatccgctgcatggctgttgtgtacgaccgcgtgtggtgtggctacaagaacaaggtgcacgtcatccagcccaagaccatgcagattgagaagtcatttgacgcccacccgcggcgggagagccaggtgcggcagctggcgtggatcggcgatggcgtatgggtgtccatccgcctggactccaccctgcggctctaccacgcacacacgcaccagcacctacaggacgtggacattgagccctacgtcagcaagatgctgggcaccggcaaactgggtttctccttcgtgcgcatcacagccctgcttgtcgcgggcagccggctctgggtgggcaccggcaacggagtggtcatctccatccccctgacagagactgtggtcctgcaccgaggccagctcctggggctccgagccaataagacatcccccacctctggggagggcgcccgtcctgggggcatcatccacgtgtacggcgatgacagcagtgacagggcggccagcagcttcatcccctactgttccatggcccaggcccagctctgcttccacgggcaccgcgatgctgtgaagttctttgtctcggtgccagggaatgtgctggccaccttgaacgggagtgtgctggacagcccagctgagcccctgggccagctgcccctgcctcggaggccgagggtcagaagctgcggaacgtgctggtgctgagcggcggggagggctacatcgacttccgcattggagacggagaggacgacgagacggaggagggcacaggggacataagccaggtgaagccccactgcactcctgtctgggaggccctgatgagggcagcccagcccccgcacccacccccaaccagagaagcacagatcttggggagctgccccacaagccccgctggccaccgtgggctgcagccactgcgctgctggcttctccccaccatccctgccacctccactgtgatgtatgtctgctccctcgtctgttcccccaggatctcgaagtgactccgggctgagcagtggtgcggctgggggaggggtgacgattctcctcaggctttggccctgcaagcaaacccacatatctgctctgtatgtaataaacgtctgtttctggacccaaaccgaaaaaaaaaaaaaaaaaa

SEQ ID NO: 3670 - DNA, 816 bp, Macaca Fascicularis
  misc_feature (1)...(816): n = A,T,C or G
gaccacctccaggggcctgtcagcctgctggtccccccaacagatctctgggggcagcctctataggacaagagtgacacagggctggaggagaagaggagtgaggggcctccttgtgtctgatgcacagatgtggccctttcaaaccctggtgtcaccctctgggtgactggatccccagctccaccctcttcctgggccagccaggaaggacggaggaaagctctttgctgatcgcatgtgtgggaatgtggggggagactgagccctccccatgcaaggggctcggcctgggaccctggaacctgcttccatactgggagaaatgtgcatcagagtgcnaggggtccctaccctcagagacccccgactgcagggagccccaccccataagaggggcatggaaatccatgtcctccccaccccgccgccccgtggcttctgccgtggctgtattggcctagaggggctggctggggaggagcagggctgagcccctcagcatctgctcctgtccctgccttttcacgcctgctgcttgaagtggtagccccgcctgctgcttctccacctcccctccccacctcttctctccccgacggggcccttgctgcgtgatggggtctccatgcactttatttatttgcagtctgtttgccaggcggtggagcttctannnnnnnnnnnnnnnnnnnnnnttttctgtgcgtgattcactgtgtactggtcagcacaggctggccggagacatgttcttgtttctggtgttgtcacgtcttcttgttttctctaagttaaaaaagaaaaaaaaaagtc

SEQ ID NO: 3671 - DNA, 721 bp, Macaca Fascicularis
  misc_feature (1)...(721): n = A,T,C or G
atgaatcatactttctggtcacaacttttagaggcaggctattatttcagcaggccactctctcactttttcttttccctctctgactccttcatcctctaccaaagtacagaaaaaagtatctctagcccccttctgtcacccacaaatcagtgtatgatagtcaacaaaaactgaggaaagactcctagccaagaaagagacccactaaagagtggtgtttttgttctgatcattctaaactatacaaggctgatgtgacaatacaaatggtgcacctctgtaccttttttttggtacaccaacagttgttctatgtccccatcatttccttttgagaccttgaagtttcaataacattcttgaccttactgtattcaatgttaaacacttgaatgctacaaagagcatgtgcatgggacattgctaggctgaaaaaataaggcctacctctcccaggccaagctgttttggacatgatnnnnnnnnnnnnnnnnnnnnnnnnnnnnnnnagagaaccaagcagaaaaggaaagtttcagagatgaaaaataggcttaaaaattaaaatgtggcaatgtaaaatcttaactcctgaagaccaatgaattaccaaaaacagtgaannnnnnnnnnnnnnnnnnnnnnnntatttctgtgaggcaaattattttaagattactaggaaaaagacagtnnncaataagttgagcactttgaa

SEQ ID NO: 3672 - DNA, 332 bp, Macaca Fascicularis
cacggcagtaccttccgcgagctgcacctgctcatggccagtctggactgaggaacgcagtgggcaggggcgcttggctgccctcagggcctggcctcagcccccactcctgttccttttgtgcctagtggcccatgagcctctgcctggcccctgccgctgtcctgtggccgtcctggaggaggtaacgctggtccctggccacctctacagccctgaactctgagacaactctctccagcaatagctgcccagctttgcccaactgttgcttcttggggcagcgaactgagccctggggctgctgctgtaatttataaggcaaatttata

SEQ ID NO: 3673 - DNA, 638 bp, Macaca Fascicularis
  misc_feature (1)...(638): n = A,T,C or G
tcttaatatgtagggtcatttaaattttaagacannnnnnnnnnnnnnnnggagaagccttaagaaaaaagaaaacgggcaagcaaatannngaagaaaattataaaactatagatttctttaggaaaaaaacagacataggaacagttttctcttcatatattatgattgtgaataataggaaaaattgtattaattcagtatttgtctgaattaatatgcagtattttaatacctacataagtctattttattattatattttgtgcttggtatatttattcctttatgtttttaatcactaacatattctacttaagagtataaaactccgctaaataaattgtattgtatctggaatatacttnnnnnnnnnnnnnnnnnctgggtataccattatttcaagcaatgagtctgaattctattagtttaaaaattgtaaaattcaagttaaatgacatgtatgatatataagcttaacacattttctatagcccttaattccgttgtgttaatttttcaatgtgatgtatcaacagctttttttattttgcatttattttttcaatgtgtttacattgtatgaatnnnnnnnnnnnnnnncatattcttgatttgtagttgcttggcaggatttt

SEQ ID NO: 3674 - DNA, 2669 bp, Macaca Fascicularis
ccacacccagctctttttgactaaggagggcaagacaccattcagtctgtgtttggctggcaccaaccatcttccccaagtgccctgacaagctgctaaagagaaacaaaggaagggcacagaggaggagcacaggtttagagaatgaggagggcacctttcagggagggcagaggccagtgaatgggaagtctgaccacccattatcctcagagaagatgtgccctgttagaattgctcccagtgtgtctggaagctcaaatacccacaaatgacctgtctctcttctcatgcagataaacagtctgtgagaaagggcctgtctgcttcctgttgatctctattcccagataattgagcccctggggcctgtgctgagccatactagcttgtctgcctcctttgcaatagcccgaagcccaaaatgctccctgctacccgctcctagaccctgatgcaaatacaagttacaaacctgctctagatccaggaggtgttttaggagggagaggtatggaatgagcctgagctgaaggcctcctatgtgccaagtatggtactagaattttctgtgtatgctctcacttgattctcccacccaacctcttacaattgctctaagaagtctattgattagacccattagaagtctattgatgagacccattttgcaggtgaggaaattgaggctcagagtcaacctagtccagtatcacccaggaatttggtggcaaaaacttaaaatcatattttctgaccctgatattcctttcccttactacccctctttttctacatatcaaaacatatgcagcctgttcttgctttctcagggctctcccagattaatattgtgtctcatttcacaaagtttaatactggtcctaggagttgggaacggtagggccaacagaaccgaagcaggtgtggctctcacaacaccagcagctagtgaataccctttttgcatttttttccccaaggtgaagtgactagccttaacttaggggtctcaaagccacaaaatgctgtgcatgtttttaaaatttcagccaatagctggtcaccaccaagagcttagtagggtactgttgaccgccctttgtcccagcagagtagcatgtgccatgcctaccttaaggctgattaaattaattggtgtaattggtttccttataaggccatgcatatcttaagggcagaactgattcttgggtcacctctgtaccttgacacagggtttggtacagagtaattgctcagtaaacatgtgttgaacaaaggactgagtaagtaaatataaaatccaggagcatttagagatgaacatggagcccagggagggaaggaaattgctacaacaatcagccatcatggctattgtctctagaagcacagctgggcaaacagaagctatctctgccatgctaatgctggtgtgatgcacgttcttctttttttttttaatctttctcattttggaaacttgaagccactaaatgtttccatcctaatgagagttccaaaaggaaaagaaaaaagtctagaataatccatgtttgtgtcctgctggtgggaaacatcgcaggactcagatctgactttgtgtctatgtgtttggctctcaaaagaaacagtggggccatttgtaggaaggtgctaatggggtaaaaaaaaaaagtctgagatgtttacacctttcagtttgagtctgagaggaccaatttttatatctgagtgagaaaagtctccagggcatggtaagaaatgtaagtaatatgccaattactcattggcaatttccccactgccttcagcctgaaagtggttgaaaaggctgaagtctgatttgactgctgtgtaggtggagaaggtaaatgcctacttgaggtaattttggagctgctgagaattctagtttccatttttcctagaacctctcttcctcagttgggggttttataagaagtggcttagtcctttggcacaaggctttattccctattaaaatccaaattccaggtgccgttttgtacctattaaagtaacaatacaactagcaaatagtaattgccaatgctggtgaaattgggatgaaaataggtcctcataccttaccctagagatagcgtaaaatcacgtcactctttagtcaagccatgtggcagaatggagcaaaaatccctacagatgttcaaagcccagaaataccaaagacttattatgaagagttggtcttaaagaaaaactgtatgcacagtggcatttctcatagtattatttataataacatacaattggaagaatctaaacccaaatatctagcagtaggacaatggctgtacatattttagagcactgatgtcatagaatgttgctctttcattaaacatgattgttttgaatattttatagctaaatggaagactttatgctttaataataaacaatctaaaaatgcatcttaaagaactagaaaagcaagagcaaaccaagcccaaaattagcagaagaaaagaaataagaatcagagcagaaataaatgaaattgaaatgaaaaaataatacaaaagatcaatgaaagaaaaagttggttttttgaaaagttaaacaaaatgaaaaaccttaaccagactaggaaaaagagagagaagattcacataaataag

SEQ ID NO: 3675 - DNA, 761 bp, Macaca Fascicularis
  misc_feature (1)...(761): n = A,T,C or G
gacagcanggnnnnnnnnnnnnnnnnnnnngatcaaggagnnnnnnnnnnnnnnnnnnnnnnnnntgccagagctggctccnnctgtttcacggnnnnnnnnnnnnnnnngttgctgcatgcacgccccacagcccgacacagccagaggaccaacaggccaagaaatgcaagatcttgggagggtnnnnnnnnnnnnnnnnnnnnnnnnnnnnnnnnnnnnnngnnnnnnnnnnnnnnnnnnnnnnnnnnnnnnnnnnnnnnagagnnnnnnnnnnnnnnnnnnnnnnttccctctcagnnnnnnnnnnnnnnnccagacgccctgagggaatggcccgccctggcctgtacccacttcagtgtgtgatctatccaaagagccaggcccaagagcgcctaggtcagggggctcaggctaccaggnnnnnnnnnnnnnnnnnnnnnnnnnnnnnnnnnnnnnnnnnnnnnnnnttccannnnnnnnnnnnnnnnnnnnnnnnnnnnnnnnnnnncacaagggtgtgcgagcctggctgccattctagtctgtnnnnnnnnnnnnnnnnnnnnnnnnnnnnnnnnnnnnnnnnnnnnnnnnnnnnnnnnnnnnnnnnnnnnnnnnnnnnnnnttccctcccnnnnnnnnnnnnnnnnnnnnnggcaaggccttggcannnnnnnnnnnnnnnnnnnnnngggctcagccccctcccatggctnnnnnnnnnnnnnnnnnngtagggcagcagcacagaccaa

SEQ ID NO: 3676 - DNA, 737 bp, Macaca Fascicularis
  misc_feature (1)...(737): n = A,T,C or G
aaacatccgtgcannnnagaanntcagagctgacccacacttggccagtgctagcaagcgtcttctgaccactggccaagtctcctcccggagcagcaggcagatacaaaaggcctttgggggaacaacactggcgatgaccaagaatgctcgcctgcggggaggtgtgatgtctgtcatctcccttggctttgactgcgtcgctctctcaaagggatggaagcacctgaaggaaggagcaagggcagagcttgcggaagagttgagatcccaggcctcggagtgggagaggaaactcacagacactcacccagtactacgagagcctgcgaacagaaaggatacagttaggcctgtgagttcnnnnnaagccatcacatcccctgtgacttgcacatcccctgtgacttgcacgtatatacgcccagatggcctgaagtaactgaagaatcacaaaagaagtgcaaatgcccgcccnnnnnnnnnnnnnnnnnntccaccacaaaagaagtgaaaatgaccggtccttgcctaaagcgatgacattatcttgtgaaattccttttcctggctcatcctggctcaaaaagctcccccactgagcacctcgtgacccccactcctgcccgctagagaacaacccccctttgactgtaattttcctttacctacccaaatcctataaaacggccccacccttatctcccttcgctgactctcttttggactcagcccgc

SEQ ID NO: 3677 - DNA, 742 bp, Macaca Fascicularis
  misc_feature (1)...(742): n = A,T,C or G
aacatctccagagacannnnnnnnnnnnnnnnnnnccccgactctttaatgtggctaatgtttcatgtttatttatttattttcataagtatgagcaatcgaagaagggctgatcatctgagttttgtactnnnnnnnnnnnnnnnnnnntaactctgcccataaatttactgctgccaaatagttctagcaatatgagtttgtcttaaaagccatgaagcattaatgtcaatgtttagcaaaatctcctgaatttagcttaaatnnnnnnnnnnnnnnnnnnnnagcacttaaggaggcactgtgaaacatcttggttacatacaannnnnnnnnnnnnnnnnnnnnnnnnnnnnnnnnnnnnnnnnnnnnncttattcacttcgaagtatccatcacagtcatttnnnnnnnnnnnnnnnnnnnnctcaccaannnnnnnnnnnnnnnnnnnnagaagtgaaagacaggaagtggannnnnnnnnnnnnnnnnnnnactggtaaatagaatacccccaaaacagagcaaacaagaatgccagtgctctgaaaactgccttaaatataataatagggaacttactttctctcttcaagcaatagagtccacagggaactgcacccannnnnnnnnnnnnnnngccagcggtcctgccattctgagattgtttcacacagattcagtacatgcgatcatttgctcaaaataaagagaagaacattcctttgtgcagctgccc

SEQ ID NO: 3678 - DNA, 1731 bp, Macaca Fascicularis
aaaaaaaaaaattatccagaaaattccaatggcgtagcatcttaggtagtttaccatctctcttgtacattgttttagaggatacaaaatgaaaatcttattaatctaaagttgctgcagatatggaaagtacataatgatggaaacaatgaatgtaattttttaaaaaactgatatgctacaactattttaggatggagaaagaactgattgagaattcaaatcctcgctcacttatcataaggtagtaataaaattagtgagagtcactactatacgatcattatattataagcaggtattacacatacagaattttcatcatttaatcctcccaataagcctatgtggtaggtgttattatttctattttatagatcagtaaactgaggccttaaaatgttatgtaatttgccaaagttcaaagagctagtaagtctggtactaggattcagtaccaagcagtctgtttaagagcgatgattcgagtatggtagatattagaaatacagatatatctaccagaataacaactaaaatgatagaaaaggctctttcttgggacagcaaccaggacagggatggtagagggaaggtcagagactagagactactctttggcttttttttgttttctttttttaaaaaaaaagctattagctctactcaaattttaaactctggacataaatgactttggtaaaagtccttaaaactgttttaacaaattatttggtattccacaaactacagtagctcatacctatgcaaatatttagaagaagaagtaccctttttctttgttttcatgatctccaaaatctagtttttagtctataaacatccatccctactccatattttcatgtaaagattatgtagaaataagttgggcaacagtgtagtcacaggatgccatataagtgtgaataagctgagattattgcatttgtgtttagcatattatacaattaaaatgtattttattaaagctgaagcaagttgtttttcatgtctagacatcactgtgttacagagtttaattcattaagctctgtatttgaatataacaccttgtaaaatgtttgaaacttattctcttgtgtgctttgcatttaaatatttgtatatggccctgttcagcctgtgctttgtaagtcacaaaagggctgggttttatatgtttgttttttatttctaagctctctgcgaaaaagttacaaattgtctcctggttgtttaagatattttttctttgtaattttttatatcatgtgtgattttcataaatatgtgcagttactcttgataatacttgtcttagtcatttcaggttgctataacaaagtaccgtagactgggtggcttataaacaacagaaatttatttcttacagctctggagctggaagtctgagatcagattgccagcatggttgggttctggtgagagccgtcttggttgcagactgccatcttcttcttgtatcctcacatggcaaaaggagggcaagagaactctctggagtctgtttgataagagcatgaatcccattacatcttcacatggctcctcccaaagaccccacctcctaatatcatcacatatcatcacataggggttagaatttcaacacagaaattttgggagaacacaaacattcggtcagttgcaatacttaaggcaaattcatcttgcttataactctggtgcattaaaatactatgcatc

SEQ ID NO: 3679 - DNA, 1801 bp, Macaca Fascicularis
tttttttccggtccgtttgcctggcctgcgccttgccgggtctccgccgcctgggctcctagggactgtggctttgccggtgtgtcccttgctttcccctgaagcgggagaagacccggcagagacgctctggccgctgcagccgcacgggtggaggaggcagagtcgggggtgtggccccgaccaagtttgacgcttttgcttctgtcctcctagggagcaagctcggctgaaggcccgcgtcgtagacagggacaccgaggcgtggcagcgagaccccgccttctcgggtctgcggagggtcgggggcgttgacgtgtccttcgtgaaaggggacagtgtccgcgcttgtgcctccctggtggtgctcagctaccctgagctcgagttctggaggctggaggctgggggctggagatcagggtgccagcgcaattggattgtggtgccagcactcttccaggttgcacagggccagcttcttaaccacgttctcacatggtgatccactcacctccctagaggccacacctcataataccgtaacctgtgggttataatttcaacatatgaatttggggaggacaccaacacttagaccatagcaaccctctgcttcctcttgtcttgctggaatggaactgccctgtcttccctactggaatataaactccgtgatggtagaaaccatgttgctttgcccaccgtgggtagcatgcagaagatgctggactcttccttcaatagatatgtgtgtgaatggacagtgggctcatgattcacataagagtcaacagctctgaagcctcttggcgccactcgccttgctcctctggggctcccgaagatgacaaacgtcttcctgcttccatggctttgtgctttacttgggaggcccttttcagtccaaactaagcaaaactgtactgagtgcctcctgtgtgctaagattgggatgttcagcaatccctaccgtaaggggacccctggccatttcgtaggctagcattgggagtgggggcacagtcttaaggtcctgactgctcatgctcacacccagctctgccactccccactttgccctctaggcctctgtccccttttttctgacttaaggatgatagtggtattaatatccagcccacagaattgtgatgagccgtacatgaaatgcatggaaagcaattaacacagcattcccttccccctccaactttccctggcggtgaattaatcacccttttatctgcatcctgagcctctttttaatgcccatgctgtcgtagcacttctcacattgtattcaagttagtcatttatgattccgtttttcccagtgactgtaggttctcaaggatagggctgtaccatacttcttttataaccccagcaccaagcaaagcacctgctacttcgtcggtattcattgttccggctatgaaagcttagactaggaagggatcttggaacagtctggtccactggttcctgaatgcccgaccgtggacctgcagaagcagaatcacccggaagtgggttgagaaacagattccataggcacatccacaaagacagaaagtggatccctgggccttgaacttggggtaggatagatgggaagtgactgctgatgggtgtgaggtttatttagaggttaaggaagatgttctaaagttagattatagtgatattgcacaactctgtaaataccaaaaccattgcattgtatgttttaaacaagttaactttatggtatgtcaattgtatctcagtaaagctgttagaaaaaaaaaaaaaaaaa

SEQ ID NO: 3680 - DNA, 1188 bp, Macaca Fascicularis
  misc_feature (1)...(1188): n = A,T,C or G
gacagctaacagatttttatggttatagtggagtccggttattttgnnnnnnnnnnnnnnnttaaatagatgcaatatacacttgaagacattgatatttggaattatgtttaagtcatgaacaaaagattttcggaaaatgttcagatataattacctctgttaaatacccacagaactcnnnnnnnnnnnnnnntatttttttctgattcctctaatacagtgctgtccaatagaaacacaataaccacaaatgcaggccacatatgtgaatttttaatttcccagtagccccattttagaaagtaaaaataaatgtaaaagtgaattttgattttttaaaaatttaacactatatatgttatttcaacatgtcatcaatataaaaaattgagatagtttacatctgtttcttgaatcaagttttcaaaatccagtttgtaatttaaaagcacacttcaacttgaattaactatattggatagcacagccgtaaaattagagactaagcttctgttttatttaacagttgaatatttcaaaaaagtttcattctttcttttatttcaaagtctcataaaagttatgatttttaaaagcactaaattaagttaagtatcctcattttaaagtcagatgaagttcacatctctaaagggtaaaaatccaaaagtatagaaagataaaataatctgcctgtagcaaagttgtgaaattaatttgtttgttactatgaagtacttacgataggggaataaaattacctatttttgttattgaatcaaatgtgtaaggcttatttcatccatatgaggtgtcaacttgacagatgagtaattatgactaagaatctagaccttacttataaaagctgacaggatttcccttgctcagttagaaagcaaaaatagtcaacagattctgtgataagtaattaattatttaggtttgacagttgattattgtgttctttgcatattcatgtaaaactgatgtgtgaatggcattacagtgagttaatgattatagatatagtagcctgtcaaagaaagacgtcctacatttaaaaaggtgtcatattatgttagctgtcattatttattaacatgaaaaggcaatgatggccataagaaccaaagcatgagtattacattgcacaaatctgggtatcacatggatgcactttgt

SEQ ID NO: 3681 - DNA, 703 bp, Macaca Fascicularis
  misc_feature (1)...(703): n = A,T,C or G
cagctcannnnnnnnnnnnnnnnctgggttcaaggagttggttaatgaggtagaggccacttattcaagtccttgggattgcaccattgctgtccacaaacagtatcaacaacacatgctgtccctgtgaacactctcctctcacctgtttccagggttggtcttcctgagaaggggatggaggagataacacacagtttgggataagtatctgttgaatgaatgaataactgaatggataataatagtcctctgagacaaaaatggccttgtcagaattttgaaaatnnnnnnnnntcctgttaaagcactctgtgtannnnnnnnnnnnnnncattgtaccaagtaatcacaatgtgaattggtcaattaatgagccttgcctactttagaaaataaacctgcagtagcctctaccacannnnnnnnnnnnnnnnnnnnnnnnnnttgctgtcttccctatgtattnnnnnnnnnnnnnnnnnnnnnnnnnnnnnnaacaagtagtggtttcttgatttttagatatgtctgtagcctcttagcacttttgccnnnnnnnnnnncattttgatgcctctgcacctcagttcctcttacaaaagcctccagatgatctaaatctannnnnnnnnnnnnnnctatggactgcaacggtttgggacattgtattcctttgtttgtctcttgttctgaaggattg

SEQ ID NO: 3682 - DNA, 778 bp, Macaca Fascicularis
  misc_feature (1)...(778): n = A,T,C or G
gcacaattttgcgcctgctgtnnnnnnnnnnnnnnnnnnnnnctggctgcatccgaatagacggnnnnnnnnnnnnacaggtgacccaggcctctctccggtctncacattggagttgtgccccaagatactgttctctttnnnnnnnnnnnnnnnnacaatatccgttacggccgnnnnnnnnnnnnnnnngatgaagtggaggctgctgctcaggctgcaggnnnnnnnnnnnnnnttatggctttccctgaagggtacaggacacaggtgnnnnnnnnnnnnnnnnnnnnnnnnnnnnnnnnnnnnnnnnnnnnnnnnnnnnnnnnnnnnnnnnnnnnnnnnnnnnnnnnnnnnnnnnnnnnnnnnnnnnnnnnnnnnnnnnnnnnntctaatgagagggccatccannnnnnnnnnnnnnnnnnnnnnnnnnnncgcactaccatcgtagtggcacacaggctctcaactgtggtcaannnnnnnnnnnnnnnnnnnnnnnnnnnnnnnnnnnnnnnnnnnnnnnnnnnnnnnnnnnnnnnnnnnnnnnnnggtggggtgtatgctgacatgtgnnnnnnnnnnnnnnnnggacaggaagaaacctctgaagacactatgcctcagaccatggaacgatgacaaaagtttggccacttccctcnnnnnnnnnnnnnnnnnnnnnnnnnnnntgtacgccccttccctagcttatttcatcctggtcttggggtgcggtgctagctatagtaagggaaagggacctttcagaaaa

SEQ ID NO: 3683 - DNA, 307 bp, Macaca Fascicularis
ctccagtgtctataccagagggttcttcttctgtgttttctataaagtcttaaaacatctggcccctacgcccccaaaggtaaattttaattctctccaaattttgcacatatctgtatgtcactcgatgtgtctgaggcaagccctttcttacactgtgtcggcttttctctcttttcttttgggtggtggttgtaagggtgatgaaaagacggtctccagcccgcctccccgaagcgtctgtgctgtctggagagccctgggcacggatgagggtggggtgaggggtgtgtgtgctttttctctt

SEQ ID NO: 3684 - DNA, 718 bp, Macaca Fascicularis
caatcatatgtgatctgtcttgtaatattttgtattgctgttgcttaaatagcaatagcatgaatagagtattaagatactttttcttttgtaagtgctacataaattggcctggtatggctgcagtcctccggttgtatactggactcttcaaaaactgttttgggtagctgccacttgaacaaaatctgttgccacccaggtgatgttggtgttttaagaaatgtagttgatgtatccaacaagccagaatcagcacagataaaaagtggaatctctcgtttctccagatttttaatacgcaggcacctgatttgcatattcattcatggaccactgtttcttgcttgtacctctggctgactaaatttggggacagattcagtcttgccttacacaaaggggatcataaagttagaatctattttctatgtactagtactgtgtactgtatagacagtttgtaaatgttatttctgcaaacaccttcttattatattatatatatatatatatataagtttgatcacactattttagagtcttaatgccaagtcagcagatttgctttatgaattacagggactagaaatgcccacattcaggaaatttgtaataacattgtctagacacctatcctcattctagtagaaagattgtacatactgtaaatatgtgtgattgcttgacttgaaaggtttgaatctgaatgtataca

SEQ ID NO: 3685 - DNA, 699 bp, Macaca Fascicularis
  misc_feature (1)...(699): n = A,T,C or G
agctacaggaccgggtgctaatcctggagaggcagggccatgacaaggacctacagctgcaccaaagccacctggagcttcaggaggtgcgtctctcctgccgacagctgcaggtgaaggtggaagaactcactgaggagaggagtctgcagagcnnnnnnnnnnnnnnnncatccctcctgtcagagatcgagcagagcatggaggctgaggagctggagcaagagcgagagcagctgagactgcagctctgggaagcctacnnnnnnnnnnnnnnnnnnnnnnnnnnnnnnnnnnnnnnnnacagcgctgactcagccgtctccacggactcctccatggacgaatcttcagaaacctcatccgccaaggatgtgccagccggcagcttgcgcactnnnnnnnnnnnnnnnnnnnnnnnnnnacagagcattgtggatggcatggagcccacgagctcccggagacttgatgatgactccttagaagaacagataaggcagaccagtgaggactcgagagccctaagggagcnnnnnnngggagagaggggtaaactgaggcaaagcctagaagagctgcagcgactccacagtcaggtaannnnnnnnnnnnnnnnntcagactcagagacagatcttctaaactggaaaaataaaatgcaggagaacgttggatctgtaaggtctttggattaat

SEQ ID NO: 3686 - DNA, 2365 bp, Macaca Fascicularis
agtcggcggcgggggatgggcaggcagtggcggtcccgcctgctgagggttaacccccgccggtcccggtcctgagctggaccagagccctcctccagaaacccctgcgtccgccacggcccaggttaaatggaaaccacccttgagaactggatgcctgtgtaactgttctaccataatcagtgtattgcaatgagcgggggaggagagcagcatctttctagaccatatctcttctttggattattttacaaaaccagactaccagcttcttacatccgtgtttgacaatagcatcaagacttttggagtaattgagagtgacccatttgactgggagaagactggaaatgatggctccctaacaaccaccactacttctaccacccctcagttgcacactcgcttgacccctgctgcaatcggaattgcgaacgccactcccatcccaggagacttgcttcgggaaaatacagatgaggtatttccagatgaacagcttagcgatggagaaaatggcatccctgttggtgtgtcaccagataaattgcctggatctctgggtcacccccgtccccaggagaaggatgtttgggaagaaatggatgccaacaaaaacaagataaagcttggaatttgtaaggctgctactgaagaggagaacagccatggccaggcaaatggtcttctcaatgctccaagccttgggtcaccagttcgtgtccgctcagagattactcagccagacagagatattccattggtgcgaaagttacgttccatccacagctttgagctggaaaaacgtctgaccctggagccaaagccagacactgacaagttccttgagacctgcctggagaaaatgcagaaagataccagtgcaggaaaagaatctattctccctgctctgctgcataagccttgtgttcctgctgtgtcccgtactgaccatatctggcactatgatgaagagtatcttccagatgtctccaagcctgcttctgccaacacccctgagcaggcagatggtggtggcagcaacggatttatagccgttaacctgagctcttgcaagcaagagattgattccaaagaatgggtgattgtggacaaggagcaggaccttcaggattttaggacaaatgaggctgtaggacataaaacaactggaagtccttctgatgaggagcctgaagtacttcaagtcctggaggcatcacctcaagatgaaaagctccagttaggtccttgggcagaaaatgatcatttaaagaaggaaacctcaggtgtggtcttagcactttctgcagagggtcctcctactgctgcttcggaacagtatacagataggctggaactccagcctggagctgctagtcagtttattgcagcgacgcccacaagtctaatggaggcacaggcagaaggaccccttacagcgattacaattcctagaccttctgtggcatctacacagtcaacttcaggaagctttcactatggtcagcagccagagaagaaagatcttcagcccatggagcccactgtggaactttattctccaagggaaaacttctctggcttggctgtgacagagggtgaacctcctagtggaggaagcagaacagatttggggcttcagatagatcacattggtcatgacgtgttacccaacattagagaaagtaacaaatctcaagacctgggaccaaaagaacttcctgatcataacagactagttgtgagagaatttgaaaatctccctggggaaactgaagagaaaagcatccttttagagtcagataatgaagatgagaaattaagtagagggcagcattgtatggagatctcctctctcccaggagatttggtaattgtggaaaaggatcactcagctactactgaacctcttcatgtgacaaaaacacagacttttagtgtggtgccaaatcaagacaaaaataatgagataatgaagcttctgacagttggaacttcagaaatttctcccagagggtgaggaagaggaggaagaggaggaggaaggggaagaggaggaggaagaagagctgccagtgcagggcaagctgctgctgatggagcctgagcggcaggaggagggccaggaggacaacgctgaggcccagaagagccccgagtccaagcagacacactcctgacccgcgacgaaggcccaggaagggacacccactgctgctccggcgacagcattcagagaagagtcaataaaaagtctctgaggaaaaaaaaaaaaaaaaaaaaaaaaaaaaaaaaaaaaaaaaaaaaaaaaaaaaaaaaaaaaaaaaaaaaaaaaaaaaaaaaaaaaaaaaaaaaaaaaaaa

SEQ ID NO: 3687 - DNA, 1737 bp, Macaca Fascicularis
agcttgctgtgtggacatgcgtgtacttgtacctgtcaaggataagatccagcttctccgtcgggttcccctcgcagtggcctcgttgttgaatctacctccaaatggcaagataaggtcccctaaattcgctggtggcctttgaggcacagttggttgcctggctttggaagtggctccatgtagaggatagtacatgtgcaggagccttcaacagctgccctgcaggagggccgttgggcaccaactataccagacaccagctgaagacatgtgtccacagcttctgtcttcggcatgacttctgaccagagtggaacatccacccgttcagctgagataccctctacccagcaaagatggcctacttttggagaattagacacagccaccaaaaagacacttccggaggagaaatctcacctgtgcagtatgtgggaaggacaccaaactcaggctctgaattggttttgtctgaagatgaaaaaagtgacaatgaagataaggaagagacggaattgggcgtcatggaggatcagcgtagtataattcttcatctcatttcacaactcaaacttggaatggatttgaccaaggtggtgcttcccacctttatcctggagaagcgatctttgctggagatgtatgcagattttatggcgcacccagatctactgctggccatcaccgctggggccacaccagaggagagagtcatttgcttcgtggagtattatctcacagcctttcacgagggccgcaagggcgctttagccaagaagccctacaaccccatcataggcgagacatttcactgctcctgggaagttcccaaggacagggtcaagcctaagaggactgctccccgctctcctgctggctgtcatgaacacccaatggccaatgacccttccaatagctacaaactaaggtttgtggctgagcaagtgtcccatcgcccacccatctcctgcttctactgtgagtgcaaggagaagagactgtgcgtcaacactcatgtatggaccaaaagcaagttcatgggcatgtccgtgggggtctctatgataggggaaggtgtgttgaggctgctggaacacggggaggagtacgtattcaccctgcctagtgcctacgcccggtccattctcaccatcccatgggtggagctcggaggaaaagtcagcatcaactgtgccaagactgggtactcagcgacggtgatattccacacgaagcctttctatggagggaaagtccacagggttaccgcagaagtgaagcacaacccaaccaacaccattgtttgtaaagcccatggggaatggaatggtactttagagttcacctacagcaatggagaaaccaaagtcatcgacacaaccacactgccagtgtatcccaagaagatcagacctctcgagaagcaggggcctatggagtccaggaacctctggcgggaggtgacccgatacctgcggctgggggacattgacgcagccaccgagcagaagcggcacctggaggagaagcaacgggtagaggaacggaagcgcgagaacctccgcacaccatggaagcccaaatattttatccaggagggtgatggctgggtatacttcaatcccctctggaaggcacactgatggggtggaggcgcagagctttcctgtatggccctgtttttgtaggaatattaaagtagtagagtatcagggaaaaaaaaaaaaaaaaaaa

SEQ ID NO: 3688 - DNA, 739 bp, Macaca Fascicularis
  misc_feature (1)...(739): n = A,T,C or G
gtagtagaagtaggatcacagttacaacttatgttagatgtattcaantgtatagaaacaagtgtctccctctaaaaatatttttaaagtctcacacaacactctaaaccaaaaaccattgtaaaaagtcctttggaaatggaccattgcagccattgagatgacaggtcaaggtgagcattctgaacatataacaaaatataagataggtaataaatattcaaagcatgaaggaggtataatatgaagggtaaagtcctcccctcatctccccaagcttcagtgctaagaacttatcatgtgtaatcatttctgattttgattcttctgataattgtctcccaaactctggaccagtgctgtacaatagaactttctatgatgatagaaacatctaaatctgtgctgtctaatatgataggcatgagctacatgttgctataaatttaaattttaattaataaaaatgtaatacaataaaatatgtagtttctcagctgcacttgccatatttcaataagtcagtagccccatttggctagtggctaccataatggacagtgcagtgattgataatacgtttatacctctgctttctgctttatcaactttagaaagacatactgacatcacatggagatgaaaaatgtggctcatttcactacctcttctctttgctctccttccattcccaatccctattaagaacattttcattttagttctactggattacctt

SEQ ID NO: 3689 - DNA, 756 bp, Macaca Fascicularis
  misc_feature (1)...(756): n = A,T,C or G
ggggaagnnnnnnnnnntcatgatttatggggaatgaagcaagtactgaaatcaaactaaatactccctgggccctgggtcagtttgaccctagccctggggtaaggcaagccccctcctatgaggatgagcaaaaattctactctcttcaccctgagttgctttccggatctggggcttcnnnnnnnnnnnnnnnnnnnnnnnnnnnnnnnnnnnaaagactttatgaagatcccacacacagacacacatcccttcctgcctcccacctgccttcagtaggatctggctccgtggctggaggacaaacccctagagtgggaatgcagagcttaacgtgtactgcttgtgtgtgcacgtgagagtgtgtgtatgtgtgtgtgtgtgtgtatgtgtgttccgcctcccatcctctccccatctgctctgggtatttttgtttttgtttagttttaggtttacaacagagaggagttaatttatcagcagcctaaaactgttgtgtttttcttacagtttaaaaaaatgccatgtcattgataactccctttctcccctcccttctcccagtctgctgatgactctttcatgcctgtgtatccgggtgctctgtctccccnnnnnnnnnnnnnnnacgaggcagaggccgggacagctttcctctcagtcactgttcaccccacttgaaaattcagacaagaaaactttgcttaaaagatttcatgtgtgggaactacagttcctggctgcctttct

SEQ ID NO: 3690 - DNA, 615 bp, Macaca Fascicularis
aaatttgaagctaaccttccagacactgtgaaggtatttgtcaaggaacaaagggaaagaaggctatgtgtagccttatttaattcttccttcagtttcgtgaggtcttgccatcaccacttcaggcttgcatcaaactagggcagatgctgaacatgctcttttcaaagtacagaaacagtcttttgctttgtttcgttgccttgtggaagtctgaagacaagtcaagatgtttatctctcctgaacttcatttctccacaagttagtgaggaacagagtgggggaaattgctttcctggagtagaggccagagggacctcaacagtctcccccaggcccttcccccaccattttttgggtgaagctgagtgctttgctgcaaaataccccctattttgtgtttgcctagttctttctgaaatgcaaaacccctttgtctgctcaacaccgctgttgagcggcttcatgcgagcagtgaattcacatctatagaagagaaaagcaaggctggtcactgagcccagtgagaaagctcgagcgactttcaggactcttgccttcttcacagattgccagaacaacaaactttcatcttaaaaaaaaaaaaaaaaaa

SEQ ID NO: 3691 - DNA, 1881 bp, Macaca Fascicularis
acataattgctgagagaaagggatttctattcagaaataaaagtaagcatatctggagcttcttggtggatctatctctgtagatagaagcatagcccatgtccctcttccttgggggttactaaaatcctcaaggacacacctacacatccatccctcttctccagctctgctcagtgaaatcgaataaagaatcatgttttatccacagcaatgctgcaactaaaatgggaaagttttgcatttacatctactgctccagaagattttggttcagtccatttaagaagacaatacgttttgttgggaaacaacacagagtggaagaaacactgagttccaagatctgagctcacatcccacctctaccatatccttccaatgtgaccttgggtaaacccatttaacctctctgagtatccagtaatcatctgagaaattaaaatatctttcccttgggataagtctgagttgaaatggaagagtttatatgtaaagtgattagcaaagcaaatatatccaactatgtagttctcacctcactttctcccaccctgttgtttggatcaaaatttccgtctcgaagatatactcttaatatttttcatgagtccttttataaatcccttagaagacatagttctaaatataattagtcacaaattagagtggggaagtaggagagacataaccataatgcataaatggaagtatttgaaggcatttctatatcctcctttaggatttggcattcagaatagatgttggaagaaggtgaatcacaagcctaggaagaactgtattaaatgactgccgcttgaagatgatggtaatggaacatctatgggttaatgtttcagtcatttcccaaattagctgctacttcataggcaagcccaaggatgtccaaatatttcatccttgctttcttaccatttatatggtgaattaactctgaatttgtataacttgacttattccccctttttaaattgtctaactgaatttacacatgcaataggatataagattctggaatagaaatagaggcaatataccatgttacatttcatgcctctgtgaaatgtgggaagagcatattgttactggaaaaagtcttacctctccattattgaaaaataatagatattgttatatcaataatatcataagataactaagaggcaatgcatcctaaaccttattgtaagcataatgctgataaaaatgtaaatgacgacattttaatactgaataagacatacctgagccgtcttattttctttctagtcctctctgacttgtaactctcaaaaagtgagtgcttctcaaagatacaggaatcttaggctttaactcagtttataatttctttatttgaaaacatatattggtaggagtagtcattttggtatctattgtcttcttttaaatgatagaaaatatgattagaaaaattaattctgcgctagtgtagtcaagatagctttttgaaagtgggagtaaccaagcatcctagatacagacccatcattgcagaatagaaaggcagagttcaaagatacgaagtaagtttaaccacattttcatcaaattggacttcagtattgttggcactgggtcttacatctttatctttgccagatgtttttcattagattttatctcttctaattctgaaacattcttaagttatttcctttaagaatctttcatttccttaggttttatatactgctctttctctataactagtatatatgagagggctgcttttgttgacctaaatagaccaatggaaggtccaaagaaacctacttccagatacttcatacactccatctcaaaaaaaaaaaaaaaaaaaaaaaaaaaaaaaaaaaa

SEQ ID NO: 3692 - DNA, 717 bp, Macaca Fascicularis
  misc_feature (1)...(717): n = A,T,C or G
gccatgctgtactgtgagccccctcctcactnncntnntaccaaccctaaaccnnnnnnnnnnnnnnnnnnnnnnnnnnnnnnnnnnnnnnnnnnnnnnnnnnnnnnnnncttgcctttccaccccctaattgtcaaccacaaaaatgagaaattcttcttctagctcagccttgagtccatnnnnnnnnnnnnnnnnnnnnnnnnnnnnncttgggggataagcgaaggtttccctgcaagagggaaaggcggcaaaaatggcatagctatctccaaaacacatctgagttcatttcaaaagtgaccaagggaatctctgcacaaaagtgcagattgaggaactgtggtgggtcattcccaagaatcccccaaggggcatcccaaatccctaaggagtaacagctgcaaacctggtcagttctcagtgagagccagctcacttatagctttgctgctagaacctgttgtggctgcatttcctggtggccagtgacaactgtgtaaccagaatnnnnnnnnnnnnnnnaccctttggccggaacttggtctcttggctccctccttggccacccaccacctctcgcacagcccctctgtttttagaccaataagaagaattaagggggaagccctggcagctatacgttttcaaccagactcctttgccgggacccagcccgccaccctgctcgcctctgtcaaaccccggccaatg

SEQ ID NO: 3693 - DNA, 777 bp, Macaca Fascicularis
  misc_feature (1)...(777): n = A,T,C or G
cnnnnnnnnnnnnnnnnnnnnnnnnnnnnnnnnnnnnnnnnnnctgaagannnnnngntctgacagtatttatggcactgaagaggataaagaagcttgagcctcnnnntgactcccactttatggggcagagagagctttttttctacgtagcacattgcagtctcaccgctatcagaaaaatatcctgttcatggtttatactgaatttgcaaactactgataggagttttcaataaccacttgtatcttccatcatcnnnnnnnngtgggaagaggtacactgtatctctgcaataaaacttttgccaggttctacctcctctgagcaaaggatacttttctatgtaggcgtagatcattctcctttactaatctgacatggtgcatctggagacgtctgatggaatccaaagacaacttgaaacaaaggcggatgtcagctcttggtttgttttcatttcgttctcttttaaatctcccttttgttatcgctcctgttgtagcgtgtccatcagtgtgtgaagggtacgccctgttctaacgatactgcgtnnnnnnnnnnnnnnnntcgtgggagcgcagtacgaagtgtccggcattgattatcctgaccacttttgatatgtaactgagaaatttgtctcatgcaataaaaatgtactggctgcattttagcaaggtttactcttgcaagtaaaaacgatcaaccgtgaagcataacaaattctgtatttagtttcttttgttgttgtggtttttgttttgttttttgtt

SEQ ID NO: 3694 - DNA, 694 bp, Macaca Fascicularis
  misc_feature (1)...(694): n = A,T,C or G
tcctgtgtggcatggtggcaaagaacagcaaggcggctggcggccccaagctgaccaagaggggcctggtggccccccggactctgaaacccaagccggccaccagcaggaagcagccgttttgtttgctgcttcgagaggccgaggcgcgttcctccttcagcgactcctcggaggaatcgtttgaccaaggttactagctccaaacacaaaataccttccgtgtttcctagcgagagagtgcgtgcgagtgagcgagagggaagcgagtgggcgcacgggagagatggcgggtgaggaggcccgtgcnnnnnnnnnnnnnnnnnnnnnnnnntgggttcttggcagcgtagcctgctgttaatcagctgaatggttttgatttttgctttgatttgtactgtatcattgtgnnnnnnnnnnnnnnnnnnnnnntttgagctcttatatggactgcttttgagtctgcgtttttctccactttccctcttccctgccctcctccccctctcccagagttccccccagctcccgcactcaccttttctgcccacccagagaccccaggcttgggtcgggttctctttgggcacgggtttggtggaggcttcccgaggaannnnnnnnnnnnnnnnttctgtcgtgtgggcgtgtgacttgatgtttgtactgcgattttggtaataccaagctt

SEQ ID NO: 3695 - DNA, 767 bp, Macaca Fascicularis
  misc_feature (1)...(767): n = A,T,C or G
cattgaaaagtagacctgattgaataactcaaataattgatattgtcatagttaagatntacgagatgcttactntgtgccaggtacttttctagcctgtttgtttgtttgtttgtttgtttgtttgtttgtttgccagttgcactggttgaaccctccaggacactgttgactagaacagcagacagtgtcgtcttgctcctgaacttagggagaaagcactgagtctatcctcattaatgtatgatgttagctgaggatttttcatagatacccattttcagtttaaagaaattcttttctattcctagtgtgttgggtattttggtgatgaaactgtgtttgattttgtcaaatgcatttcagaagcatataatttttacttatatgggataaaaattatatgatcacattataattatatacttagattattttatatgtaatttatatataaatacatatctatgtaatttatatattatataagtatataatcaaatataattatattatataattataaattatattatcacattaaattatatatcatatattatatcattataattatataatcatatataactatatgattacttaattacttaatcttttattctattaacatgtgtattacattgatggatgattagatgttaaactagcctacattcctgggataattaccacctggtcatggtatataatccttttaatatgttgcaggacttggtcggctagtattttttgaggatttttgc

SEQ ID NO: 3696 - DNA, 755 bp, Macaca Fascicularis
  misc_feature (1)...(755): n = A,T,C or G
tgtaatggaaagaactaccatgctgaccatccagaannnaagagannnnnnnnnngtttnnnaannnnnnnnnnnnnnnnnnnnnnnnnnnnnnnnnnnnnnnnnnnnnnnnnnnnnnnnnnnnnnnncatttctggtcaggatagcgttgtgcctttagcaaacaatcagtgtgcaacagccggggaatgnnnnnnnnnnnnnnnncagattatattcctgcttcaaacacctctcagaaaaccagttccgtgagggtttttaaatccccacaaagttgttgacagataatgatgaccctggaagtggggaggaggacttctgagaaacagcaacctctctcctgattggggtagccatgagatttctctagctatatccaacttggcatctgtacatcatctttggaggaacatcttattcnnnnnnnnnnnnnnnnnnnnnnnnnnnnnnnnnnnnnnnncccnnnnnnnnnnnnnnnntaaaaaaaagatggaagcttccctgctatactaaaacatggagcaaaattcgcatttttctcaagaaggagagaaaaggagtaggactccnnnnnnnnnnnnnagaagaaaagctagaaaagatttacaagaaagaaagaaagaacaaatcagcagcggtgttatggatgagagggacttgagagaacaaaaatggctaagggaaaaatttaagtcatctgctgagcagtgtgctatgtcaacctcctcctaggtctcctcttgaaatattca

SEQ ID NO: 3697 - DNA, 694 bp, Macaca Fascicularis
  misc_feature (1)...(694): n = A,T,C or G
gcaagagagctgagtggaagccccaggcctgggcccatcccaaacctcatttcctcacttcctagatttgacnnnnnnnnnnnnnnnnnnnnnnnnnnnnnnnnnnnnnnnnntcaggcctgctgtnnnnnnnnnnnnnnngatgtaactgctgggccagttacatcactctgcctcaattttcctcatttgtaacattggcctaatgatgcttcctcacgggttggctgggaggctagtgacaatgtggaggggagcatgacctgtgagatcagcctgccccctctctgcaaaaaaaccagaagattggcctcttgaggacagcagtggccaaagaaagaggctggaatttcctatcgtcttcatttggtttcctcccagatccagctgtagggataggataccagtgggcccagtgcagctcctgaaggaggaagccagtacccaaggannnnnnnnnnnnnnnnnnnnnnnnnnnnnntttggtatttgttcccgggagcagtcaggataggggccacaaggaagaggtggctgtgctttagatcagagccaggctgccctggatcatgacaaactgggactaggtcagagcaggcagccctgttgagaagagggctggaaaccaaacctggttctgtggcctagggacagagccaggttggggcaggaaggagggatggggtcccaatga

SEQ ID NO: 3698 - DNA, 755 bp, Macaca Fascicularis
  misc_feature (1)...(755): n = A,T,C or G
tgnnnnnnnnnnnnnnnnnnnnnnnnnnnnnnnnnnnnnnnnnnnnnnnnnnnnnnnnnnnnnnnnnnnnnnnnnnnnnnnnnnnnnnatgtgccatgtgctgccatagccannnnnnnnnnnnnnnnnnnnnnnnnnnnnnnnnnnnnnnnnnnnnnnnnnnnnnnnnnnnnnnnnnnnnnnnnnnnnnnnnnnnnnnnnnnnnnnnnnnnnnnnnnnnnnngagccnnnnnnnnnnnnnnnnnnnnnnnnnnnnnnnnacatatatgaagttcttagaacattgcatggcatttaataaatgttannnnnnnnnatcaccattattttcatccttagaaacagtnnnnnnnnnnnnnnnnnnnnnnnnnnnnnnnnnnnnnnnnnnnnnnnnnnnnggaatttattggaagaattaggactctcacagatataaagggcannnnnnnnnnnnnnnnnnnnnnnnnnnnnnnnntctgtacctnnnnnnnnnnnnnnnccaaaggcagccactcggccctctgagatggcacattttctaacattcacccctctttgtgtgtctgctcttcctctgagatggcacagtttctaacattcacccctctgtgtgtgtctgctccccttgttttccctctgcaggctgcctctctctttatctctgcacttggccaacaaatgccccagccctgaagctaaatcatctctcttctcctacaccaccnatnnnataaccagtattccacatacaaact

SEQ ID NO: 3699 - DNA, 718 bp, Macaca Fascicularis
  misc_feature (1)...(718): n = A,T,C or G
taaatatttatattnnnnnnannnannngcgctgtaacaaactttgtgttagacagttgaaactgttagagttgggggctccactttttccccctggcagttttcccctggtataagatgtactagattaatttcattgttggaggtgaggtggatgggggagtgaaatctccatggttcctgctttgtgttcctttcccagctccatctctttccctagggaccaggcactcatatggcggggtggggtcctagcctcagtttgaagaagtgggggctggagcggggtggggtaagggtagggatagggcataatcaaaggggccatttcttgcttttctttcctcatcttcactgcccccttgagctaggtggattttctctcatgacaagagtatttggtagggaaagcaggtttaagataaaaagacaacccaccccctgcccttttgcttcccctccatcagtctggttgacaggaagaaaccacaacatcaacaccaacaagtttccgtgttccttttacagcaaaagggactttttatataaccaaatgtggtgttttagtgactttttgataatgtacagttttttgtgaatttaaatttatttctttctatatttttaggaccaatctcatttttaataaggttaaaaagaaaaaaaagtctagcgaaaaaactcctgtttttgccatgtgatgttccacaagtgcagc

SEQ ID NO: 3700 - DNA, 700 bp, Macaca Fascicularis
  misc_feature (1)...(700): n = A,T,C or G
gaaatagtcagaattctctactatattgtaagttacttgtcagtagagattgggcgtttttatgtactcctccnnnnctcacatcctacccaaaatacacaaggccatagtaaaatactgttgctactaaaaactaaacatactgtggctgctaatgtcctttacatctnnnnnnnnnnnnnnnncaagcaccattaagtatattatcagtagtgagatctgtatgattaggatatcttttcttaagcccccaaaggaaaaattctctagcattaaaaacatggctggaacataactaagcagttaacctaattagtagacttcttgttaactttcaatcctaaaaatgaaaagcttcagttgggagtagaaaatatactatgctggtatatagagcaacaaatannnnnnnnnnnnnnnntagaaacttaccatttgacattatttgactttcattcatgctactgaaaagtctaggtttagctaagaatgcataaataatggcaatacttgtagaggaaagaccataccagctaaaacaagaactgtaatgaatataatggaaagtgtttgcgagcttgaatacttgnnnnnnnnnnnnnnnctttgctatttactgtgaccttggttacaaaaaaaaatctgagaatttctctgggactgtaaaatagagaagtcataccaatttcgaggataaaat

SEQ ID NO: 3701 - DNA, 707 bp, Macaca Fascicularis
  misc_feature (1)...(707): n = A,T,C or G
tccagaccatnnnngcttcctataaatccatgtatatgacattgtactgtatctgattcctgtgccagtcatctgacctgatcctttaaaccccataaaggtactggctatatgtagtagttgtatcctaggtaaatatggtgattaaaatacttctcttctaaattataaagannnnnnnnnnnnnnnnttattaaagggtcctgttattagtgacacaggattttttttttaatgcttcatacatatagttcttatctaaacttgttcagctaacttcatagatgagttacttagcaaattcatactgggtcttattttgggaagtcttcctgggggaagcggtacagaattgaggtggtcaggtgcatctcctcaaagtaccagttatacagccatctaaataagcataatttgtggcaaaattagaacaatgttttttctttgcagtaaatgatacctcatctgagaggctctaatacctaaagagttgatccttaaaaggaaaagtgactttgtaccataaaataaccccaaagccactctctagggtttttattttcttctttcttagtctttatcctttctaacttagattcggaattacgttagctactttagtcacatagaacaaccattaaacttggggtctacggttcctacggtgtgctcgttgtctcggtgaagttcttttgttttcaaagatt

SEQ ID NO: 3702 - DNA, 2304 bp, Macaca Fascicularis
aaatacttactggggagaggtgttggcagctgccggggtgttgggtgccctatctgctctggttagggagggcagcccccaaaccttagtggatacatgctagaaaaattctgactgtggagtgtttagcccatcgtttggaaatagcatctagctacaatgtgtctagacctgcctgggtttccctgtagtcagccgtccaaaggagaatacacgctgcctggcaccagcacacccagggtggtaccacaagttgagagagagcctttgaatgtaggacggaattaagttaaagaggaacagctgaccctgatggaaccacccagtgtgaaggcttccaggcagtgggagcagtgctttggggaaggaaggaaacacgcacaggaactgttcttaaacagtttccatcccaccaagagatcgtcactaagggagaagtgggactggtatccccatggggagggtgtttgtgttcatctggaactgcactagccttggcgaaatctaggggtccctaggaggaacctcagtgccccttcttcttcccatagatgctctcccctcctcagaggatgatgatgatgatgatgactcctcttcagaggagaaagagacagataacaccaaaccaaaccccgtagctccatattggacatccccagaaaagatggaaaagaaattgcatgcggtgccagctgccaagacagtgaagttcaaatgcccttccagtgggactccaaaccccacactgcgctggttgaaaaatggcaaagaattcaaacctgaccacaggattggaggctacaaggtccgttatgccacctggagcatcataatggactccgtggtgccctctgacaagggcaactacacctgcattgtggagaatgagtatggcagcatcaaccacacctaccagctggatgtcgtggagcggtcccctcaccggcccatcctgcaagcagggttgcccgccaacaagacagtggccctgggtagcaacgtggagttcatgtgtaaggtgtacagtgacccacagccgcatatccagtggctaaagcacatcgaggtgaacgggagcaagattggtccagacaacctgccttatgtccagatcttgaaggtaatcacggcaccaatcttcgtgagccagtctgctgagaaggagaccagtgtctcgggggctcaagttcctgtgggcaggctcagtgcccccgaatgggatcattcctcacccttcaggcacacacactccatctcggtagggatctagccacatcccccaggactagtgacaagtcacaaagtggaggtgagctgggaacagagggctgcagggatgggtgatgctggtctgttaaaatttttgagagcaacgtcactggggctttggggtcagctacgcgaggaaggcatttggacccctgccttttcattgcccgaaaccagagcctttccgacaagcatttcccagtcttagccctgcgtcctgagttacgtacaatctttctggcaaatggggtgcatgataagagcatcttttatgaagagttggaaaaacagatgccacctataaattctaagccatatgaggagtaatgaatggcattttcttcctttttcctctcactcccagacattcattgtccctgaatgctccattaatccagggaaggtaattgcctaaacctccagtggatctcgcaacaggaaggaaccagaagctgggaaagttgtttacctctttgtcccagagttagacctcatcctcccctggcttggctgtctcagagatatactggccctcccttctcttctctttgctactggtgctaaaactgctctgtaggtcattggccactgtccccactcacacaacccctgctctagtcctggagggagtgggttaaacacaaatagaacattccatttgaagcagtgattttttttttttaaatcaaatgctttggacttttgaagtccacttgttctgtccttctaaaagggaaagaaggccgggtgcagtggctcacgcctgtaatcccagcattttagatcacttgaggtcaggagtttgagaccagcctggccaacatggtgaaaccccatctctactaaaaatacaaaaattagccttgtgtagtggttggcacctgtagtcccagctactcaggaggctgaggcaagagaactgcttgaacccaggaggcggaggttgcagtgagctgatatcacgccactgtactccagcctgtgtgacagagtgagtgagactctgtctcaaaaaaaaaaaaaaaaaaaaaa

SEQ ID NO: 3703 - DNA, 758 bp, Macaca Fascicularis
  misc_feature (1)...(758): n = A,T,C or G
gagatnnnnnnnnnnnnnnnggatgtncnngtatnnnnnnnnnnnnnnnngggnnnnnnnnnnnnnnnnnnnnnnnnnnnnnnnnnnnnnnnnnnnnnnnnggagaactatgggaacgtggcctctctgggattccctgtccctaaaccggagttgatctcccagctggagcagggnnnnnnnnnnnnnnnnnnnnntcttctgggagctgaggannnnnnnnnnttgaaaagnnnnnnnnnnnnnnnnnnnnnnnnnnatgttgcccagnnnnnnnnnnnnnnnnnnnnnncaaatgatccatgtcgacctccaagagtgctgagattacaggnnnnnnnnnnnnnnnnngaccagtagtagtctttttttaatgtttacctttgttctattgggtatacatctactacttgatatgtcagctctaagtattatctttgactcccagttactgagacannnnnnnnnnnnnntctacttttctcccttttcctcctcattcctttcccagtttttgttggttatattgtttctataatgtatatattgtagaaacaattcagaacatataacactttaccactcatatccnnnnnnnnnnnnnnntcttttatctgcagttaagtatgttattaataattgtttacctctggtccttttaccaaaaatttccccgtctcttggttggctggagcttgtcnnnnnnnnnnnnnnnnnnnnntcgtgaaaaatacaccccatatttgtgcacatcaaaa

SEQ ID NO: 3704 - DNA, 775 bp, Macaca Fascicularis
  misc_feature (1)...(775): n = A,T,C or G
ttcattacaatattgaatcatacttctaactacactaaaaagtaagctggttgtacactgtcaagttttgggagttcctatctgtattagtctgttctcacactgctataaagaaatacctgagactgactaatttatacatggaagaggtttaattaactcatggctgggttccacattgctggggaggcctcaggaaacttgcaatcatggcggaaggcaaaacggaagcaagcatcttcttcacaaggcagcaggaaagggcgtgtgtgaagcaggaattgtcaaacacttacaaaaccatcagatctcgtgagaactcgtcactatcatgagaacagcatggggaaaaccacctccatgattcaatcatctcccaccaagtccttccctcaacatgtggggattatggggattacaatgcaagctgagattcgggtggggaggcagccnnnnnnnnnnnnnnnnnnnnnnnnnnnnnnnnnnnnnnnnnnnnnnnnnnnnnnnnnnnnnnnnnnnnnnnnnnnnnnnnnnnnnnnnntctgcatctagtgaaatatgctttctttctctttttgaatgttagtctgttaatgtgtatccctaggacaaaccctacttgatcgtactgtaatattttaaatatatatctgggtttagtttactaacactttatttagatcttttgtatattagtttatcaattagattagcatatacattttcttttatactagactttcccagttttactacaaatgtttacaaatctcat

SEQ ID NO: 3705 - DNA, 748 bp, Macaca Fascicularis
  misc_feature (1)...(748): n = A,T,C or G
gacataaatgatnnnnnnnnnnnnnnnnnnnnnnnnnnnnnnnnntnnnnnntgtcactgtcaaaatccaaagccctgnnnggcaggcttacttcagatcttcattgccttgcacaatgcaagggtaggtacttccatcttaattgaatttttacttcccataaaaattcttcatggtgacttacattagtcatcattacacatcaccgtcagttttgtaaccacagtgtcattcaaggtattgtacaattttgagtttgatgatgagatgtgtgacagtttcagttattttagtacagccctaatgagaacaaggctgtggtattgattcccttcaaagttggcatctaaatgaaggtcacattcacaaggagggcgtaactgaaagcatgtagaagcatcattataaactgttgttaacacacacaaataaagactattccaataagtattgtttttctnnnnnnnnnnnnnnnnnnnnnnnnnnnnnnnnnnnnnnnnnnnnnnnnnnnnnnnnnnnnnnnnnnnnnnnnnnnnnnnnnnnnnnngttttccagctccttagttaagcatacagctccagtcaaaccaaactagaggtcagtctgtccttccattttacttgctgttttatgttttttaaaagcaatggggttttcaaactgttcttaaagccatggcttaaccaggagtccctttaattagagcacctgtacccttgcgaatnngnggaatggcaggtaatgtt

SEQ ID NO: 3706 - DNA, 171 bp, Macaca Fascicularis
gcgtggggcccgtggggtgtcttcttctcaggggagacttataggagggacggcgcagctttgtgacagagactcagtttttcctcgagagaacggcgcaggtatcttgggggctggggggacacaggtgcgcatacagagagcacgacaagggtctgggggacagacagg

SEQ ID NO: 3707 - DNA, 716 bp, Macaca Fascicularis
gggaggaaaactttaggaatttcaaattgctaaatctaatacaaatatttgacaacggatatagatctaaaagaatggctcttaagaactattgtttactgggaataagctaagctgtatgaagaattcgtaaacatttcatgttccagtaagtttagcagcttatagcaaagactggtggccacctccatttttctcccacccctcctccactgacatctttcttagcagaaactgcattaaaaagtttttgctgacagaacaaaccttgaagtagtatctactttctaaatactactttgcttttcactagtggatttgatgtttgtaatgttctctaaagcttgcaactttttcagcaacgtttaaaaacagattaacctgtaataacttatttgtttgctgctaaaatactcaagattttaccgtttttaactagtccctgtgatacaactttgaaaaatttttaagaaatctctgatgtgtgggctcctttttttccataagaattatgtacatctgtgatgttttacagggggatccacttttaaacagtgtacatattggaccacactgaaatgtcatatatcctttctctacttaaaattggttatttactgtgagttcatttctgatgtattcttggttgttgctgttttctgcctgaagacatgtaaatcataaagagctacatggtatggactatttatttgtaa

SEQ ID NO: 3708 - DNA, 750 bp, Macaca Fascicularis
  misc_feature (1)...(750): n = A,T,C or G
tgtaagtcatcattnanttannnnnnnnnnnnnnntnnnnagcaggtcacgtatatttcaatgataaagtcatgtaaaacatttgtagctataatacctgttatagatannnaccatttttttcacggtttttcactggtggattagtttatttgtatctactttatagtacaattggcatttgaagaagactaacttgaaagtatttttgctactgctttgtctccatttgattattaatgcaagacttttaaagattagccnnnnnnnnnnnnnnnnnnggtgaacctgctttgcctacagctggccacatgtgtgatgtataaggacacagaannnnnnnnnnnnnnnnnnnnnncctactattggtttctctagtgtagccccttcattttagtggtgtaatactctagaattcaaatatcagggnnnnnnnnnnnnnnnnnnnnnnnnnnnnnaattccaaacctatggctaggctgcaactcataccattttttaatagcatcatctctggnnnnnnnctctgagttttccagcccaagnnnnnnnnnnnnnntaatgtacctcaagatcctagagtcggattcttccattgtcctgcatctaggtatnnnnnnnnnnnnnnnnnnnnnnnnnnnnnnnnnnnttccgcacacaaagcaactctcatatcccgtcactttggaatctcgcaggcttctcaagaaaaggatgatttttgctgatactctatgatacaacttggtc

SEQ ID NO: 3709 - DNA, 695 bp, Macaca Fascicularis
  misc_feature (1)...(695): n = A,T,C or G
acattaagttaaaggtagaagactttttgaatctctccacacagctgtctggannncatatttgtattgacaaagggacttttgatgccataagccttaatcctgacaatgcaattgagaagaggaagcaatatgtgaaatctctctccagagtgttgaaagtaaaaggcttttttctgataacgtcatgtaattggaccaaggaagagttgctaaatgaattcagtgaaggatttgaacttttcgaagagctgccaacacccaagttcagctttggaggcagatctggaaacagtgtagcagcattggttttccaaaaaatgtgagactttttcttggannnnnnnnnnnnnnnnnnnnnnntctacacagcaaagttaacctgacacggaaaatccttgtgcaaataaatgcttagtgagtacacagnnnnnnnnnnntgaatagaatatactggattggtaaaagaaaataataataatgagcatctaagtggttgggttttagagatcaatcaataatttttaattttcttttgtatttgaaatgtaaatagtttttgatttaaaagatttcctgtaactgctaaacagttaaaaactttaaagtagtaaatgagtttatagaaagcatgtattcttgatttttgcgccttggtaaagttgaaaactatttatgaagacttgaccaaatta

SEQ ID NO: 3710 - DNA, 732 bp, Macaca Fascicularis
  misc_feature (1)...(732): n = A,T,C or G
cgtgggggcggtggctgtgctagacttcattcactactgcagagccaccgtgtgctgggaactaaagggaannnnnnnnnnnnnnnnnnnnnnnnntggagatgtggaggatnnnnnnnnnnnnnnnnngctnnnnnnnnnnnnnnnnnnnagccacctgatcctgcgggctgagggcctggccactggcttctgcagggatgtgcatnnnnnnnnnnnnnnnnnnnnnnnnnnnccnnnnnnnnnnnnnnnnnnnnnnnnnnnnnnnnnnnnnnnnnnnnnnnnnnnncaggacaaaagcgtgtccttttttgccannnnnnnnnnnnnnnnnnnnnnnnnnnnnnnnnnnnnnnnnnnnnnnnnnnnnnaggactgtttttggatgtggaagatagagcaaccttgcaggnnnnnnnnnnnnnnnnntgtagtagtatttcaggctggaccgctgactccactgtgaccaaggaggattgagtgctgcagtgatggcatgccttggctgtcctgggccctgttcagaaaacacgacaaggtaccacgatcnnnnnnnnnnnnnnnnnnnctggatgctagacccaagtgaaaggggtcccttggagcctttgtttaaatatgccttagtcccagctgcccatttttggttgannnnnnnnnnnnnnnnnnngagggtatannnnnnnnnnnnnnnngatggcnnncagtnncaggtgtgcaaggtgacaa

SEQ ID NO: 3711 - DNA, 710 bp, Macaca Fascicularis
  misc_feature (1)...(710): n = A,T,C or G
agaagggacagtggagtcannnannnnnnnnnnnnnggcaggcacggtgggcaccgatccacagtgggccccgccttcctcagcttgcctccctgcccatgctggcctggcctnnnnnnnnnncaccattggggtgggagagggtgaaacacagggggcccatcctgatcaggccccatctcaaggctggcactcctgcccatcacccttggaaggatcttttcccatgcctgactcccaccatttccctgactgaaatacacccactcnnnnnnnnnnnnnnnnnnnnnnnnnnnnnnaccctcaagagtcaccgtgttgtttgtgctggtagtttgtgagaagtgacctgcgcgcacgcttccatttgatgcatttgatgtgagtgaatnnnnnnnnnnnnnnnnnnnnntcctcgagaccctacatgtgcagtttggctcatctcattaaagatgcttgatgtaataattggttagtttccttttattttcccacaggcttttcatgagtattattttttttcaaagaacaaatctgtatggctttccccctcccctcccatattttcttttgctnnnnnnnnnnnnnnnttggtgaacttgtcctagtatgcttgcctcannnnnnnnnnnnnnnttgtgaattttcttcatctctgtatatagttcatctgtgcttctccctgatgacgctttatttttttcccc

SEQ ID NO: 3712 - DNA, 633 bp, Macaca Fascicularis
  misc_feature (1)...(633): n = A,T,C or G
actttgcctactgnntgaactgcttctgtgacttgtatgccaagaagnnnnnnnnnnnnnnnnnnnnnnnnnncggacnnnnnnnnnnnnnnnncatctcctttgaggaacggcagtggcataacgactgctttaactgtaagaagtgctccctctcactggtggggcgtggcttcnnnnnnnnnnnnnnnnnnnnnnnnnnnnnnnnnnnnnnnnnnnnnnnnnnnnnnnnnnnnggagaagttgnnnnnnnnnnnnnnnnnnnnnnnnnnnnnnnttttctttctcacccaggcaatcttgccttnnnntttgttccagnnnnnnnnnnnnnnnnnnnnnnnnnnnnnnnnnnnnnnnnnnnnnnnnnnnnnnnnnnnnnnnnnnnnnnnnnnnnnnnnnnnnnnnnnnnnnnnnnnnnnnnnnnnnnnnnnnnnnnnnnnnnnnnnnnnnnnnnnnnnnnnnnnnnnnnnnnnnnnnnnnnnnnnnnnnnnnnnnnnnnnnnnnnnnnnnnnnnnnnnnnnnnnnnnnnnnnnnnnnnnnnnnnnnnnnnnnnnnnnnnnnnnnnnnnnnnnnnnnnnnnnnnnnnnnnnnnnnnnnnnnnnnnnnnnnnnnnnnnnnnnnnnnnnnnna

SEQ ID NO: 3713 - DNA, 718 bp, Macaca Fascicularis
  misc_feature (1)...(718): n = A,T,C or G
gtcgagactgctgtgagctgatggcaccactgcattccagcctggttgacagaatgagaccctatctccaaaacaaaaaaccagccctagtattttctttgataaattattgcacatcttttagaaaccaatacttgtaatgttctttaaactattctggaacataagaatagtgcagtagaagctttcttactcagtctcctctcgaagagtcttattagattaattgatgctcttcattccctctgtaaagaaaaactgacttgataaaatggcaagctgaatgcttatagctagtaggctatcattttctagtaagactatgtatttatcccaccagttgaagagtatgctgaacaggaggtggttgttagttttcaatttttatgctaactttttattattataattacatagtttaattaagcatagatacagtgctttacaaaaactttaagacattgctgtataattaggggtggacaagtaattgtgtaagttagaaaagtcataaaaatctaagatgtggcattagattgctttcaaagtctttttaatttctagatttatttaaagaaatcaaaactaaaaatctgtgatgatgtgttatgcgtgtggtttgttcaagacgagctaatacagacattccattcggggaatcctctgttcaaagnnnnnnnnnnnnnnnnnnnnnnnnnnnnnnnnnnnaaatgtacat

SEQ ID NO: 3714 - DNA, 602 bp, Macaca Fascicularis
  misc_feature (1)...(602): n = A,T,C or G
tccttttcatcttagttctnnnnnnnnnnnnnnnnnnaaaagacaagaccaaaaagtaaacattttgatttcataatgccttggtaatatctataaaatttggacaaaatcagtttttcaaaataaccttgtcttttgtttatctataaacaaacagggaatctgccgcatatattattctagatattggtccatatggtccagtgagttagagagtcatatgctttccaacttttttttcctcaaaaatctaactgctgatttgttttcaaaagaaaaactcttgacattatcctgttgcaattctgattcatttttatctcacantcctattgcctaagagagttcttagcacattgtacatgaatttctactgggtcaattaataagtgaccatatatattaaagtccactgtaacaatgtacactgattttgttcaattaaccagtatgactgcctgctatatgccaaacagcatgctagtccctttgtgcacagagataaacatggttttattcttattgaattgataatcttagtgaaggagagagacattaagcaagtaaataaattagtagtctgttaagatttaaaatactct

SEQ ID NO: 3715 - DNA, 1802 bp, Macaca Fascicularis
  misc_feature (1)...(1802): n = A,T,C or G
annnnnnnnnnnnnnnnnatgcatccgcattggcagcatggaggactctgccaaagccaacatgnnnnnnnnnnnnnnnnnnnnnnnnnnnnnnnnnnntcttnnnnnnnnnnnnnnnnnnnnnnnnnnnnnnnnnnnnnnnnnnnnnnnnnnnnnnnnnnnnnnnnnnnnnnnnnnnnnnnnnnnnnntgggatggnnnnnnnnnnnnnnnnnnnnnnnacatttggtgcggctctgttcgtgggctggnnnnnnnnnnnnnnnnnnnnnnntgggggtgtgnnnnnnnnnnnnnnnnnccggggcctggcaccagaagaaaccaactacaaagccgtttcttnnnnnnnnnnnnnnnnnnnnnnnnnctacaagcctggaggcttcaagnnnnnnnnnnnnnnnnnnnnnnnnnnnnnaaacaagaagacatatgatgggggtgcccacacagaggacgagttacaatcttatccnnnnnnnnnnnnnnnnnnnnnnnnnnncaagacctctcagcacaggcagaggaaactcccaaagagctcacccaaaaaacaaggagatttcatcttgacttcttattgcttttgactcacagctggaagttagaaaagccttgatttcatctttggagaggccaagtggtcttagcctcatgtctccgtctctaaatattccatcataaaacagctgagttatcatttatgaattagaggctatagctcacattttcaatcctctatttctttttttaaatataactttctactctgatgagagaatgtggttttaatctctgtctcacattttaatgatttagataactcccccctcttcctcctagtcaataaacccattgatgatctagttcccagcttatccccaagaaaacttctgagaggaaaaggagtagatcgacagacattattttctgctgtttgacttttgcctccccacccctagcttggctactaatnnnnnnnnnnnnnnnnnnnnnnaataagagcaagatatttgcaatctctccagcccatgatctgggttttcttacgctgtgatcttaaacattaccaaaccaaagtgatcttcagcttgaggcaaccaagcctttctactgctgttagcatcttcttattccagcaagaccattctaggagtttcctgagctctccactggagtcctctttctgtcacgggtcagaaattgtccctagatgaatgagaaaaaaatttttttaatctaagtcctaaatatagttaaaataaataatgttttagtaaaatgatacactatctctatgaattagcctcacccctacatgtggatagaaggaaatgaaaaaataattgctttgacattgtctatatggtactttgtaaagtcacgcttaagtacaaattccatgaaaagttcactgatcctaattctctccctttgaggtttctatggctctgattatacatgatagtaagtgtaagctatgtaaaaactaaataatgtcnnnnnnnnnnnnnnnnnnnnnnnnnnnnnnnnnnnnnnnnnnnnnnnnnnnnnnnnnnnnnnnnnnnnnnnnnnnnnnnnnnnnnnnnnnnnnnnnnnnnnnnnnnnnnnnnnnnnnnnntacagagaaaaaatcggccagtcatggtggcatacacctgtagtcccatatcctgggaggctgagatgggaggatcacttgagcctggggaggctggggctgcannnnnnnnnnnnnnnnnnnnnnnnnnnnnnnnnnnnnnnatagcgagatcctgtctaaaaaataaaaaataaata

SEQ ID NO: 3716 - DNA, 655 bp, Macaca Fascicularis
  misc_feature (1)...(655): n = A,T,C or G
tcagttttcacctgtnnnnnnnnnnnnnnnnnnnnnnnnnnnnnnnnnnnnnnnnnnnnnnnnnnnnnnnnnnnnnnnnnnnnnagaagaaagggaccagacagtgttaagatgctgcagttgtgttactgtgaagaaaagattcgctnnnnnnnnnnnnnngctatataaatatatatacatatatatatatatattttcactttggttaaaaaaagttgaaaatctgnnnnnnnnnnnnnnnnttcacaaattatttatagatacactgggtgnnnnnnnnnnnnnnnnnnagtcaccagaaaataactaattttagtgctttcaatagtataatattagtatannnnnnnnnnnnnnnnnnnnnnnnnnnncactgtgtcctaatactgtaaatttcctggtttataattcttatggaaactaatttgttttgtaatggaatccagagcagatatgtataatatgatcaggattgtcctacagttgtaaataagaataggtcctgtttattttgacatctttnnnnnnnnnnnnnnnnnnagggtgtgaatattctgaaccatcctcttgtttaaagtttggaaatttttattgttaaatgtaacattttaatggttgtaataattatttgtatagatacgaatatagtatt

SEQ ID NO: 3717 - DNA, 747 bp, Macaca Fascicularis
  misc_feature (1)...(747): n = A,T,C or G
ttccccagtgactggnaatngaatacttcctcagttgccatacactccagctttgtannnngacccaaactttctctgttcacagtttccttttgttttcttcattcacccatccgcatctctgactgcttatccaagacttctctgtgatagctgacccttagtctttctctcccctattcctccagattagatcctgtctccttcctgcaacccccacacagcctttagtttataatcttttgtatggtgcttagcaccttctatccctaaggacaactaatgcatttgagatttcccccacagcatctggcagggtgccttgcatgcagtggacactcagtatttgctgaattaaattccttcctatggatcccttctgattttttttttgaagtgcctctaatacacatatcattctggggcttatgccacttttaatgtcattttctaaaggaaaatcttatctatgacattttcccttataagagataattgttttgagtaggggtttttttttttttaaaagatatagtaggaattttttttaagcctaaatatcaaattccttttcctttggggtgggggaaggaatgaagggagaacaacttgctctttcatatgagttggtcatagcatgtaagaaccaatcttgaaatagtttttttctaaatgacttataatgtatttctagaaatactttgtacttaaaatgataacagtttgtatctttttgtccatataaag

SEQ ID NO: 3718 - DNA, 104 bp, Macaca Fascicularis
caaaaaacagaaggcaccagtgcacctgccacccgattgttggtgcgagctgctccttgagcattaaaagtaggctttattcatcccttatgttcatttaccaa

SEQ ID NO: 3719 - DNA, 2249 bp, Macaca Fascicularis
cagagctcctttggctagtggctctgaaagggtagagcagttagtgggaaagcctgctttggatatggaaccaagacaggaaatggaaaaagagtctacctgtgttgtaatgaaacccggcacagagattaagcctcctgtggaggtggacattggactaacccaagccgaggagccagatgagactaagaatacagagccccaaatgggcttggtgatagaacctccccaatgccagtttgcccaacaacctgaagagagaaaggaggctggaaacattgaatcaggagtggaacctccagatcgcatcagacccatatactctgggaaattttttgatcgaacaccttgctggccaagtgcaggaaaagttattccagttggttacagagttgcaagctgcgtgactgaaaaacttcccaggctaattactccacctgcgtcaaaaaagtatttcaacttcagatatccacctgctggagtagaaagagtattttatggaagagcaaatgatccccaaattgcaccttatttgacacatggaattagatctaaaatttcaataccggcaaacacattgataaacccacagcctattaccacatttcaacagaaaattaaagataaaaaagaatctatatatcttagcaatcgacgagcaccattaggaaaatctcatgatcaagcaccaggattacctaaaggaatggacacaatcaatacgacatttgggacagcaatcatcagagaatactctgctaaagacgtggtgaatccaccaaaatcctatgaagaagtatttaaagaaggaaatgaaggacatgatttgtatgttgtttctcataatgattattatgcaggagaggcaaagaaccgaaagtataacccatcaagtttccataggtttaatgtgtatggagtaccaacaccacattttaatgatggacgagccatggcaaaatctttatattggctccatgaactacaaatgaaaagaggagctaagtttgtatccaagagagcagatgatttcaaagaaaagtttcaacataaacttggaagagttttagatcccattgcagaaacaatgaatgttcccccagactacacatttggagcttgtctccgtcctgaggagtatggagttggtgatctcatccataatagacttccgggtgaatatcttcgaggcaaggatagacagcgagccctgattgcagcagttcggcatcacttgaagaaagttaattaccaaaaatttgacactttgctggcagccttcaggcactatgacaagaagggagatgggatgatagataaagccgagctgcaggaagcttgtgaccaggccaacttgagtttagatgacaagctcctggaccagctatttgactactgtgatgtggataatgatggcttcattaactatctggaatttgcaaattttcttaactggaaagacaaaatgcttcttaaagagtatgaagagagggtcattattaaaggtagaaaaccagattgtgtaaaccctactgaggctaatgttgaagaacctgaaccagctctcctcataaagccagaagatattgtcttaaaagaaccagggagcacagaaaagactcttcggacacttctgagaccaagtgataaagtttccaactactataagacaacttcttctgagatcaatgcagttgtaggagccgttcctgctacttgttaccctatttgtggagttccaaccattcgatctgacattcctgctccccgaattcgtcgcatcagtgacagaagtaattatggtgaagaaggtggtgcgtattcactgttgtatcctaccgtctttgcccagaaaggagtgttcgagagagacttcttcaagaccagatcaaaagaagagattgcagagatattgtgtaacattggtgtcaagctttctgatgaagaatttgaaaatgtatggaatcttgcatcaaaaaagcatcacagaggagaagtttgtgttgagaacatcagaaatgttctagatgagctgcggcatgcagacaggatcaagtgtaaaacacccatgtgatatttttggacttcattcaagcaaaagaattattaactgtgtttatctaaaatgttcagtccattctggctttagatattacgttagagttcagcaatcacagtggtaagactcatatgcctgtatgtgttgctaataaattagattttggattttaaaaaaaaaaaaaaaaaaa

SEQ ID NO: 3720 - DNA, 745 bp, Macaca Fascicularis
  misc_feature (1)...(745): n = A,T,C or G
catgtcagctgccagaccacagagcccatccctgccctccatctgtccagctcagccaccctctcaccaccccctggcagataagagcaatgagatatgcagaacaggcccagggctgaggccgcgccgccccacccccatccttcctgaaattnnnnnnnnnnnnnnnnnnnnnnnnnnnnnnnnnnnnnnnnnnnnnnnnnnnnnnnnnnnnnnnnnntgtttgccttccagggatttctaagaatcatgtggggaaggtattttaaaagttcagaatacaaacaaaatgacaaagagcaaactcagctggtcacccacacattccctgcccagacttcctgtccccagggtactggaccccagccacctgggctgggagcctttcttctctgggctgtgctggggaagctgtgggagccccgagaacgaggacggcccgcagtgggtgggcctgctttgccccccacccagggatgcctcttgctccccaggatggcgtgagnnnnnnnnnnngatgggaatgtcagcatttcctgttctgtgtaaggcaccaaactagggtcannnnnnnnnnnnnnnnnnnnnnnnaaggatggcagaaattgggcgggggtgggggcgggggagcttgaggacagggagcaggcgtaactacccctttcacatggagtggcaccaagtttagtcccaccccagggcaggcatgtcatgtttccttacttctccaaagccatcactccgt

SEQ ID NO: 3721 - DNA, 173 bp, Macaca Fascicularis
ttgtttgctagcgagggaggtgggtgcagcgcttggtaggggtgaggggagcagagagagagagagagagtttggtccccaagtattgagccgtaaaagagcagggacaactccacggtcagcactcagagcggagaattagagccgtccacgtcccaggttggaacagactc

SEQ ID NO: 3722 - DNA, 333 bp, Macaca Fascicularis
taatcctctttcagagacagattcggtttccctagaatgacggcagaggtgataaggcataagacagaaatagtaggaaagactttggatccaaatttctgatcaggcaatttacaccaaaattcctcctctccacttagaaaaagcctgtgccctgcgggagtattggctcgggggagacttaggaaccttgtttttcttcttcctgcagtgctctcatctgagtcgttgaaagcagggaaaagaagcttttagtaaagccaggtccgaaaacaccactttcctctgtctcttgcaggactcctgagctgaagtgccgatgaccacattcaa

SEQ ID NO: 3723 - DNA, 726 bp, Macaca Fascicularis
  misc_feature (1)...(726): n = A,T,C or G
gatgcgggtgaaagannnnnnnnnnnnnnnttgctnnnnactgaaaaggggtgagagttgaaaatcagaaagaaagagaaatatttcattatgttaatgaagaaaagagaaaactgaagcataaatgtatttttgaagcagttattgggtagctgagaacttagtaagggatttaggaatctaacctcccgatatggattcctcaaagacttgatgtgagaatattcttgtttcaccattatgttggtacagtatagtaccacaattttatgttgtgccagtgaatccagttgccagaaataagtctgaatgttttcatgcatctttttcttaaatgcgagagcttctactgacttttaacaagcatgcttacccaaattttgttgcatgcttttaagtagcattagctatacacacttgacatttttaaatattcctttcctagtgtaccagccttcacaggaaaagaggactgagaataaagtcagatgtaatgtgaccctagagaactgtagcaagcttcagaaataaatcttttgatctttccctatcttgattagatccaaagtcaaagcaaccatacttcacctaaagaagacagtattgacaatcatgacacctgttataaaaacttgactccaaagttaaaatttaagcaagatacaaatgtgctgcctgcagttagtcctgcatgggaataaggactagttattttttagtgctgca

SEQ ID NO: 3724 - DNA, 877 bp, Macaca Fascicularis
  misc_feature (1)...(877): n = A,T,C or G
aaaatgtatgattctatttatagtcaaatttaaatnatctgattataggacaaaattaggagagactttaaacctgcccttttagtgcctaatttgccactaaaaatagtaaaactactcacatttgataagcaatctgtcttgttatttgttgtcctatgaactatgaaaaagaactaagaaaaattcccttctttctttttcttttcataaaactcaatccagggcctgcatattatattcacatttttcttgtgtgcttccttttgtatgttttggccactctggtggaattttctatgataagaggaccaccaatccagtatgcgtggtgtggggttggcccattgagtgggcctcactgggcctctggggaagagnnnnnnnnnnnnnnnnnnnnnnnnnnnnnnnnnnnnnnnnnnnnnttttaagttaactatgttcttcnnnnnnnnnnnnnnnctcgactttggagatttaacatcagctctgtgattgagcagaaactctgaaaagaagatgtcccagcaatgccnnnnnnnnnnnnnnnnnnnnnnnnnnnnnnnnnnntaagaaggtgtcccgagaaagggagtcattggatgtggaaccaccagggtgacttaaatattattnnnnnnnnnnnnnnnnnnnnntatgtaaacaaaagtaaaagcgtctttatacatacaagataaacatcatttagcttttcatttgtgtgtccctaacnnnncatctgtctgctgtgcatattttctttttaaaaaagcataaaattaaatttaccaggactcatccaattgtgatttctctatttacttcctatgatctaacannnnnnngtaaatatttatgggacacatataccattaaa

SEQ ID NO: 3725 - DNA, 993 bp, Macaca Fascicularis
  misc_feature (1)...(993): n = A,T,C or G
gatataggtttgtaaggaacttctcatttcaatacacggttagcgcattaaaagcctgggaatttggggctatatttttcctttctgactcaataatcttcaaagaattcataggaaagtcagtatttgcagacaagtggttaacttggctaaaatgtacaaaacacccagaacccacaaaacactcagaggtttaggagaatgttttaatgcttaagaggcaggattaagtgaagacattaaagaaatcagtgtccctggctgggcagtcaagagagcagggctcaaattctgtgactcacttctctgtgtctcagttggaaatgaatggggatcctggttcccaccttcccacacgctgtgatgcttcaaactcgttggtgaagggcctcttctcagcccaagattttgattgtgaacattaacaaagagaacagtcatcctccacagaagataactcattaatgacatttgattcagtgaataaatgtattattttaaaaaatattgtaggggatcatgaaagtagtggaggtaattgcaatcaggagagattggtattaaaattgagcaaagtcccaactattgccagatgacaattatgcattctgctagatgccccagggctctcagcctggaactgaaataaatgggttannnnnnnnnnnnnnnnnntttttcagttcatttgaaaacatggatttgatcatgtcagctcccnnnnnnnnnnnnnnnaaagtagcttgcataattggtgttaactactctgttttgattctacagagtaatacttaaatgtggtcttactttaatttcttgcctgttttacccccagaacaatgcagacttactgaaatgtgcagtgtgtgtgtgtgtgtgtgtgtgtgtgtgtgtgtgtgtgtgtgttcatataacnnnnngacaggaatagtaaggacctggannatgcagacttattgaatgtnnnntgttgtgtgtgtgtgtgtgtcatat

SEQ ID NO: 3726 - DNA, 718 bp, Macaca Fascicularis
  misc_feature (1)...(718): n = A,T,C or G
cactttgaccattattcatattatggtactttggaaagtttatgtaaatcggggagaaaactnnttnnnnnccagatcagcagctaactctagaattacttaaagtatttttccatttnnnnnnnnnnnnnnnnaggactctcaatgctcgtatttttctcaaggccgacagtacacatgccctaaggtgttcttcaccagtatttctttttaaattacaatctgtatatatcttattcatattattgaagttgaaaacacgttctaaatgaaaataacactaagaatttctataaaataatggggaaacattttcaaactacatctcagatgttagattagcatccacaatttatnnnnnnnnnnnnnnnnnnnnnnnnnnnnnnnnnnnnnnnnacatacaattccaatagatatagacatgaacaatgaacttgttgattatgttaaaactgtaagaactaataagatgctaatataaatcctcagaagaatattaaatggaaaagacaggttgcaaaaggagatgattaatgtgnnnnnnnnnnnnnnnnnngattatatgcatgtgtaggtggacatggtcatgtgcaccgcatccacagaaannnnnnnnnnnnnnnnnnnnnnnnnnnnnnnnnnnnnnnnnnnnnnnnnnnnnnnnnnnnnnnnnnnnnnnnngaggtgaagattaattacaattcataaatgtgctttt

SEQ ID NO: 3727 - DNA, 956 bp, Macaca Fascicularis
  misc_feature (1)...(956): n = A,T,C or G
cagtgtgtgtgcagcagcccatgtgcctttacctattgtcaaacttnnnagcatttattngtctttatgactgtcatggggactgaggttcttcagagagagagagagtgagctgatgacacagtggttttacacccaccccctggacagggagtttgcacgtagttgtgagctgtgagtggttagtgnnnnnnnnnnnnnnnnnnnggcagggttgatccctcacttgattgatacttgcattcaagagaatctagattgtgttgggggagggactgactgtactcatnnnnnnnnnaaagtattaaaataaggctgtcccctacaaccttcttagtcacacaggatccctgtagccaaaacagtatatgatccagctgcagagagcagactgctctcagcttgcacagcaccttaggcgagggaagaatatatggatagggaatggggtggagaaaggaggatgggaatgttgtcatccaggtggctttagggtcctaaggagtggagaaggatggnnnnnnnnnnnnnnnnnnnnnnnnnnnnnnnnnnnnnnnnnnnnnaaattactgatcccccatctactatccccagtatgtaatgnnnnnnnnnnnnnnnnnnnnnnnnnnntgtatctaaagccttagaactagtcaggtgctccctccacccaataccatttcttaccctctaatcctacctgatctttaacaaagcattaataattctaaggataatctctattttgttgtgcttttttgtaactgttttaaataaatcaatttgtactgtatatttgtacttttgtgagatcctttttgctgttttaccattttaagtctctgtacttggctacacacagattgtatttttattgttaatgctcttcttatggatacctgcatttaacttgtggactatgtaaacacaatatctatcaatatctatatatctat

SEQ ID NO: 3728 - DNA, 581 bp, Macaca Fascicularis
acttttatggcttttaattttcgatttgacagatgtaagaagcagcatgaatagtttatactgtggtttttcagagactgaatgccaagagaactcggtaaatgtttattcttctcagctttctctttaaattcccctaaatagcgccccatttgggaacagagcaagagtgttgaactgaagaccaaaatgccctcaaggtgtaaaataatccgagggggaatatttgctgggcgtcaggaaagactcggatgaaatttcaaccctgatggttttcggtgatccaggaagtcagtgagacaatctctctatacgcagagccctttcatgataattagaatggtatggacaaaccaatgaaaacaagagggaaagtgagaaagatcacccatgattctgtttcactgtttgctttctcctgtcatggttaagagaaatgtgcaattcaatcctcaatcagtgggtggaggataacagggtagattcacttgtgtgcacttgtacagttgtagctgcgagtccagaagtcctctagagcatgtgtactggcactgagttggtgagacagttgtggagtatcc

SEQ ID NO: 3729 - DNA, 743 bp, Macaca Fascicularis
  misc_feature (1)...(743): n = A,T,C or G
cccataagtgctggnnnctgttgacaccannnnngccanntcatctgagattgctctcatcagctcacagagattcagttcagagaatgaaccaaatctaagctaaaaagcataaaggagggcagaaagaaacagcagggtgggagaaagagcgcacacaccgcgggaaagatgtccacctggcagccacatcacagaatcaccagtatgtacgtcactgccaccaagaacctagaaccacagaggcctacagaagccaatcccagtggaactctctccgggtgcaggggctgagagaacctaaaacattcaggtggccagagcttctttccagagatgggaaccagtctcaaagcctttgcatctctcccctgccctccctccatcactctgctgagaactctgccccgggctggcctgctgacatgacacgaatagcagtggcctgtcactcatcagtatctgcagttctgtttaccaaagcctgcttgctagagacttctcagggcctccttccctcaaagtgtccattgtacctccatctggatacaattagctggctccccacttcctggactgacggtaaccaccttttccaatgaccctgaagaaaacacacaatctaagctgctttacgagtaaacctacaactggacaaattttctatcaacccccagtacccctctctgctgtggctgatttgttactggttttcttttttttnnnntcaattgaaaacgaaa

SEQ ID NO: 3730 - DNA, 730 bp, Macaca Fascicularis
  misc_feature (1)...(730): n = A,T,C or G
gatgctgtgctgtactgctcagtcnncnnntcaggagtaaaggacttnncatcctggatgctgagagtgtcttaagcaggcaccctcaattgtgagtcctcttaaactattgtcgtatctcttcccagaatgacccccatctgatgattgatgctggaatataaaggccttatttctcttaccacaattcaggacaaatcttaagcattaactcatcttcagaactccctgtagggttctaaggcttccatttggactgcattgcagctcaacttctccttctactcaatcttgcttccttccctcctcttctcttctgtagttatttaatctcaatagcactctttaataatctcctgcatgctactctgtgtctcagagtccacttccctcagctaccttggctccctgcttcgccctatgttaccgttgctcccaatatgaatagttattnnnnnnnnnnnnnnnnnnnnnnnttccttctagccagccaagatgtaaccttccgctgaactacagatgggggcctgccagatatcctagattagggaggcatggaatgagcaatgaagcaggaatcagaaactcagaccagcagcaggcaaagaaagtaccaggtgatatcacttataaaggggaacccttgggatcaagtaaggagtgaaggttaggaaaaggaggtggggagccagattgttactaaaaacatgtgaaataaaatacagcaaca

SEQ ID NO: 3731 - DNA, 689 bp, Macaca Fascicularis
  misc_feature (1)...(689): n = A,T,C or G
cagcagtatctggttgtgcttgcagatgggtaaagacttaactgcctgtcacatgtctagccaggtgttgtctgtggcactgtgcnnnnnnnnnnnnnnnnnnnnnnnnnnnnnnnnnnnnnnnnnnnnnnnnnnnnnnnnnnnnnnnnnnnnnnnnnnnnnnnnnnnnnnnnnnnnnnnnnnnnnnnnnnnctgcctgtgtgctctgcctgtgggtttgggatctcttagggggagccttggttgaatcttcactgtcttcccaggtcttccatacgtgccnnnnnnnnnnnnnnngcttgaagttccaacacgaggtcagnnnnnnnnnnnnnnnnnnnnnnnnnnnnnnnnnnnngactctaatgcgagcggcaaagctgatgggctctatcccaaccctcgggaacggtccagcttctacagctgtgcaggggggcggctnnnnnnnnnnngctgcccggcaggcctggtgttcnnnnnnnnnnnnnnnnnnnnnnnnnngaattgagtccctaaggcccctccagtcccagcttcgaggctgggcccaggatcactctacagcctgcctcctgcggtttccctgtgggctgtgatctggctcctgcaggcctctctgtggtcttcctttacccaggctttctgctctcagccctgcctcccttttttctgggtctcctgggctc

SEQ ID NO: 3732 - DNA, 754 bp, Macaca Fascicularis
  misc_feature (1)...(754): n = A,T,C or G
caaggatgtatgtatgcncacgtatggagcaggttnnnnnggcccctgggtgcagggaagtgggttggaggggagcttgaggaatataaggagcaggggtggggactcaggctacggacaaggacagccctaagattgggaagatctggcctagtagtcttcaaaccagggatagggaagtgaagaaagctctccccgctcctgctgtaatgacccagagtagcctccccagtctggcatcttatgtgtgtcttccaccatcctcacggtggcacttttctaggcctgtctcccagcattgagcaaggctcagaggagaaccaggaagtgaaactgggtgaaaacagaaannnnnnnnnnnnnnnnaggttcccagatcattagggcagagtttgcatgtcctctggtcactggtatccacccagcccacgaatcatctccctcttgaaggattttatttctactgggttttgggacaaaatcctgccgagaccccacagccagaacctgaaagcagtagctccnnnnnnnnnnnnnnnnccctaagagaaggactggggcaggaagtggagtgacaggagacaggtagagagaaggggcccaatggccagggagcgaaggaggtggccttgctgagagcagtctgcacatgcttctgtctgagtgcaggaaggtgtggcagggtcgaaattacacttctcctacctggagacactgtttgtgggagtactgggctcgtgcctggcacacaata

SEQ ID NO: 3733 - DNA, 705 bp, Macaca Fascicularis
  misc_feature (1)...(705): n = A,T,C or G
agagtctgcagcgccccggcagtggcgatagctgcacgagtggcagggcagacccgcaacattactgtggannnnnnnnnnnnnnaaaagcggnnnnnnnnnnnnnnnnnnnnnnnnnnnnnnnnncagccccnnnnnnnnnnnnnnnnnnnnnaggatctggactttgaggtcggtggtgctgcccccttcaacaggactcacaggagcaagcggtcatcgtcccaccccatcttccacaggggcgagttctcggtgtnnnnnnnnnnnnnnnngtgggttggggataagaccaccgccacagacatcaagggcaaggaggtgatggtgttgggagaggtgaacattaacaacagtgtattcaaacagtanntttttgagaccaagtgccgggacccaaatcccgtnnnnnnnnnnnnnnnnnnnnnnnnctcaaagcattggaactcatattgtaccacgactcacacctttgtcaaggcnnnnnnnnnnnnnnnnnnnnnnnnnnnnnnnnnnnnnnnnnnnnnnnnnnnnnnnnnnnnnnnnnnnnnnnnnnnnnnnnnnnnnnnnnnnnnctgacctgccgacacgctccctcccctgccccttccacactctcctgggcccctccctacctcaacctgtaaattattttaaattataaggactgcatggtaatttatagtttatacagtttaaagaatc

SEQ ID NO: 3734 - DNA, 1683 bp, Macaca Fascicularis
tactgctagggaaatgtcaggaatgtacagatgtcagaccagccaatacaatggatttaacgtgaaaccaagggaagccttggtgcagctcatcgttcagtatccccctgcagtggaaccagcattcttggaaatccggcaaggacaggatcgaagtgtcactatgagctgcagagtactgagagcctatccaatacgggtgctgacctacgagtggcgcttgggcaataaattattaaggacgggtcaatttgactctcaggaatacacagagtaccctgtgaagagtctttccaatgaaaactatggagtttataactgtagcatcataaatgaagctggagctgggagatgcagctttcttgtaacaggaaaggcctatgctccagaattctattatgatacctacaatccagtatggcagaacagacaccgtgtttattcttacagtctacagtggacacagatgaatcctgatgcagtggatcggattgttgcataccggttgggtatcagacaggctgggcagcagcgttggtgggagcaggagattaaaataaatgggaatattcaaaagggagaattaattacatataacttgacagagctaattaaaccagaagcttatgaagtccgactgactcctctcaccaaatttggtgaaggagattcaacaattcgtgtgatcaaatacagtgctcctgtaaatcctcatttgagagaatttcattgtggatttgaagatggtaatatttgtttgttcactcaagatgatacagataattttgactggacaaaacaaagtactgcaacaagaaatacaaaatatactcctaatacaggacctaatgctgaccgtagtggctccaaagaaggtttttatatgtacattgagacatcacgacccagattggaaggcgaaaaggctcgacttctcagccctgttttcagcatagctcccaaaaacccttatggacccacaaacactgcatattgtttcagcttcttttatcacatgtatggacaacatataggcgtcttaaatgtttatctacgtttgaaagggcaaacaacaatagagaatccactgtggtcttcaagtgggaataaaggacaaagatggaatgaggctcatgttaatatatatccaattacttcatttcagctcatttttgaaggtatccgaggtcctggaatagaaggtgacattgctattgatgatgtatcaattgcagaaggagaatgtgcaaaacaagacctagcaactaagaattccgttgatggtgctgttgggattttggttcatatatggctttttcccattatcgtcctcatctctatcttaagtcctcgaaggtgaccttatcctggcagaggctataaaagattcaccaggcactggcatgaagaaagagtctttgtaaatggacattgaacaaacaaactaccaaagattcctccactgactactgactcaaaaacaaaataataaaaaaaatttttttaagcactggggataaaaagacatcatggaagtataacttattccaaactaaacataaaagatattcttgacctgagtagagaagagaccttcaggtgcttttgtggctaaaaaagattacagcgtcatctggttgaacttctggaaaaaaaaaaaaaaaacgaaaaaaaaaaaaaaaa

SEQ ID NO: 3735 - DNA, 684 bp, Macaca Fascicularis
  misc_feature (1)...(684): n = A,T,C or G
tatgannnnnnnnnnnnnnnnnnnnnnnnnncccccaagaccatcctgggtgctttatcattaatagtctttccctctagacnnnnnagtggatttgtgnnnnnnnnnnnnnnnnnnnnnnnnnnnnnnnnnnnnnnnnnncttaccggggttgagaaacttggcaaggccatgtagttcgtaggctggttagaaccatgctctcccgctcccctgggacgcctttgtcaggttttagtaattgtgatccaggtcatgatggtttggccctgttccactcatttcccactcttcttcctgtaagattggggccggggggcactcttagaaacctgggtggggtgtacannnnnnnnnnnnnnnnnnnnnnnnnnnnnnnnnnnnnnnnnnnnnnnnnnnnnnnnnnnctttgggtctgacctgatacagcaattagagagnnnnnnnnnnnnnnnnnnnnnnnnnnnnnnnnnnnnnnnnnnnntttacaggagcaggagcagtgacttcacctgagaacatcccagcgggaggacaagagaaatcatnnnnnnnnnnnnnnnnnnnnnnnnnnnnnnnnnnnnnnnnnnnnnnnnnnnnnnnnnnnnnnnnnnntgatnnnnnnnnnnnnnnnnnntggttatgtatttnaaanncaagtctgtttcttgttttgtattttct

SEQ ID NO: 3736 - DNA, 1081 bp, Macaca Fascicularis
  misc_feature (1)...(1081): n = A,T,C or G
ttttccccaacaggcaatcaggaaatgattccttnnnnnactacttttgtctagtgcctgggaatcttgagtcagtcagtccctcagtaagtcagtgactaaggaaatctcccctctctgagcctcccagttcatgttgctnnnnnnnnnnnnnnnnnnnnnnnnnnnnnnnnnnnnnnnnnnnnnnnnnnnnnnnnnnnnnnnnnnnnnnnnnnnnnnnnnnnnnnnnnnnnnnnnnnnnnnnnnnnnnnnnnnccatgtggacaagtcagcaggatcaggacacgaggaagagtaaatgtgagatagtcatgtgacttctgcgataatattctagatttttaaaccctgaaattttgctaaaattttggtgaaaccctgaactttcttcattgcatatactggccctatctgtaccatcatacagctatctcacattaaagctatttttcttcagcactgatgagtaaggttggtatgtttgagttcctcagatcaacaaaaacccattttcctgtaagtcttatgtttagtatttaaggaactaaaacttaaatacattgtgtgaaatggttgacacttcactgataatgatttattgcttggattaataaattttccaaaagttgtcttattatatagaatatggtttgcaaccagcagaaccattaatctatactgtgataaaatgcactatgtataattgtttaaaagcttctacttaatgatgtaacatgctgtatttaattacacatttggctaaactgtatactaacatctgatggcatttttccagtgtgttgcttttttcaaatactttattgtagaaagctgttcttaatatttttcaagtttttctctttgaattttgctaatgttttccttgaattatgagcactgacagaatgtgcttagcacttttggctattcacacagcttttgagcatgatttgcatccagtattgacattgctagcaataataagccatctgtgagttttgtcagaagttattggggattttttaaattttagaaatgcaaattaattgtttccttgaactaacttatgcagttgcaaagg

SEQ ID NO: 3737 - DNA, 2511 bp, Macaca Fascicularis
gacaaaatagtagttctcatgtaaggtctcttgtgtaatgagattggctatgcaagtttgcagataagatgtatcccagtgtgaaattgcttgcataataaagaggagaagaatttaaagagctaatgaaaacagtctgtagggaaaaatagacaccaagaattctattcttcttggtggaaggggagatgaaaagcacccttctacccaattatcaccataggagaaaaaatattaataggggaggaagaggagttaagccatgcaatttaatgcccattcacctccactatagagtttgtggtaaaatctaaattgtgtaccaatggttgtcataaatgtcttctttcatgaaatcaaatagatgcagagttctacattactttgaatgtgggatgaagactgggagcaaatggagtaagagaagaaaggacattaaaatctgggttatagttaaattggttcctcttagaactagtgaaaatgttcacactaataaaacatctatgagggcaagctggcattcattcattcatttagtcttcattcattttcaacacatacgtgatgaaccgttcttcgatgtactagccaagtatcaggctttggtagttaatgcaacaagcatctctgcaatcatgcagcttttatggactaaggataggagatactgagccaaagtcactcagtaactataaaattatcattgtgataattgctataaaaaagcaggacactgtgaagtcatgtaagaaaggaaattaatcttgatgggagcctcaagaaggccttccaaaggaagtgaattatatttatacctaaagcaccagtaagattaatcctgatgaagacaaacaaaggaatttatctgttaggatttgacacaatagcaaataacaaaaacatctaaaatattaataatggcttaaagagaaagagtttattttattcccacttccaaagcctagagataggcagtccaaggctggtagggatcacttctgtgaggaacccaggattcttcttttttgttgttcaattgtacaggtcgtctagttccaaggatacttcatggcccaggacaaatgctccagctccagctatttcattagcattcaatcagcaggaagaagaaggggaggaataagggcacacctattcactttaagagcacttcttatatcccatggttatgacttagccatgtggtcacacctagctgcaacagacactggataatgtggtatttattgaagaagacatgtgcccaactaaaagtggagttttagtactatacaagaataaaggaaggtgttactaaagacaaaaggaggaggggagaatgtatattgggagatgactaatagtctttgccggagaaaaccatatgtgctaaggtaaggtacaaggcaagaggaagtttggtatactggagggaaagagggaagctcagtgtgtttaaacattatgggcaaaggggaggaagagtgttagtgctccccgaccaaaccgagagtcgggctgcttattctcatggtccaataacaagatgcagacaaattgggaaagaagagatttacctgtaaccaggtacagggagaaggctggggaaaatatcaccagaccaaatcaaaattatgaagttttccagagattatataccttctatgctgtatgtttacctgtaagtgtgcattcatctaaagacataagtgattaacttcttctcatctataactaaggtctgagtccttaagaccttcctctggagcctcagtaaatttacttaatctagatgggtccagttaccaggggtgattacccttatcttgtctccagctaaatcatgaagatttgggagttcctttagaccccaataacacttgtgtgtggaggtctgggaagttccttcagacccccagtaaaacctgtttaatactaaatgggttctgttaagaattcctttgttatttcatcatgcttcaaggccctggaaagacctaggcaaaactcttggtgggctttcgttatattccagcctttgtataagggctagtggctctatcagctttaaatatttaacttaaccactccgtcagtgctgcaacagttgtcatggaggccttcctgttcaggtgttaatgagacctgacctgccagattagtggtgggatacagagggaggtaggggcagatcatgcataaccttttggatcgtattaagaattttgaacttcgtcagaggaacaatgaagaactattgaaggttttaaggaagagaaaaacatgatcacattctcatatgaaaaaaatatttctctgatcactgtggagaacaggttaaagataacgttggcaatacttagaaagtttaggccaggcacagtggcccatgcctgtaatctcagcacattgggaggccaaggcaggtggatcacctgaagtcaggagttcaagatcagcttggccaacatggcgaaaccccatccctactaaaaaaaaaaaaaaaaa

SEQ ID NO: 3738 - DNA, 734 bp, Macaca Fascicularis
  misc_feature (1)...(734): n = A,T,C or G
tccaaattcagactacatctcatcatataaataatatgaataataagggtaaaagattagccaacaaaaactaatctagtacaccacagaggtactctagatacatttttatagtggagaaaggttactttgatctctcaataatggcttggtacacttcttcctgggcaatatgctcgtgataccctcttcttgtgacctattcctcaaatgctacattctccagaacttccctacctgccttctatccctannnnnnnnnnnnnnnnnnnnnnnnnnnnnnnnnnnnnnnnnnnnnnnnnnnnnnnnnnnnnnnnnnnnnnnnnnnnnnnnnnnnnnnnnnnnnnnnnnnnnnnnnnnnnnnnnnnnnattaaaagcaaccacgttgctgttagcgcaaattaatcnnnnnnnnnnnnnnnnnnnnnnnnnnnnnnnnnnnnnnnnnnnnnnnnnnnnnngttgatgggacatttnnnnnnnnnnnnnnnnnnnnnnnnnnnnnnnnnnnnnnnnnnnnncctttgcccaaacccatgtaatgtctgaaactgcnnnnnnnnnnnnnnnnnnnnnnnnnngggagctagtcatttgtatttatgggccttatgaagtcnnnnnnnnnnnnnnntgttttnnnnnnnnnnnnnnnnnnnnngaagcatcctagatctccttcaccctcattctacctgaccaacagctaggtctgtcttctagctctttctca

SEQ ID NO: 3739 - DNA, 753 bp, Macaca Fascicularis
atgaatgtgaggagagtggaaagcatttcggctcagctggaggaggccagctccacaggcggtttcctgtatgctcagaacagcaccaagcgcagcattaaagagcggctcatgaagctcttgccctgctcagctgccaaaacatcgtctcctgctattcaaaacagcgtggaagatgaactggagatggccactgtcaggcatcggcctgaggcccttgagcttctggaagcccagagcaaatttaccaagaaagagcttcagatcctttacagaggatttaagaacgaatgccccagtggtgttgttaatgaagaaaccttcaaagagatttactcgcagttctttccacagggagactctacaacatatgcacattttctgttcaatgcgtttgatacggaccacaatggagctgtgagtttcgaggatttcatcaaaggtctttccattttgctccgggggacagtacaagaaaaactcaattgggcatttaatctgtatgatataaataaagatggctacatcactaaagaggaaatgcttgatataatgaaagcaatatacgacatgatgggtaaatgtacatatcctgtcctcaaagaagatgcacccagacaacacgtcgaaacattttttcagaaaatggacaaaaataaagatggggttgttaccatagatgagttcattgaaagctgccaaaaagatgaaaacataatgcgctccatgcagctctttgaaaatgtgatttaa

SEQ ID NO: 3740 - DNA, 457 bp, Macaca Fascicularis
  misc_feature (1)...(457): n = A,T,C or G
aaaaaaaaaaaaaaagtattaaaacgaattggctgagaaacaattggcaaaataaaggaatttggcactccccacccccctctttctcttctcccttggactttgagtcaaattggcctggacttgagtccctgaaccagcaaagagaaaagaagggccccagaaatcacaggtgggcatgtcgctgctaccgtcatctcccttctcatgggaattttcagggtaaactggccatcccaaaatagcaannnnnnnnnnnnnnncctcactcccttttccatcactaaaaatcacagagcagtcagagggacccggtgagaccaaaggaggggaggacagagcatgaaaaccgaaatccatgcaaataaaaggtaattggcacaaccccacccccaaatcttatatctcaattcccatcctaaaaagcactcataccttatgcatccccgcagccaca

SEQ ID NO: 3741 - DNA, 640 bp, Macaca Fascicularis
  misc_feature (1)...(640): n = A,T,C or G
ccccgccctggcacagtccttgcgtggggtgggtgctccttctagggaaggaggagtaactcttgggtagtgggatggttaccatggaaaggggcagtagcacccaggtattgccatggcaaccgttaactgacatggcacactggagggcgtgtctcatggaaagctgcctgtgccccgccctgtgttagccagtcctccatgtggtccagtannngagccccgcctcctgcctcagatgctcctgtctgtcaccccattnnnannnaggcaccccgggtccannccagccgtcacgctcctgacanttccgagtggacgctgccacacaggctgcatgcttgcgcgtacccaaggtcctcccctctccgggataaaccaggcacgtggaggccaccccattttccgtccaccagcagtgcaggagttnnnnnnnnnnnnnnnnnnnnnnnnnnnnnnnnnnnnncagagcagcctctgctgcttttaagttcaagcttataagttttcnnnnnnnnnnnnnnnnnnngaccgttatttctctctgtcctggaggctggacgtcccaggtcccggtgtggcaggcctggttcctcccaaggcctctccttagcttgtgggcggcgtctcttccctgggt

SEQ ID NO: 3742 - DNA, 558 bp, Macaca Fascicularis
aaataactttttgtgtgatctgtacgttatggatattattttttacctcgcttacattttcaagaagacgaagaccagtcgacttagtatttgtactctaaaaatgaatggcatgaacacatgtgtcgcataagtgagaagtattttctagtgtgatggactatatctttcagaaagcacgtgactgttaaacagaatagagatcggattttgaaatatgtaggccacatcagtaggaaagttgacacttcaaattgcccacaaggactttcacctttacaataggtaaaatgtggcgtaccttatgttttcagaccaaatgctttcctaatttgaattcaaaatttttttagtcttcacagtactcttagttttaaaagcatggttatttttagtataacctaattcatttcattaattaatttcattaattttgtataagggcatatgtgagaatgcattgatatttttaaaatataaaaatacagcctctttctaataagcaagagcaattggtgattcttaaaaaatgtgttttgggaggcttccattcacaaa

SEQ ID NO: 3743 - DNA, 737 bp, Macaca Fascicularis
  misc_feature (1)...(737): n = A,T,C or G
cataattagaaaaagtgatctctgnagagagagactacacgttgcctgggcactttcagattctttagtaagtgccactttgatatttggaatgtggatatgtttataaaacaaatggatcgttattccaaatgcttatggatttataaccaagccccagaagaatatgcagctttgaaagttatttcgtggaattgaacagaaccttgatggaatatagttgcctgtgtgaggacagaaaacaaagagactgcctcaaactacatgcctatctagacattaagtgaaactgtgagggacattttgtggatgccttaaaggtgaccagtggtgggttctgatgggaatatacacacccatctggactaggccaatggaagcagagtctctttcagttcacctccatacagcagaagttgttcctgctcatgacctcattgaggaaaatgagaattgtggtgctggtgacttcctgtgtcttgggaggttcaggtgttcaaatcgttaaggcactctcaaaacacaaacctcctcttttaaatgccaattgtacatctacattaattcatctatgcaagcttgtgttttcatggtttgttttttacaccatatttctcattgggttctttaaacatcaagtttaatattgatattatgaataatttttaaaccaaagtattctctaagtctttgtgctttgttttcctggatggtttgaccaaggtaaatatcaatct

SEQ ID NO: 3744 - DNA, 759 bp, Macaca Fascicularis
  misc_feature (1)...(759): n = A,T,C or G
atcagtgannngaaatccctaagactgctgtccaatacggtagccacatgtggctaagtgagggttggaaaggcagctcgccactctgtggaatacagtgtaaacagtacaccagatgtggaagaccatctcgttagtaaattttatattgattgcatgttgaaaagataatattttggacatattacattaaattagataaattattaagttaatttctctttttaaagactttaactgtggctaactactagaaaattttgattgtatatgtggacagcacagctctaaaatggaaagaaatgccacttgggtagtagggtaactatttgtcctaattttaagtaattccaagaagatgctagtactccatgtttctgtttcttcaatctagatgagtttatgctatttctacattgttttatgtttattgtttcaagtaatttccttttaaataatccacgacctcccttgagagatttcagaattgaattcaattttgaaaagaagctgtggccgggtgcggtggctcgcgcctgtaatgccaacactttggggccgaggcaggtggatcatgaggtcaannnnnnnnnnnnnnnnnnnnnnnnnnnnnnnnnnnnnnnnnnnnnnnnnnnnnnnnnnnnnnnnnnnnnnnnnnnnnnnnnnnnnnnnnnnnnnnnnnnnnnnnnnnnnnnnnnnagagaattgcnnnnnnnnnnnnnnnnnnnnnnnnnnnnnnnnnnnnnnnnnnnnngctac

SEQ ID NO: 3745 - DNA, 4443 bp, Macaca Fascicularis
atcatcatcttgatcatgatgggactcactcctgggaaagggagtttttgaaaacgagagagagagagactcagaattttgaatagtttctttgctaaattcaccatctggagagcctttgattgattagttttggcctcaccattaagtgtcaatataatcaatgggaattactaggctagggtcattacatagataatttgcctgctgtgtaaataaaaatgaaattgtttaaattttgtgcaagagaaagtgaaaataaggagttacgatttgtttgttagagaaagtggaggccattggaatgacagtttttggaagtgtggagcagtttggctaagaataggaatgaaggatatttttttccagtttatcatagccagagtgaggaagtgttattccctctcttgcttgcatacattgccagtagtgcctactttacgtatgtaaacatcggggaagagcagtagatgtctgttacctggaggagattttttttttaaggaaaaacacaatttacacttttttgtcgtttctcttggcaggtaaaacagaaaggggctcatactcatcttatgggagagaatcaaacttacagggttgccaccagcagagtctccttggaggtgacatggatatgggcaacccaggaaccctttcgcccaccaaacctggttcccagtactatcagtattctagcaataatccccgaaggaggcctcttcacagtagtgccatggaggtacagacaaagaaagttcgaaaagttcctccaggtttgccatcttcagtctatgctccatcagcaagcactgtcgactacaatagggactcaccaggctatccttcctccaaaccagcaaccagcactttccctagctccttcttcatgcaagatggccatcacagcagtgacccttggagctcctccagtgggatgaatcagcctggctatgcaggagtgttgggcaactcttctcatattccacagtccagcagctactgtagcctgcatccacatgaacgtttgagctatccatcacactcctcagcagacatcaattccagtcttcctccgatgtccactttccatcgaagtggcacaaaccattacagcacctcttcctgtacgcctcctgccaacgggacagacagtataatggcaaatagaggaagcggggcagccggcagctcccagactggaggtgctctggggaaagcacttgcttcgatctattctccagatcacactaacaacagcttttcatcaaacccttcaactcctgttggctctcctccgtctctctcaggtagtgtatttcaaatcccatttcatcatacaacagtttataagaatgattccccccttatacttcctgattttgtaggtagaaactcacttccccgcaaatcccaaagcttgacattcctataacagacaaatacaaagggtgggagagacaaattgccagataacagtttcgtcgtttacatccaaaccttttcttaaaaattagattatctttttaaaatatgcagacatatggaaaatgtatttcttacacttttcttagctccgcagaagacactcaacagcagaataatgtattccaataaaacttctcagatgaaaaaaactcagttaatatagtcatgaatatgaatatagactatagagtcatcaaatatagactatttaaatggatcatttcctgcagaaattttaggctttccaaattccctctttaaagttcatgccattgggatgtgtggaggaaactataattttgtaaataaattgtgaagtaattgtgtggagtagaagggatgtttgacttcaaagtataacacatgcatatgacctgtggcttcagattgaataactgtaatttgtagaattatgtcagtaaatgatttcacttatcagggttctgtttaagagactcattgtctttccaatataaacgcttccagaaagccttccctggttcatgtctctgctctttggtaaggggacaggtggtttattaaaaaaacaaaacaaaacaacaacaacaacaaaatctaaatcacatctgtacctgatggaaaccttggcttactgtaatttacagtggagtcacttgcctatatatttcctgcatgcagctctcatggcccagtgtaaactcggctccttggttgaggacaggaggtttcattgccacaaaactttcagaaatgatggccatggcttagctgggatttaatgtcagcctcttccaagcctctgtggtatgggaagatcacagaatagagagagcagttggattctgaagtctgtatgtccagagagaccgcgttgaaactgagatgcaattgaggtgattttaagagggtaatgaaacgttcccctaggtggaaataggaagtagagttcagtattgttgtcctcctcgggttctgtaccagattcttacactctgaaaaatgatttcaagtgtcagtatccccctttcgagacaacaagaaatagagaaatctgagcaggtggaactccagtttccacatttcaaacaaagtagcttccatttttttcattttctaatttaggaaaagaaaatgttctgtggtatcataatgtttgagaacaactaatgtagtctgataccctgattttacagatgagaatactgagtcccagaaagggagttgagttgttgagtttataccagtagtaatagcagagcttggacaaaaatctggtgctcacagttctgccgtccatttctagattaatggtaggaaagaaaaattgggatgcacagtcagtccagaaaacatcacaaattcccttgacctgagtagcatgctctcagtgaaaggcacagaaacaaggctagagatgccactttttgagtcttggtaatgcatcatggaagaccacatgttaggaagaaagaacttttatgaagatgcaaatatggggacagattgctattttcacaccgacggctctgtccaaattctgtcaagaaaagtaattgaacaaaatattctatttttatttagcataaaaatatacatgcacacccagaaaagacaggaagagtggattttaaaagtgctaacagtgtcggggcatgagatttcagtgagatcatagctattattttttccttttttgaattatgtattttccaagttttctacagtgaatgtgtattattttaaatttaaagtgttttttattttgtaggttagacatgtaatatgtattctaacagcagtctttttttagccttcaagtttagtgaatcataaaaaaaaattactttcttcagaagaaacttatagttgttgctgtatattgactttaaatttctggcttagtggatcactgataactaatcttattctcttaaaaagtttttcaagatttatctttttctaaagattgttttaaaaacaagtagcaaagctgttttccattggtgcaagaattttggtttaacataaactggccttgcatgaaggtctaacaaaatcccatttttgtacccttaaaagtaccttgactccatagtgatagtttttcttccacaggaacccttctaaccaaaattcggaatcaattaaatattctcgtttaggagacagccagcctgggggaattgtgagtctatgtaaagtctacatattttacatttaaaatgtttttcttgtcccaaaattctaatatgggaagtttacatgcatttaccttattgtttaaatgaaaatcatcattgccgtctccaacaggactgtttgaaatattggcaagcatctttttacgtgcgtctagatctgattgaaattcccattttaatatcagcaggcacagctgtttggtctagaaatggaggacctgacaccggagcagaaggcggagcgtgagaaggagcggagaatggccaacaacgcccgagagcgcctgcgggtccgtgacatcaacgaggctttcaaagagctcggccgcatggtgcagctccacctcaagagtgacaagccccagaccaagctcctgatcctccaccaggcggtggcggtcatcctcagtctggagcagcaagtccgagaaaggaatctgaatccgaaagctgcatgtctgaaaagaagggaggaagagaaggtgtcctcagagcctcccccactctccttggccggcccacaccctggaatgggagatgcatcgaatcacatgggacagatgtaaaagggtccaagttgccacattgcttcattaaaacaagagaccacttccttaacagctgtattatcttaaacccacataaacacttctccttaacccccttttttgtaatataagacaagtctgagtagttatgaatcgcagacgcaagaggtttcagcattcccaattatcaaaaaaaaaaaaaaaaaaaaaaaaaaaaaaaaaaa

SEQ ID NO: 3746 - DNA, 735 bp, Macaca Fascicularis
  misc_feature (1)...(735): n = A,T,C or G
acatttgcctgggtggaggctgagggtggtnntaggactgcaggtgcccttagctgaagggagtggggagaggtgtggactgtgcatcctgtgggtgattggaggttcattgagaattgagtctttggaaacactaagaaaatcaaagttttagaagttatttatggcctgggaaacaattcgcatttgtccccaaatacgcttagctgtgtgccgcttagaacgatgcgaaaccatccctctgtgtaagcccatgctgtgactccaagcctagcgccctccctgcgaagcatcagacgccgcccagccctggggggaggcccacggctgctggaccaacgcgggttctggggtgcacagcccaaggttaacgcggaagcctgccccgctgagcccaggagccaggaggcctgcgggctgacccagaatccgatcatgcacctgtcctcatgccagcggctttggctggggttggtctgaggcctgcacggggcagtttcttgttaaagatccaagggactcagtcctggggcgtcgccgcctgcagcgtcttccaagccctgcgtccagcgagcgtcacagcacaacctgcaaacggagctgggctgtagccttggggctggcatggactttcatttccgagattcggtttttaagaagatgcatgccaaatgtggtgttctttttttttttttnnnnatgatttgtaatatacattttatgactggaaacttt

SEQ ID NO: 3747 - DNA, 777 bp, Macaca Fascicularis
  misc_feature (1)...(777): n = A,T,C or G
atgaaatgcagtcattgaaatgagaaaggccaggatcctttnnngcaccttaccctgtnntcaagaggaannnnnnnnnnnnnnagctatcctccttgatgtcaattttgnnnnnnnnnnnnnnnnaactgagaagaataaaattttagacatatttagagaatcaattaagctatatgtctaaaattcatagggcaacttctgagaagaaacactgtctttttcttttttaatggaaagtnnnnnnnnnnnnnagtcacgttgtgtgcggtgacgcagagtaactgaggtaatnnnnnnnnnnnnnnnnnnnnnnnnnnnnnnnnnnnnnnnnnnnnnnnnnnnnnnnnnnnntctctccgtcccttcccacaattctgctgttgctgcaacttgagttaattgtgacaaacgcatctttgtgttatattttgtttgcttcataatttccagaactatatataaatatatttttaaaatagcaaatattgtagttagcaagtgatgatcactccaaccttatccttnnnnnnnnnnnnnnngggataggattaagagtgtctttggaagagaaaagtacaaacaaccctgtggtttagaatgatgctgaggccttaggctgtgggcctagaacannnnnnnnnnnnnnnnnnnnnnnnnnatactttgaatcaagcatgcattcctttttctcattgtgcaagtatctnnnnnnnnnnnnnnnnnnnnntgagtttttgtccttttaaattttattgtattttgctctccccaaca

SEQ ID NO: 3748 - DNA, 734 bp, Macaca Fascicularis
  misc_feature (1)...(734): n = A,T,C or G
tccccatagccgggaggcccgtcagnnnnnnnnnnnnnnnnnnnnnnnnnnnnnnnnnnnctctgtgcaggagatagttgacnnngntaaannnnnnnnnnnnnnnnnnnnnctcagccgggaggaccannnnnnnnnnnnnaagacctctgcgatcgaggnnnnnnnnnnnnnnnnnnnnnnnnnnnnnnnnnnnnngagtgagagtatcaccttcctcaaggatttcagttataaccgggaagactttgccaaagcagggctgcaagtggaattcatcaaccccatcttcgagttctccagggccatgaatgagctgcaacttaatgatgctgagtttgctttgcnnnnnnnnnnnnnnnnnnnnnnnnnnnnnnnnnnnnnnnnnnnnnnnnngctccaggtagagnnnnnnnnnnnnnnnnnnnnnnnnnnnnnnnnnnnnnnnnnnnnnnnnnnncatnnnnnnnnnnnnnnnnnnnnnnnnnnnnnnnnnnnnnnnnnggtgagcctccggaccctgagcagcgtccactcagannnnnnnnnnnnnnnnnntctgcaggacaaaaagctcccaccgctgctctctgnnnnnnnnnnnnnnnnnnnnnnnnnnnnntttcctcttattttgttttctgggccggatggctgaggcctggtggctgcctcctagaagtggaacagactgagaagggcaaacattcctaggagctgggcaaggagatcac

SEQ ID NO: 3749 - DNA, 706 bp, Macaca Fascicularis
  misc_feature (1)...(706): n = A,T,C or G
gggggtgcggaggactttcatcgtgggtctatggatgtctgtggagctgggtgtgggtgnnnnnnnnnnnnnnnnnnnnnnnnnnnnnnnnngaggcagtgcggtttcatggggctcgagacttggnnnnnnnnnnnnnnnnnnnnnnnnnnnnnnnnnnnnctcaggaaagttcattcacctctctgtgcccttgtttcttcatctgtcaaaggcaaacagtcgctcaagccaccaaggcacacaaactcacatcaggagccgtacatgccctgtgtgtctcggaccagggcacagagggcacaaggaatggggtgaggatacctgggggtcctgagagggatgggggatgctgaggggcactaagaacctcccagccgaacacctggnnnnnnnnnnnnnnncaggggtgctgagtatgagattacactgagacccaacccctcnnnnnnnnnnnnngatactggggatgttcaaagagtcagggagagggagccacaggacccctcctgcaatcggggctctgagggtcttcagatagggcatttgggacctagagtcacccaggtaccaggaaaagggagtctgtttcccttctctcattaattaattcnnnnnnnnnnnnnnnnaaaacccctactgtgtgccagatggtcttagtctgttccagctgccataacaaaatactggggacaggagggcttat

SEQ ID NO: 3750 - DNA, 715 bp, Macaca Fascicularis
  misc_feature (1)...(715): n = A,T,C or G
ccacaggactgtgggaagggcagaatcaatcnctaagggaaaggaaacctcaccctgagggcatcacatgcactcacgttcagtgtacacaggtcaagtcccttgctctgggctctggttgggagagtggtttcattccaannnnnnnnnnnnnnnnnnnnnnnntctttgtttccttcactccattcaaaacgtcaaaatacaaaatttggcacagcatgccaacggaaggctgtgcccannnnnnnnnnnnnnnnnnnnnnnnnnnnnnnnnnnnnnnnnnnnnnnnnnnnnnnnnnnnaaatttaaatagaaatttnnnnnnnnnnnaatggtcagatataccaagaaagaaaaatatttctgttcctcaagaaaacttgctaccctctgtgaggggaattttgctaaacttgacatctttataacatgagccagattgaaagggagtgattttcattcatcttaggtgatgttatttcttatttgtttctgaaggtgcgatagctctgttttaggttttgcttgtgcccgttaattactgaaacaccttgtttttcattaaaggcttggaaagtcaattctcaaaaattcaaaagtgtaaattaacagagaacaaaaggaaatnnnnnnnnnnnnnnnnnnnnnnnagggagatgacaagatgaaccttgtgtccattcaagttatatgctgacctatgagagataagagt

SEQ ID NO: 3751 - DNA, 679 bp, Macaca Fascicularis
  misc_feature (1)...(679): n = A,T,C or G
gttttttttttttttaaagtanngtaatnctactttgtttttatgtatgtgatatgatatctgtttctgttgagatttgggagttattgaaatctctgtaatgtgtatggtggaaaatttcttgtgaccttaaaattttaccagttatttatagaaagataaaatgggaaatgtttcataggctttttactagcaattgtcagtgaacacttgaactccattattcatgaaaataacacgttaggattagaatacttctattcaaaagtgaaataatataaagtgtttagttttttgtttttactatgaagatagaattggggagtaaacttcagtttttgtttagagtggatctgaatatttaaaatcctataatcatttttgtgaatcttccttctttgagtatggaattgtaaaagacaaactatatatcctatagtagtatcatcgtcagtatcaaaggtcccccttttttttttaactggaaaaagtattccacaaacattataaaaatactattcaaacagtaccaaagagtagattagcaaaagtaaggtttttttccctagcctgtctcatttttacatcattacacagactatttggaatgtcttagatgtccttgtattgtaattttctgtgtagatagaaataaatgtagctttcttattttacacaa

SEQ ID NO: 3752 - DNA, 715 bp, Macaca Fascicularis
  misc_feature (1)...(715): n = A,T,C or G
cggcagnnnnnnnnnnnnnnngatagagacagcctnnnnnnnnnnnnnnnnnnnnnnnnnnnnnnnnnnnnnnnnnnnnnnnnnnnnnnnnnnnnnnnnnnnnnnnnnnnnnnnnnnnnnnnnnnnnnnnnnnnnnnnnnnnnnnnnnnnnnnnnnnnnnnnnnnnnnnnnnnnnnnnnnnnnnnnnnnnnnnnnnnnnnnnnnnnnnnnnnnnnnnnnnnnnnncaaaaaaaaaaaannnnnnnnnnnnnnnngcccagctccgagacatcagcctgagtgcgcttgagctgctccaaacctggccattccccattcctctagcaccgccacccgcatggccccggaactcccgctgcgcgccgacctcccacaccagccgtgcccaccgcaggtgggactcaggttcgccctctgggccaggtccttcacgaggagggagcttccctccgcctgatgtttgtgagaacgtggccgcccttttcctgccctctgccccatgtgggtgaggggcgtcgtggcctggccggcgccccgtccccttctgcatgtctgaggccaccggcaaccgccgcccaactccagattcgcccccgcccagttttgaaagccccttatttataacttttctactttgtgcaggtcgcggcgcttcccgccgcctgttcggctgcacggggcggggggctgtttttaacgtgcccgtttgtactga

SEQ ID NO: 3753 - DNA, 293 bp, Macaca Fascicularis
tccaaaatacctgtttggctgattcattccataactggagaaagaagctccattgaccgaagccacagggcagcacggaagtttaaattttctgtaaaattaaaatgtcaaggataaagctggctgcttccggtggggggaaggggagtggggagtgggtggtgaaacttttccagatgaacggaccataaatgtgttactggctctgtgcctgtagctcaatttattatgaccctgtatgctcctgatttaaagagatctataaggtgtttacttcccacttcccagagtcc

SEQ ID NO: 3754 - DNA, 723 bp, Macaca Fascicularis
  misc_feature (1)...(723): n = A,T,C or G
atgcagtactgtactacagctgttgttactgattcactcaaactttnnngcatgcccctnnnnnnnnnnnnnnnnttacagcataagttgagactaaagagaatggagaactatcgtggcgcatcctggcaaatccctccagaggacggagctcaggtggacagggattgcctagatgggatcctacttgggatatcacagannnnnnnnnnnnnnnntccttcatctgaggcgtgggagagcagactggatggatgagaattgttttaaaacaattgtgaacagaaactgannnnnnnnnnnnnnnacatctgcacctgcccttttatcataccacaaaagtattttttgagtactgtactgactttctgctagtctctattctgggactgagttcacagataactacattggtgtctatccttgggaaacttttgtttttgtggaagtaagcaagttatctactagattatttcctctaataaaatctttaaaaatagtctactggaatttctttcacttaatgttccctgtnnnnnnnnnnnnnnnnnattttaggtatacttgtcattgttcctttaagtgaagtagcattttgatagttctgagagagtaaatgttttgatctactctagaataattatgttgtgacaatttccataactgttgtgcttcattctatatttcaaggcaaatattgtaagcttgtcaatttcatcttca

SEQ ID NO: 3755 - DNA, 743 bp, Macaca Fascicularis
  misc_feature (1)...(743): n = A,T,C or G
gccccaacacannnntgcatagganannncggcannnnnnnnnnnnnnncctacattacctggatttaattgctcagagacttttttttttttttccaaactcctcatatctcagtgtgctcctaggagctgannnnnnnnnnnnnnnnnnnnnnnnnnnnnnnnnnnnnnnnnnnnncacatcatcttgcccaacatagtaaagaaaatcatctgcgagattcattctgaaagcacttcacaagtgttctgtttgaaaatacaattgacccttggacaacacaagtttgnnnnnnnnnnnnnnnnnnnnnnnnnnnnnnnnnnnnnnnnnatnnnnnnnnnnnnnttggaggtnnnnnnnnnnnnnnnaaaagacatgaaccatgtagcatggaaatatcaaaaaatttaagaagataaaccacaagtgcataaaatatatgtaggtactagtctattttatcgtttactgccataagatatgcacaaatctgttataaaaagttaaaatttatcaaaacttatgcacacacttaaagcccatacatgacannnnnnnnnnnnnnnnnnnnnnnaaacaaatgtaagatacactgttaactcataactactaaaattaactgcaaaacatactttgctactgtaataatttcatagccacctcctgttgctgttgtggtgagctcaagtgttgggagtatctgcttaaaagcgctgtgtgatgctaatcatctctgactgag

SEQ ID NO: 3756 - DNA, 584 bp, Macaca Fascicularis
  misc_feature (1)...(584): n = A,T,C or G
tgtgttggctacgctggtctcgaactcctgacctcaggtgatccgcccgcctcggcctcccagagtgctgggattacaggcatgagccactgcgcctggcctggggtcattttcactaaaggatttacaaaaatttaggtctctgaaattacctaggaaacttgagagaagtaaatagggtagaggtcttatagctgtgctggtggagacttcggaaatgaactgaagatgtgacaaaagccattgtatctaccttactgaagtgaaagactaaaggtagctcccattggtgagatatcagacatgacaaattgatacttttgaaaacttgtttctgctttgctaatgaagtggtagagatttgtaaaattacaaaacaattaagaggatagatttttaccactttttactttggaaggagacaggttatttacagcatcttttctgcttttcctatgaattcagtatgaggacagaatctagcagttccacactattttaagcaaagctcacatggcagnatggaagccgtnnnactcattaaatatccaccctaatatttgaactnnnnctcatttccagca

SEQ ID NO: 3757 - DNA, 767 bp, Macaca Fascicularis
  misc_feature (1)...(767): n = A,T,C or G
gagactgtagatggagctnncggagccagcccnnnggggannnacagcttcnnnnngcgccggcgtcgcgggcgcccggtnnnnnnnnnnnnnnnnnnncagccttgcctgccctagacgtcttgagagctgnnnnnnnnnnnnnnnnnnnnnnnnnnnnnnnnnnnnnnnnnnnnnnnnnccccctccggttcctattgctggtcctgattccatgtatctgtgctctcgttctcttgctggtgatcctgctttcctatgttggaacattacnnnnnnnnnnnnnnnnnnnnnnnnnnnnnnnnnnnnnnnnnnnnnnnnnnnnnnnnnnnnnnnnnnnnnnnnnnnnnnnnnnnnnnnttnnnnnnnnnnnnnnnnnnnnnnnnnnnnnnnnnnnnnnccagcacattccagcctggactacggatgcttctctcccaggggaccaaagtcacaggaatacaagagccancatgaacatcacccacagccagtgtcagnngctgccctaccactccacaccaacacctctcctctcagttgtcagaaacatggaaatggagaagttcctcaagtttttcacgtatctccatcgcctcagttgctatcaacatatcatgctgtttggctgtagtctcgcctttcctgagtgcatcattgatggcgatgacaggtatttgggaacccaaattattcagtgataagagttggttatagcaaaagtatcctaggagaaaaaaaaattatccaaatgactccctttcatt

SEQ ID NO: 3758 - DNA, 254 bp, Macaca Fascicularis
cttatgagtaggctttgataggggattgtgcggtgaattgtggtgggaaaatatcctagtatgttggagaatttgaatacttgtgatgggttttttatttttagtttgtttgttatgagggtgaggtctagggctattaggaagcctagggcagttgcgcacagggctgagagttttaggtagaagggtattattggtagggggggtgaggttggagggatgttgctggttatcaaaaatcttggtattgtgcc

SEQ ID NO: 3759 - DNA, 726 bp, Macaca Fascicularis
gtaggtgatggagctgagggtctacattctggtgtcttgcatgtcaaatcagctctcgtggaaggagatggcgtatatttgagggagatggtgaattttttaggtttagttttgtgttacacttaatagcttaatgtgagggtagccagaaaaatttctgaatctgcatgaagtaaaatttttttctgttctctttagaaatcagttgaaattataaaccttttctgcatcataatgacaccatacagcggagaatttcaatgcattcatcctgtgaggaaggctctttgggtgaaagttacgatgtttttcttgaagcagcatgacagtatttggttttggactaaaatgctgttttccttaagatgaaatatttcttaattgcttttggctcagtctattcagagtagaaggatggatattaaggcaggtgtacacagggcagctgtcagagaatgaagcagaacaagccaaaaggagtaaacttatgtgaagaaaatgggggacgcaaggaaatggtggcattaaaacaaagtaatcatgatgggaaataattaagtactggttagacttttttttttcttatgattgtaagaatttttggactcgtatctgcttatttaagcgattattttataaacatagggcaagtgaccttgaagtctttttcttaagtgaaggttttgtgagaatcataggaaataatgtctatgaaagcatttccta

SEQ ID NO: 3760 - DNA, 407 bp, Macaca Fascicularis
  misc_feature (1)...(407): n = A,T,C or G
cggggcccgtgagcatacccttgacgggcttgaaggccgagaagccctgcgcaaccttgaactcgcgcaccgtcatgtcgtacgggcgctcgaggtcggcgtaaatgaccggcgggcgcacgcagcgcgagccgtacgactgcacccagccgttctgcgagaaggcaaagccgttgagcttctcggcgaagaactcgaccatgtccgtgcgctcgggctcaccgtgcacgaggatgtcgaggccaagcgcgtcctggacgccaatgttgtacgcgatctgcgcgtcaatctcagcttcgtacgccgtctgcgtgatcttgccgagcttgagctggccctcgtgcnnnnnnnnnnnnnnnnnnnnnnnnnnnnnnnnnnnnnnnnnnnnnnnnnnnnnnnnnnnnnnn

SEQ ID NO: 3761 - DNA, 775 bp, Macaca Fascicularis
  misc_feature (1)...(775): n = A,T,C or G
cagctagagaggctgccaaatctacnnnnnngnnnnnnnnnnnnnnnnnnnnnnnnagaccggaggcgtcgacgtgtggactnnnnnnnnnnnnnnnnnnnnnnnnnnnnnnnnnnctcctcagccctttggggggggtgggagtgtgtgnnnnnnnnnnnnnnnnnnnnnnnnnnnnnnnnnnnnnggctgccagggcaaggtgctctaggaggtcttcctgnnnnnnnnnnnnnnnnnnnnnnnnnnnnnnnnnnnnnnnnctagccctcccttttgtctgtttatctaattctcaggtatgaggctttagtcacttctctttacagatatcaaagctcannnnnnnnnnnnnnnnnnnnnnnnnnnnnnnnnnnnnnnnnnnnnnnnnnnnnnnnnnnnnnnnnnnnnnnnnnnnnnnnnnnnnnnnnnnnnnnnnnnnnnnnnnnnnnnnnnnnnnnnnnnnnnnnnnnnnnnnnnnnnnnnnnnnnnnnnnnnnnnnnnnnnagtcagcactcaccnnnnnnnnnnnnnnnnnaggaattccccagaagggctggacccagctcctttctgggcttgggtagtcaaatgtctgagctaccccaggnnnnnnnnnnnnnnnnngtggcgcctgcctgtgctggcccatggaacggagacagcattgggctnnnnnnnnnnnngaggagggataagggctgatttggacccnnnnnnnnnnnnnnnnnncagcacttgtgtctgcagattatttaagtggcttctgatctga

SEQ ID NO: 3762 - DNA, 652 bp, Macaca Fascicularis
  misc_feature (1)...(652): n = A,T,C or G
agcgacatccagaaacnntgaggatggcctggcttgtgtgaggaaacacgcggtgtgacgttgccttccnnnnnnnnnnnnnnnnnnnncgcggtgtgacgttgccttccctggcttgccccaccccgaccctagactggttctcgggatggaactgtgagcaaagcagcacccagcctcacagcacagagggtcgcagcccatcatgcgtgctgggtgattttacaaggaacactggccgaggcatgaaggaagatgctaggagctggccggactcagtggggtggcgaggctggagctgctgcccctcgccagggcttacttccaggcccacctaggttatgggcaggattttgcaggcttgacgtgcggcggtggcaggtagcggcccctcaccaggttggggacacgggtgcacgtgagtgggggnnnnnnnnnnnnnnnngctgtgtggacagaggggccgccccgtgggagaacatgcacgtgggcttggagaggtgggcannnnnnnnnnnnnnnnnnnnnnnnagagaaggcgagagaggcaggaggaagacaccagcacggccaagggagacgctaggtgcgtccctgtcttggggccttgggggatgtggtggctgcactccagcctgggtgacagagcaag

SEQ ID NO: 3763 - DNA, 1067 bp, Macaca Fascicularis
  misc_feature (1)...(1067): n = A,T,C or G
ttgcctttggttcatgtgatacctgcttttctcgggcctgctagaggcatccaacgccctggtttgtaaatagcaacctaaaggcgtattttggcactggtctgnnnnnnnnnnnnnnnnnnnnnnnnntttcccccttcacagatggtggtgggcttcgctctacaaagaggactctgatgttactcttgagagcttatgagccagagagctgaaaacggcaggcttgtgagttacaaggaaaatggatttggtaattaaaattaaaagagaagaaacacaccctcaaacttcaacttctttaaaagaaaaaannnnnnnnnnnnnnnnnnnnnnnnnnnnnnnnnnnnnnnnnnnnnnnnnnnnnnnnnnnnnnnnnnnnnnnnncacatgtacttctgtgcttagaacatttttacagtcctaagcgctggagacgttgctgcatgtcggctgggtttttttttcatacacccgagcacggaaaaactaacgcaaaattgtattttcttacctagtggaaatctgaaatgactgcaaattcctagtgaatgtacaggtttgctttcgtgtccctcttctggttgctttagaagtgacgtgtaatttctgaacccatgtttcatctgtataaaagaacatctgcaccagtttttctcctgcccctcagaagagccaaactttgagttttatgtctgtttgtcattgataaatttcaataaatctttttatacaatttttttggggatggcttctttgagtccnnnnnnnnnnnnnnnttgtcaagatgcattccagatgaactgctaggtgagggggaagcttcatttttgttacctgacagaatagcttttctgagatatatatatataatgtgatactaagtttggatatttggtcttaaagcaagactcagtggtgtatcttcattaaaannnnnnnnnnnnnnnnttacagagttactaaaaaaacaagtacccaaaaatcaagttgggctaaccttggaaccttgttttgaatatctttcattgttttgtttgtcgtatgtaaaaagaatgtatggtgaa

SEQ ID NO: 3764 - DNA, 745 bp, Macaca Fascicularis
  misc_feature (1)...(745): n = A,T,C or G
tatcnnnnnnnnnnnnnnnnnnnnnnnnnnnnnnnnnnnnnnnnnnnnnnnnnnnnnnnnnnnnnnnnnnnnnnnnnnnnnnnnnnnnnnnngcctgagtgatagaatgagactgcgtctcaaaacaaaacaaaaactcatacattgcccaaagtggcctaaagatttcccaaatcaacttctaaatttattacagatacactgagatatagagcattgcaatgacttaagtgagtttcttataaggaaatgagtgtgtgtttgggtaatgaatggcattggaatctgtttgctgcttctgtttcatatcctcaaagcaatcacaccnnnnnnnnnnnnnnnnnnnnnnnnnnngaccttcaggttggaactgccataaatattgataacgcccaggccagtgcctcagctggaagtccaatgtttcttcataatcatgatgaagccacttcatcattttctaaatgagacagttacctcatgagtatctcataacaattttcctcatatatagatggactcaattctaaacattctaatattatttctcgatttagcttgtatgtttccatgttaatcactgttgaggttgtgagaataattacatttattctattgtaatggagatcatactaagtactgggcagtgaaaatagtttctaggaggcatgagaaattctttgnnnnnnnnnnnnnnngatacttgttttaatggatcaacatggaaacgtgtagcaatacaaga

SEQ ID NO: 3765 - DNA, 715 bp, Macaca Fascicularis
  misc_feature (1)...(715): n = A,T,C or G
agtgcccacttggatcttggtgctctccnngagcctggctggtgccgtcttcctcctcgctgggctggtggctgttgtcctggtggtcagaagagttaaactcaaaaatttacagaagaaaagagatcgnnnnnnnnnntgggcccagattaacttcaacagcccagacatgtccttcgataactccctgtttaccgtctcnnnnnaaaacgatgccagaagaagaccggccaccttggatgatcactcaggcaccactgccacccccagcaactccaggacccggaagagacccacttctacgtcctcctcgcctgagatcccggaattcagcactttccgggcctgccagtgaggctgaggtctgggggccccctcctgtctccaggcattcggggacctgaggtccttccagctacttctaggggggctctgtcggctgctttctcagggaattgcacagaggaaaggannnnnnnnnnnnnnncagaggagtgggaaagggaacacaggcatgggcctggcactggacagacaacaggaagttcccctcttgaccttcagctcctcaggaccaccagagaagatgtcaggaccccttcttgtcccccagctgggccataagaggtctcaggtctctgcacacccgtggaattcctcccttccctnnnnnnnnnnnnnnnnnnnnntgcccttgggtgtgttgtgtgtctgc

SEQ ID NO: 3766 - DNA, 1725 bp, Macaca Fascicularis
  misc_feature (1)...(1725): n = A,T,C or G
cagactgagttttttaattcaattactgagctccctgatacattaggcttttaaatttgtttaaaaattattttttcaggggcctccctgttctattaatgttaagacttctgattcttgacagtgctaaatttttctccttcccaaagccctagaaagcactgattgccactcaggctacactagtgccatataatgccttacagcttggggtaagttttattagaagggcatttattggaagcatgaggatatatggaagattattttttccttcttctccatggcctccctaaacagttatccatgaatgtgaattttagtacagttcaagttccaatgactgcataaaaaatctctgttttatgtaaacttcacagatctcaccaagctgagacaagaattttcaaaagaaaaagcaatgctttggctaattctggggcaatgttctctccctgttggcctctagactggcctagtttaaggaacaaattagagaataagaattttcaatcttagggaacattgccttacataggacaattttaaatgttagaacttcatctccatagaagcaactaagaattttgagaatccatcatgtgccaggtattatttttttgcatattatcttactcattaaaataatacttccagaaaagagggtaggtccataaattcaagtaatttgcccatgttcatgcagctggcctgagacaaagctgaaatccaaattcaaattctctgcctctaagaccagcacttcctccttcttccccggtactgattgcttggtttctctgattattttgatgataatgatgatttatttgtttttttggagacagggtcttgctctgtcacccaggctgaagtgcagtggcacaatcttggcttactgcaacctccacctcctgggctcaagcaatccttacacctcagcctcacaggtagctgggaccacaagcgcatgccaccacacatggctaatttttatatttttggtagagatgggattttaccatgttgcccaggctggtgtcaaactcctgagctcaagtgatccacccactttggccttccaaagtgctggaattacaggcatcagccactgcacctggcctgattattttcatttgaaagatgccttaactatataagtcttgctatgttattatctaattcctttagtgttataatagcttttgatctcttcagggcttcggtttcctcatctatgaaatggggccctccctgtctgtgttattttcctatccaaatctgtattaattgataattccaatctgggtgactcctagaaaaagattccacattcaaggaagctctatgaccaaaggtgattaataaagagtactgggcccggcatgnnnnnnnnnnnnnnnnnnnnnnnnnnnnnnnnnnnnnnnnnnnnnnnnnnnnnnnnnnnnnnnnnnnnnnnnnnnnnnnnnnnnnnnnnnnnnnnnnnnnnnnnnnnnnnnnnnnnnnnnnnnnnnnnnnnnnnnnnnnnnnnnnnnnnnnnnnnnnnnnnnnnnnnnnnnnnnnnnnnnnnnnnnnnnnnnnnnnnnnnnnnnnnnnnnnnnnnnnnnnnnnnnnnnnnnnnnnnnnnnnnnnnnnnnnnnnnnnnnnnnnnnnnnnnnnnnnnnnnnnnnnnnnnnnnnnnngaatactgtatacatttccctactctgaaaaaaaaaaaaaaaa

SEQ ID NO: 3767 - DNA, 1668 bp, Macaca Fascicularis
  misc_feature (1)...(1668): n = A,T,C or G
nnnnnnnnnnnnnnnnnnnnnnnnnnnnnnnnnnnnnnnnnnnnnnnnnnnnnnnnnnnnnnnnnnnnnnnnnnnnnnnnnnnnnnnnnnnnnnnnnnnnnnnnnnnnnnnnnnnnnnnnnnnnnnnnnnnnnnnnnnnnnnnnnnnnnnnnnnnnnnnnnnnnnnnnnnnnnnnnnnnnnnnnnnnnnnnnnnnnnnnnnnnnnnnnnnnnnnnnnnnnnnnnnnnnnnnnnnnnnnnnnnnnnnnnnnnnnnnnnnnnnnnnnnnnnnnnnnnnnnnnnnnnnnnnnnnnnnnnnnnnnnnnnnnnnnnnnnnnnnnnnnnnnnnnnnnnnnnnnnnnnnnnnnnnnnnnnnnnnnnnnnnnnnnnnnnnnnnnnnnnnnnnnnnnnnnnnnnnnnnnnnnnnnnnnnnnnnnnnnnnnnnnnnnnnnnnnnnnnnnnnnnnnnnnnnnnnnnnnnnnnnnnnnnnnnnnnnnnnnnnnnnnnnnnnnnnnnnnnnnnnnnnnnnnnnnnnnnnnnnnnnnnnnnnnnnnnnnnnnnnnnnnnnnnnnnnnnnnnnnnnnnnnnnnnnnnnnnnncagttggaacccacgcaggaagaagtcatcgtgatgtcggacgatttcttatggtttgaaggcatagctttccctaatatgggtttcagatccgaaaccttaagaaaagtacgtgatgagttcgtgataaaggatgaagatgtaataatattgacttaccccaaatcaggaacaaactggttgattgagattctctgcctgattcactccaacggggatcccaagtggatccaatctgtgcccatctgggagagatcaccctgggtagagactgagatggggtataaattactcagtgaagaggagggcccacgtctcttctcctcccacctccccatccagttattccccaagtcattcttcagttccaaggccaaggtgatttatctcatgagaaatcccagagatgttttcgtgtctggttattttttctggaatagtgtgaagttcgttaagaaaccaaagtcatggcaacaatattttgaatggttctgtcaaggaaatgtgatctatgggtcatggtttgaccacattcacggctggatgcctatgagagagaagaaaaactttctgttattgagttacgaggagctgaaacaggacacaagaagaactgtagagaagatctgtcagttcctgggaaagacgttagaacccgaagaactgaacttaattctcaagaacagctcctttcagagcatgaaagaaaacaagatgtccaatttttccctcctgagtgttgattttgtagaggagaaagcacaacttctgagaaaaggcatatctggggactggaaaaatcacctcacagtggcccaggctgaagcgtttgataaactgttccaagagaagatgacagatcttcctcgagagctgttcccctgggaatagcgtccaaaacactctggatcttatatggagaatgacgttggttctcctgtccttgtacatgtaccaactgggtcattgcataagcttattactaggctatagcgtccaaaacactctggatcttatatggagaatgacgttggttctcctgtccttgtacatgtaccaactgggtcattgcataagcttattactaggct

SEQ ID NO: 3768 - DNA, 587 bp, Macaca Fascicularis
  misc_feature (1)...(587): n = A,T,C or G
aaaaannnnnnnnnnnnnnnnnnnnnnnnnnnnnnnnnnnnnnnnnnnnnnnnnnnnnnnnnnnnnnnnnnnnnnngtggcnnnctggggctgtagtttgtcaacccttgctctaacccttgactgaaagctactttattaagcactgagnnnnnnnnnnnnctcaattttgtgctcccgagggcgccaaaacacagtgctttggcatagagtaggcactcaacaaatgtgtcaacagatggagagccagcnnnnnnnnnnnnnnnnnnnctttgaggctctggtttctcnnnnnnnnnnnnnnnnnnnnnnnnnnnnnnnnnncgtcacccccgcaattctatgccccacccacgtgaccttaatgccagttgctggtctgttgctcttccgggtcaccctcgcaattctatgctccacccacccacgtgaccttaatgccagttgctggtctgttgctcttcccaaaggcggnnnnnnnnnnnnnnnnnnnnnnnnnnnnnnnttcttcaagggcccttaagggtgaaaaagtaacttgcaagaggttgagatccttctcagctagaagaacttattccaccttc

SEQ ID NO: 3769 - DNA, 2042 bp, Macaca Fascicularis
atgttggtttcttctcatctagagaggctactagtttttgtttttgaatttattttcattgagattggttttcccccctgcaccccccgccccgtttcgacctcttctaagggtgtaactatagaatcttctcactcagatatggcaacaagcagccttcactttgcatcatgtgatacacaacaggcacccagacaacgcggagcatctactgtgaacagttcatcatcaaccaaggtggatctcaagagtggcctcgaagaatgtgctgtggcattgaacttatttctaagcaacaaatttacagatgccttagaattgcttcgcccctgggctaaggagagtatgtaccatgctctgggctacagtaccattgtggtgttgcaggctgtcctgaccttcgagcaacaggacatccaaaatggcatttctgccatgaaggacgctttacaaacctgccaaaaatacaggaaaaaatacacagttgtagaatctttctcaagtcttctttctagaggatccctggagcaactgagtgaagaggaaatgcatgctgaaatctgttatgccgagtgtctcctacagaaagctgcactcacgtttgtgcaggatgaaaatatgatcaacttcatcaaaggtggactcaaaattagaacaagttaccaaatatataaagaatgtctttctattctgcatgaaattcagaagaacaaacttcagcaggaattcttctatgagtttgaagggggtgtcaagcttggcactggggcctttaatttgatgctgtcccttttaccagcaaggattatcagactactggaatttattggattttctggaaatagggagttgggcctcctgcagttacgcgaaggtgcctcaggaaaaagcatgaggtctgcactgtgctgcttaaccatcttagcttttcatacttacatctccctaatacttggtacaggagaagtgaatgttgccgaagcagagcgtctcctggcacccttcctccagcagtttccaaatggctcactcgtgttgttttatcatgcccgaatagagttgctgaaagggaatcttgaagaggcacaagaagtatttcgaaaatgtgtttcagttcaagaagaatggaaacagtttcaccatctctgctactgggagctaatgtggattaatgttttccaacaaaactggatgcaggcatattactattcagatctgctttgcaaagagagtaaatggtccaaggcaacttatgtgttcttgaaagcggcaattttgagtatgcttccagaggaggatgtagtagcaactaatgagaatgtggtaactttattcagacaggtggacagcttgaagcagagaattgccgggaaatctctccctactgagaagtttgctgtgaggaaggctcggcgttactccgcctccttgcctgcacctgtgaagctcatcttacctgccctggaaatgatgtatgtctggaatggtttttcaatagtgagcaaaagaaaagacctttctgaaaatctgttggtaactgttgaaaaagctgaggcagctttacaaagtcaaaattttaacagcttctctgtggatgacgagtgcttagtgaagttacttaaaggatgttgcctcaagaacttacagcggcccttgcaagctgaactatgttacaatcatgttgtggaaagtgaaaagctactgaagtatgaccactacctagtgccgttcactttgtttgaattggcatctttgtataaaagccagggggaaattgacaaggccataaagttcctagaaactgcaaggaacaactacaaagattactccttggagtccagactacacttcagaattcaggcagctcttcacctctggagaaaaccttcctcagattgatcagaacttgaaggatggaattttccctcaattagcatcggcaatctgctatagattcaaccttatgttaaagtggaaaagtgatattgtgaataagagacaaaaaactaaaaaaaaaaaaaaaaaaaaaaaaaaaaaaaaaa

SEQ ID NO: 3770 - DNA, 695 bp, Macaca Fascicularis
  misc_feature (1)...(695): n = A,T,C or G
agaagcagccctagctnnngagccagataaaggnctccccggccccgaaggcttcctgcaggagcagtctgcaatttagtgcctacaggccagcagctagccatgaaggcccctgctgccattcctgggnnnnnnnnnnnnnnnttccactttnnnnnnnnnnnnnnnnnnnnnnnnnnggctcaagagttcacctgtgtgtgcatagtaaagcaggagatnnnnnnnnnnnnnnnnnnnnnnnnnnnnnncaaactgtggctggtgagtggcagtctaatactacagttaggggannnnnnnnnnnnnnnnnncacagaggagcactgannnnnnnnnnnnnnnnnnnnnnnnntagcnnnnnnnnnnnnnnnnnnnnnnnnnnnnnnnnnnnnnnnnnnnnnnnnnnnnncacgttaaaattagaatttctggcctctctcgatcagccagaatgtgtggcaattctgatctgcattttcagaagaggacaatcaattgaaactaagtaggggttgcttcttttggcaagacttgtactctcatctggcctgtttcatttatttgtattatctgcctggtccctgaggcgtctgagtctctcctcccccttacaggtttgggtttgaaactgaggaactataaagttgatgatttcttttttatcattatgcctgcaattttacctagctacc

SEQ ID NO: 3771 - DNA, 1798 bp, Macaca Fascicularis
aacagtgatgatgtcatagaagaccaactcatccactggcgacccacatccgatcggtaccggagccggaggtggggagtcggctcgtggatccagctgcagagcgacttggggaattggaatggtgctttggatcttatggaggccatttggattctcaagaagacttctgaaactggaacgccatagcataactgaatcaaaatcgttgattccactagcttggacatccctgacacagacgctttcggaatcacctggtattttcttactgggtcaaagaaaaagattctctaccatgccagaaatagaaacacatgagggagactctgaattgttttcaccaccctctgatgtccgaggcatgacaaaacttgatagaacagcttttaaaaagacagtcaacattccagtgcttaaagtgaggaaagaaatagtcagtagattgatgcgatccctaagaagggcagcgttgcagcgcccaggcataaaacgtgtgattgaagatccagaagataaagaaagtagactaatcttgttggatccctataaaatatttactcatgattcctttgaaaaagcaggactcagtgttttagagcagcttaatgtcagtccacagatctctaaatataatttggaactaacatatgaaaactttaagtcagaagaaatcttgagagctgtgcttcctgaaggtcaagatgtaacttcaggatttagcagagttggacatattgcacacctgaaccttcgagatcatcaactgcctttcaaacagttaattggccaggttatgattgacaaaaatccaggaatcacctcagcagtaaataaaataaataatattgacaatatgtaccgtaatttccatatggaagtgctatctggagagcagaacatgatgacaaaggttcgagaaaacaagtatacctatgaatttgatttttcaaaagtctattggaatccccgtctgtctacagaacacagccgtatcacagagcttctcaaggctggggatgtcctatttgatgtttttgctggggttgggccctttgccattccagtagcaaagaaaaactgcactgtatttgccaatgatctcaatcctgaatctcataaatggctgttgcacaactgtaaattaaataaagtggaccaaaaagtgaaaatcttcaacttggatgggaaagacttcctccaaggaccagtcaaagaagagttaatacagctgctgagtctgtcaaaagaaagaaaaccctctgtgcacattgtcatgaacttgccagcaaaagctatagagtttcttagtgctttcaaatggcttttagatggacagccatgcagcaatgagttccttcccatagtgcactgttacagcttttccaaagatgctaaccctgctaaggatgttcggcaaagggctggagctgtgttaggcatttctctggaggcatgcagttcagttcacctggtaagaaatgtggccccgaacaaggaaatgctgtgcatcacctttcagattcctgctgctgtactctacaagaaccagaccaaaaatccagagaatcatgaagatccacctcttaaacggcagagaacagctgaagccttttcagacgaaaaaacacaaattgcttcaaacacttaattggaaatgttttctccatctccctaccagacttacatgtagtgaaatataatgtgtattatttaataaaattttagtgttcagtttttactattgaaaaaaaaaaaaaaaaaaaaaaaaaaaaaaaaaaaaaaaaaaaaaaaaaaa

SEQ ID NO: 3772 - DNA, 2028 bp, Macaca Fascicularis
cataaacttagacttgagtaggtcgagcggttgattaatatggattggaactcggctgctcaaggccgcgtgaataaacatgagcgcgcagcggctgcgctcaccactccctgaacctctctggggcgccgggagccggaactgcgaggcggctagttcgagatgcgggcgggactgtgggtccgcctaaaccagcgcggtctccgtgagccccccgacccgcgcacacacaccctaacctgggtgcccgagcgtacctcaggctgcacggatctgcgcgcactcactctccggggtctttggacaccatttctttgctttctagaagctgcctccactctaggatagagattcagattttgggaacctggggtgcgggaggctgggggtgggggagattctccccattctccaagtgctgggttagggttacccaacttgaatcactgcgcgaaacaaaggcgaccctaaatgtgtccacggatgcgcggggtggagatcctggccccccagcgggaaagaatgtgttgagccacggattccggggagtggcacaccgcgcccacaaaagcgtttgttttctgaagtctgcgggcctaaaggctgctgtggggatcatcaccttcccactacacgtccaaagacttcaccgtctcccgcttggaaaagtagcccttgcgacttgtgtccctgaagccaccgtgtcttcgtctttggaacctacgagaagcgacaaagctaagtgtacaaagctaagtgtacgtgtaggcctcggcagcttcaccacccgctcctgccccgcccctgcccatggcctgcaggtctctgtctctccgctctcatatgcacacactgagtgaccggtctgggccggggcgcaattgggtgcccaccaaccgcagcgcagctcagagtctcagcgaggaggtaaaggcttggcgggatgagacttccgtgggccttaaggcctccctcaagcctgcagactcctgctctgcaaaaccaacaaggccccacgtcccaccctgggctgccacctccgcccacaccacgagtctaagtagtcggcttcttagcatccccaggactgagcgctccaggcggtgccgggagcgaagcagcgctggggaggtgggaagcgcttcgcaaaagacacgcatcgtgccagtcattaggttggtgggataagctcccatcccgggcgaaagcgctacttggagcttgccgcccctcccctgtccctagcatttgtccgagttcacccaaaggcgacccttgagataaggagtggggtttgtctgctcaggtgctggggaggagaccaagcccgggacccaacccagatcccaaggcccaaggcttttcttaaaaactgttccctggaaaatcgtgtgggcttgggacatctattgacccacgggccccagcccaggtcctgggctgccttcccacatccagatcacatttattggacataaagtctgccctagtctgtggctgggagcttttctctttgcaggaagaacagaggttgacaattctagaaccgcagggcaagcctcggaggaggtttgggtctactggtgaaggagaagacaaagaccgttctgctgggaaaatgctgtctcataagaaggctgaaaatccaccctatcatgactgcagacagacaggttgggggacacgctcttgttctaagggaagcaagctgctccatggaaaggcccacatggcaagagctgatgtatctggccaaaggacagcaaagactcgaggcctgtcagcagttaagtgaaaaagtcacccaagcaagccttgagatgaatacagccccagctggcaccttgattgcagctttggaagagaccctgagctagaagaggacacagcgagaaggtggccgtctgcaagccaggaagagagccctcatcagaacctgaccatgctgccaccctgatctcagactgccagtctccagaactgcgaggaaataaatttctattgtttagtcaaaaaaaaaaaaaaaaa

SEQ ID NO: 3773 - DNA, 725 bp, Macaca Fascicularis
  misc_feature (1)...(725): n = A,T,C or G
cacttccatggagctgtgatcagctgtccttaagagtcgagaaggaaagcaagccgtcattttcacctgacctagttttctgggagaggtttctctnnnnnnnnnnnnnnntagataggttcatgtctcgttctccctgaannnnnnnnnnnnnnnnnnnnnnnnnnnnnnnnnnnnnnnnnnnnnnnnnnnnnnngatcctgagatcaattttcataagcagggataaagagggagaggatttggagggactggtgtaggaagacctacgtttcctgtctccgcctttcccccacaggaagaactgtcagtatctttgcagctgggaggtcccagtaaagcccagagcctctgccctcagctcttggctnnnnnnnnnnnnnnnnnnnnnnnnnnnnnnnnnnnnnnnnnnnnnnnnnnnnnnacctgtcttccaactttcccactttatagccaagaaaccaggcccagggcatgaagggatttgcctgaagtcacacaaatgccacacttaggactagaatcctggtctgagttccagcccaacattgaatctcttctatcagacccgttctgcatcttgatttttttagcatagaaagtttggttgatagcgtaaacaaaatggataccactgaagatgcagagtggcacagagctcctgcctgcccacggcatcannaggcccagctnnncnaagccttgcctgttacctgttacaggag

SEQ ID NO: 3774 - DNA, 911 bp, Macaca Fascicularis
ctccggatagattgtatctggggtgaagaatcctgcctcctatgtacctggcatagtgtgagtcctcataaatgcttactggtctgaagggccacaaaatagtgaacagtgaaaatccccactaagatcctgagtccagataaagatgggaaacctggttagctcacccacccgcctatagttaaaactctttagacaacaggttgttttcatttacggagtaatattgggtggtgagttcatgtgtatggggagtgggataggggatacggggagagtggagaaaaagggggcacagggttaacatgaagtccaggatccccctctacatttaaagttggtttaagttggcttcaattgatggcaactcttaagataatcagaattttcttacctttttagctttactgttgaaaagccctgtgatcttgtacaaatcatttgcttcttggtagtaatttcttttactcaaacgtaggcttttgactaggtgaatgtaaatgttcttctagctctaatatcctttattctttatattttctaacagattctgtgtagttggatgagcagagaacaaaaacaaaataatccagtgaggaaagcccgtgaataaactttcagacccgagatctactctctagcctattttaagctcaacttgaaaagaagaactgttctctgattcttttcgccttcaatactcaattatttaactccgccctccttcaaaagaagcagcatttcctacttttatactgtctatatgattgatttgcacaactcatctgccagaagagctgagacatccgttcccctacaagaaactctccctggtaagtaacctcagctgcttggcctattagttagcttctgagatgagtaaaagccttaacaggaaacccagagaagac

SEQ ID NO: 3775 - DNA, 666 bp, Macaca Fascicularis
  misc_feature (1)...(666): n = A,T,C or G
cnnnnnntgaccctcagtttnnncntctgtccaatgagccttacagacaagactacaattcattccaccacttgatgactaagtttatttgcctaagggggtagagaggcagaaaggggcaggtgtggaaggctctagaacagcaaggtcactttactcaggtctgggatttttaaatgttttatctggtagaaatgcatacagcatttacaaattggaaataactctgtaagctcagataagattgtctcagtaatattgtcgccagaaatggctcaccacggcttcctttcaattaaccatttaaatcacagcccatacaaatcccaacccccgctgctttataataaaaaaaaggaaagttaaactagagctgaagagttttgattcgnnnnnnnnnnnnnnnnnnnnnnnnnnnnnnnnnnnnnnnnnnnnnngtgattcattatagataacccctcctgattaattttgttttgactttaactttgacattaaaaaaagtaagaaaaaaacataagaggtaaaattctcccctctagcattcaccgtgcgactatttttagccagctttggtgtttgatgcagaaaagggaaaaatctaaatttagaaagaaattaaattgttgattgtcatcaaaagccccggctgtctagattagaaag

SEQ ID NO: 3776 - DNA, 748 bp, Macaca Fascicularis
  misc_feature (1)...(748): n = A,T,C or G
agaacatgtagacacttgagaaatgtttctgtttgaagaaaatagagggagaaacagaagtcttaagtctgtggcacactgtgtcttcagacagtttgaaggaatgaaaacctagagattttaaatcatgaattgaacatgtaaaattccagtaaaatgtnnnnnnnnnnnnnnnnnnnctcttaaccttgagcatagtgacttagagannnnnnnnnnnnnnnnnnnnnataagactgtggacttcatgattgttgttgaacttctgggtcaaaactcaaatgaggtgaattttgcctttaaagggtttatttgctgagaaccaacttttaatagtcacgagagaatcaaataatagatgtccgtnnnnnnnnnnnnnnnnnntaaccatttagtttggggctctatattacttgcttgagccttaatcaatgtggttttattcaatggtttgttctttgaatggttgcaaaactgtagattatcttactgaggactgtacaaacatgaaggtgtggtatcaaacttcaggnnnnnnnnnnnnnnnnnattataaacattcatttcacaactagattgtataaggatattagctgtgatgagactcactgcattatttttttagtgaattttatgaaatccccattccattcaacaggcacatgtttaaaagagcattgtcgttggtgttaatgggggaatgtgttccttcattgtatttgggccttttgtatgcactcttgatata

SEQ ID NO: 3777 - DNA, 731 bp, Macaca Fascicularis
  misc_feature (1)...(731): n = A,T,C or G
gtgacctgggtgtatcatttacctgttaagtgaaggagtttgtcannnntgattttatgataatagcgtgtgtttccctgggtttctctgttggtcagatgatatataaaagtgctttgaaaactgttaatcacaataaagtggtattttgtgtaaatttatttgataaaatttgtaataaatactattaatacttaaaggttgctattgaaaaagaagggaggatgtatatcagttaaagaacattctcatgatttggcagtaatttctgacaaggtgaatttggaaaagaaaaatgaggttatttcaatggcaaaattatatatttaaaagtcattcatggaaataatgtcattaaaatgaccatgatcaaataaccacatacaaaaatatgaataatctcgcaaacataatattaagggaaataagacataaaagaacactgatgtagttctaatatatgaactttaaaaacaggtaaaactaaggtacagtgttagatgtcagggtagtggttattttggcaggtaaagaatgggttgtaactggaggggaagcattagagggcctcctgagctgtagtgatgatgcttatttatgatctaggttctggttacaaagatgtgttnnnnnnnnnnnnnnnnnnnnaactgtacacttaaaatttatatactcttatgtaatgattttttaaagttttactttaaaaatatctgtacaagaagacgacc

SEQ ID NO: 3778 - DNA, 701 bp, Macaca Fascicularis
ctggctgctgctgtggatggccagaggacaggatactccctggctgagctcctgggagtgtggaaggagacgctgggccctggaagggccacagcgttatgtggatggggccacgatagaatggagtgagctagtgaagaaggcagagggagacttggcttctggtctcagctatgcctgtttgtcaccttgattgagttgcttgggctttacttccgcccacaaatcagtggtaaaaatacctgttgggaggagaaatgagaacatagaggaaagcttcttggagaaaaggtgcttggaccaagtctcaggtgtgtctgcctgtggctgcacaggctctctaaccaaaacctcactttcagagagatgtgggtcctttgtcttcagggtccacaccctagattttaacactgcattctcactataacatgccctataatggctgcatcccttttgagcaacctccaaaatccacgtttatacaataggtaaattagggatgactgcattatcagaatactctcagggttcctataaatggcagctctcctgttgtattcaagtgtttgtttacagactaacaaatttgttggcaaatccctggttagatgcacttgctggtgttgagatgaacacgtcgatttttcaccaaatcgatgaagccatgctctgcaatgacaatattaatgtgatccaaccct

SEQ ID NO: 3779 - DNA, 734 bp, Macaca Fascicularis
  misc_feature (1)...(734): n = A,T,C or G
gtatgcagcgcnnnnncatacnnncggttnnnnnnnnnnnnnnnnnnnnnnnnnnnnnnnnnnnnnnnctctttcctaaactgaaggaattgggactgaaagggaaaggaaatggaaggaaggagaatttggaggagagaacacgcccaccctggggaagctgcctatccccagggaaaccccaccagggagcagccgtcccctcatcagagacctgcagagtcaaccaagcacaggttagagccccagaactggaagccagctgtgggctttctgtgcttcctctcatagctttggagtctggnnnnnnnnnnnnnnnnnnnnnnnnnnnnnnngnnnnnnnggctcccacaccacctctcccctggcctcagtaaaaccaggtgtatgcttgctcttccatccnnnnnnnnnnnnnnnnnnnnnnnnnnnnnnnnnnnnnnnnnnnnagtaaccgagcaggcgcaggtacaaagagggcagctcactcctgctcttaggagatccaatcagatctgccctnnnnnnnnnnnnnnnnnnnnnactgcacaactccagggacattagtcacacagatgcaatgtgagtgtgctcccccatcannnnnnnnnnnnnnataactnnnnnnnnnnnnnnnnnnnnnnnnnnnnnnnnnnnnnnnnnnntgtgaactaggcctggggacaagaatgaattttacatggaaagaatttcctgtagcaggaacagagagg

SEQ ID NO: 3780 - DNA, 727 bp, Macaca Fascicularis
  misc_feature (1)...(727): n = A,T,C or G
tannnnnnnnnnnnnnnnnntnnntgaaatctgaattttttgtcagctttttttttttaactatggnnnnnnnnnnnggaaagatctaaataacccaacaggaaatgctgatgaaagtgcaagagttgatttgtggtcatctagagtccacgtctccaagactgctgnnnnnnnnnnttctgcaacttgttagatnnnnnnnnnnnnnnnnnnnnnnnnngaagacctagaagaatannnnnnnnnnnnnnnnnnnnnnnnnnnnnnnnnnnnnnnnnnncagctggggaaagaatcaattacaacaggaataannnnnnnnnnnnnnnnnnnnnnnnnntgttacagtgaagatgggttcttgaactctnnnnnnnnnnnnnnnnnnnnnnnnnnnncaagataaaaaccaaagactannnnnnnnnnnnnnnnnnnnnnnntagtgcttgaagactgaatgttgaatacctgttgaatattcctattgaggttttttcctaaacatacttcannnnnnnnnnaggacaannnnnnnnnnnnnnnnnnnnnnnnnnnnnnnnnnnnnnnnnnnnnnnnnnnnnnnnnnnnnnnnnnnnnnnnnnnnnnnnnnnnnnnnnnnnnnnnattgttaggctgtcctttcaccagtttctaaacaattgtaatcatttattgactnnnnnnnnnnnnngataccaggtcaaaagatgtacagatatattct

SEQ ID NO: 3781 - DNA, 755 bp, Macaca Fascicularis
  misc_feature (1)...(755): n = A,T,C or G
cccacatggagctnngaccnanctcagaggaacttctctcagcacttagccagggcctgtcagatcaagggtaggtggtctaggctgattgaaggaatggcatttagtctttaaaatgaaagcgtgttgcctggcttggttagttttgaactctgtagttcatcaaggactgcgttacccgaatatcctctgcagaacaccagttccataaagtgcttcacacacacaccaattctataacgtagtatgttttggaaaggctacatactactacagccccttttaccgattagcaatgcccgtgagcgcactaaagcctgagagattctgcagtaaagaagcctatttcactttgtttaaccaagtatttctcaaatttgtttnnnnnnnnnnnnnnnnnaatgctaagtgtctagcattcttcatttccctcttcttcctttaacatggaacccctgatgtttttagcttggcacatcaccacccagaataaaaactacctttcccagatttcctgcagctaggggcagccctgggataaattctggacaatgaaatacaggcaaaagtaaatcatatatgatttccataaagggaccttaaagggaagtgtacccttcttttccccacacattcctcctcctgtctgaaatgcagatgcaattgctggcatttgagcagccatcttgggccatgcggtagcttcttatggatgatgtaggactaattcaggggtctagatttacctccaaact

SEQ ID NO: 3782 - DNA, 786 bp, Macaca Fascicularis
  misc_feature (1)...(786): n = A,T,C or G
ttaaatgatggtccctgccntaaaagagcttatatnnnnngtgtatcgtttgntntgagacagggtctcactccagctggagcacagtggcacgatcttggctcaccacagcctccccatcctaggctcaagtgattctcccatctcagcctcctgagtggctgggactacaggtgtgcgccaccatgcttggccaatgttttaagtattttttgtagaaatgagctctcactatattgctcaggctggtctcaaactcctgagctcaagtgatcttcccacctcagcctcccannnnnnnnnnnnnnnaagtgtgagccaccatnnnnnnnnnnnnnnnnnatagtagtttttctggagagataaaatatgggaatagaagcttttcagtgatacagggaaacgtgggtaagtgtgtaatgaataatacagaccacaagtcagcaggccaagacctgagtgnnnnnnnnnnaactctcaagcaaataatggtttttacatttttaaggtcatttgaaaaaaactacaaaaaaataggcnnnnnnnnnnnnnnnnnnnnnnnnnnnnnnnnnnnnnnnnnnnnnnnnnnnnnnnnnnnnnnnnnnnnnnnnnnnnnnnnnnnnnnnnnnnnnnnnnnnnnnnnnnnnnnnnnnnnnnnnnnnnnnnnnnnnnnnnnnnnnnnnnnnnnnnnnnnnnnnnnnnnnnnnnnnnnnnnnnnnnnnnnnnnnnnnnnnnnnnnnnnnnnnnnnnatcggggctgcagtgggtggtgatcacaccatcata

SEQ ID NO: 3783 - DNA, 657 bp, Macaca Fascicularis
  misc_feature (1)...(657): n = A,T,C or G
cttacgtatgaatccatgtcatggccagccactgtcacacagtgggtgccattctcaacatactggtntgctaactttaagcattagagatttagcacactaaaatacttttaattatattaggcttggtaactaaggagtaaataaatcatagtttatcatttgccaaggccaacaaacaacactgttgtgctgtttgctctcaatgaagttgaataaaccaggaggcttggcatatcccctttatgttaatcccagctagagattagcaggttgactttcacagcaattgtatattggtccattttaacccatacttgccataatttccaggccagtcaccaggacagaggagatgatggggaaacagagctttagatgaaaactactatgcactactagcctttgaggcactggtttcctgttaccactttggcaagtatggctggtctaagtccagtagggcttcatccatggagccattagaactaaggagggaatgtcagagataccatttcaccaggatctttttgctcaggttgtacccatgccaattgaagaacgtgttaaagatgaggaggagagatgtaccattctctcccttaataatgatgttggtttgcaaaacctaaaggaataataacaacagactatttc

SEQ ID NO: 3784 - DNA, 675 bp, Macaca Fascicularis
  misc_feature (1)...(675): n = A,T,C or G
ttgtttgctctctgggtttcatccttagagaagccatggagaacagacttgagaagtttaggaaatcataatgggaagaagaaagttgannntttttccccttgagaaacttatgcatttagatttgtatctttccaggcaaaacaaatgggtattcttttcatacagccattttcaaatgaaccttagaaaagtcttaacatttaaggtattttatgcacagaatacacttagattgatgggaaagaactcataacggagtttgagtgaagaaaaggactgatgtactaaacccagtagaaattgttgaaaatgttaaaggtcagcatgttctaattgggaatctagatatagcttagatttcctattgtcttagagtatttgctataacaaatgaagtgcaatgacaattatatattcctactcggtcatactggactggcttcgttctcttaacatactcagtaatgactcaagcctctggctattaacataccctnnnnnnnnntttttnnnnnnnnnnnnnnnnntacttcttggtatacaattgatccatttattttaatggctgccttttcattttcatcttttcttgctgctacccatctatgtatgtagtcattgggggggaaatgtannnncattttttatgnnnngactttgtgttaaaagtga

SEQ ID NO: 3785 - DNA, 603 bp, Macaca Fascicularis
cacagtgggagccagggctgtcttcgtattcccattagaccaagctggtccaacccgaggcccgcatgtggcccgggatggctttgaatgtggcccaacacaaattcgcaaactttcttgaaacatcatgagatgggagttttgcgattttttttttttttttagctcatcacatatggttagtgttagtgtattttacgtgtggcccaacacaattgttctttcgatgtggcccagagaagccaaaagattggacacccatcagatagatggaaaagggagactcagactatttttcagggaggtggatgggtatacacgccaaccccgattcaccctgtccaaactgcataagccatatgtcttctcgagccatgcagtcacaggtacacaaattacagcttcatccaggaggtgggcagaaagtgccaagctcccaccaggctgcccaggaatggtcttttaggacccttcccttgagccctctgtggtgtggcaaagccacttcattgctttaactggagtcccatcagctccagctgctctgtcttccttgcccacaatgctttgcccctgagacaaatggaggcctattctgacctg

SEQ ID NO: 3786 - DNA, 1882 bp, Macaca Fascicularis
  misc_feature (1)...(1882): n = A,T,C or G
agaaaacagctgccatgtccacatctcggtccctctcccttcaggggtccacagagggatcctcggcggctttctcgtccctggctgcttctccaagaagctctcgctggaagccagagggtgtgggtgacccggggccaggaggggcctgaggcagacaagagggcaggtgggggggtctcagctccttaactccacattgaaatctgtgggaatggccacattgctgcaaatcctctctcccctcttccctatcgctctttttccttcctcagtctccaaaaaaggggagggaagattcaagacaggggagaccctgcccagaaaagcataaaactctcaagaccaaacacagccaggcccctgggtctgtggtggggccactatgacaaggaattacaaggctgtggtcaccgccaccttcgcgacacctgacagcagcatggcacccacctactgtgtttctgatgtgacctgatcaagcttacaggacagagtaatgcaccagccagcgctaaggaatgaaaggagtccaacggaaactccctgcagccatatcctgagaatgtgtaacacctgctctgaggtatttcattcattccgttctgcccggaagacccactcgccagcaccgcatagattctgaggggctgtggtgtcagctaagcatcaatgctggcaagaagcaaatcatcagtgaggatgaggatgaggacgcacgtgtccaaagcagatgatgacttcagcacattagatccgcccagggcttctgaagtgcaacacggcaaggtcctgagccagatgcctactatggagcttgccctgtgcttggaggaactttctgcagcgtcccttgtctccagtcccaggtgctgggagcatcccttctcccagttctaaccagaaacctccctggacagtgcaaacatcccctggggcacaatcacgccatgagaatcaccaaattgactgaacaactggagccatccacagaccccaaacataaatgctgcccagggccaggccaggagtcacgggtcacagagggtgtggccagacagggaagagacgctcactcccacacgtcctcagcctctgacggctccaggacagtggctggagtgacctggagtcacccacgtcaagtcgcctcatgccctcatttttcgagttcgccaccagctcctgttctacggccagacgagcccagttcagacccaaattcaaaccttctcaggattcaccctgtttggccgtcagtaaacagggctctggagaaaacagctgccatgtccacatctcggtccctctcccgagcagctgcagcatttgccagggtgacctcgatcacctcagccggcgtcactcacccatcacgagactagaaccacagcactcccaagaccgcctcattcctcggagctcaggatcagaagggcaatgaggacacacatacacactaaggtggctgtgcctggccaacgggaggctcaactaactacacgctccagttctttctctattgtaatcagttaacttaaggtccgacagtggctcatccctgtaaccccatgctttgggaggccgagacagggggattgcttgagcccagaagtttgacaccagccgtgacaacacagggagacctnnnnnnnnnnnnnnnnnnnnnnnnnnnnnnnnnnnnnnnnnnnnnnnnnnnnnnnnnnnnnnnnnnnnnnnnnnnnnnnnnnnnnnnnnnnnnnnnnnnnnnnnnnnnnnnnnnnnnnnnnnnnnnnnnnnnnnnnnnnnnnnnnnnnnnaaacagagtgacaccctgtctccaaaaaaaaaaaaaaaaaaaaaaaaaaaaaaaaaaaaaaaaaaaaaaaaaaaaaaggccaca

SEQ ID NO: 3787 - DNA, 716 bp, Macaca Fascicularis
  misc_feature (1)...(716): n = A,T,C or G
agtgttgacccactattgtccagtgagaaagaccaggctctgagaacacaaacntnctgccacacagctacttccttctgttgtgggaacaggagatgcctccagatggatctgtgccagacagatatccctggaggtcaggtcacccaattctatcgactgnnnnnnnnnnnnnnnnnnnnnnnnnnnnnnnnnnnnncagattaactacctaggtcctcagagaaannnnnnnnnnnnnnnnnnnnnnnnnnnnnnnnnnnnnnnnnnnnnnnnnnnnnnnnnnnnngaaaaatagtcctccaaaggtctctgatagtatctaaannnnnnnnnnnnnnnnngannnnnnnnnnnnnnnnnnnggttttaacttgaaaatgtttataaacaaaccaggattctatctgctgctttcactgattatgccaagcacttagaaaaatgacagcagagatnnnnnnnnnnnnnnnnnnnnnnnnnnnnnnnnnngtggcttacctctgtaatctgagcactttggagggcagaggtgggtggataacctgannnnnnnnnnnnnnnnnnnnnnnnnnnnnnnnnnnnnnnnnnnnnnnnnnnnnnaaatacaaaaattagccaagtgtggtggcacacacctgtggtctcagctactcgnnnnnnnnnnnnnnnnnnnnnnnnnnnnnnnnnngagggaggttgcaggagccgagatc

SEQ ID NO: 3788 - DNA, 733 bp, Macaca Fascicularis
  misc_feature (1)...(733): n = A,T,C or G
cagactttgagttgcttgggtattcaggaattcctgtcaaaatgaaatctgctcaaccgagaggaggatgagttgggctccagttctggtctggaggcaagaagtcctaaatcagcgtcaccaggctgaaatcaagctctctcctccttgagattttactatcaagtcgcagccacttgagcagctttgaactccaatctgtctcttcagcctaatggaaccgccacttactttattccctgacctgtgagttgggccaggaatcccatctgtttgtatctattgaatacctactatgtgccagaaacacatagtaatacaaaagacgtgaaggctataatctagtaagagtgtaattggtacaacctctgaagatggtggccctgtggctctcagcacctgatcaatgatcccttcactcttaacatcacaaaacagaggctggagtgcaatggcacgatttcagctcacagtaacctcctcctcctgggttcaagcaattctcctgactcagnnnnnnnnnnnnnnnnnnttatcgacgcctgccaccatgccctgctaatttttgtgtttttagtagagacgaggtttcaccatgccggccaggctggtctcaaattcctgatnnnnnnnnnnnnnnnnnnnnnnnnnnnccaaagtgctggtattacacctgtgagccaccgccccccactgattcccttttaaatacatgtttgtgtaaatacctcga

SEQ ID NO: 3789 - DNA, 707 bp, Macaca Fascicularis
tgaggtacctgggtgtagttcttcttccctgtcctgctcctggaagagatgttaggaatgaagaggaaagaggggacaggtggggcaagatggagaagacagatgaggaacaggggacacaagacagaggagaaagccccagagagactgggaacaagagaacatatttgagggagaagccaggggaaatgaatcgtacttatccttcccccaaagaagaaatggtaagtccaaatgaggactgcagattccctgtaggaatctttccccacggagcaggtggatcagtaactggcctgggctgtgtgtgtgtgtgtgtgtgtgtgtgtgtgtgtgtgtgtgtgcgcgcgcgcgcgcgcacgcgtacagcaaccttcagcctctccagatgaggagcataaggatgaggtcctaacctggagactgcacaacctcctatctgtgccaggtaggagatatgtcttcctactgcctccatcctatccctttcaacatcgaggatgctgtgtgcagagacaatggcccagagggagaggctctgtggcctctgtccagggctcccagaactgctgagctcagcaaagtcgaggcaggaggctaaggagtctggggtagcagctgtgagctttggctgctggccagcccccttccctccctcctggtccacatacagcacctccccctgcccactctcccctcatccactt

SEQ ID NO: 3790 - DNA, 681 bp, Macaca Fascicularis
  misc_feature (1)...(681): n = A,T,C or G
aagagaacggcacctaccgctgttacttccaagaaggcaggtcctacgatgaggccatcctgcacctcgtggtggcaggactgggctctaagcccctcattgaaatgaggggccacgaggacggaggcatccggctggagtgcatatctagagggtggtacccaaagccnnnnnnnnnnnnnagggacccctacggtagggttgtgcctgccctgaaggaggtcttcactcctgacacagacggcctcttcatggtcaccacagctgtgatcatcagagataagtcgatgaggaacatgtcctgctctatcaatgacactctgctcaaccagaagaaagaaagtgtcatttnnnnnnnnnnnnnnnnnnnnnnnnnnnnnnnnnnnnnnnnnnnnnccctgcctatcattgtggtttttctgatgataatcattgccgtatgcatctactggatcaacagactccaaaaggaaacaaagattctgtcaggggaaannnnnnnnnnnnnnnnnnnnnnnnnnnnnnnnnnnnaggaactggagaaggaacgtgtgcaaaaagagaaagaacttcaagtaaaaggtaaaagaggctgagtatggtggctcatggcttgaatcccagcactgtaggagnnnnnnnnnnnnnnnnnncctgagccctggatttcgagaccagcct

SEQ ID NO: 3791 - DNA, 1935 bp, Macaca Fascicularis
gttaaataccgagtaaatcaacaaattaggttgagaaaaaagcagcagcttcagaagtctcatgaaagagcagaaaaagaaggctctgtagccatgcagtcttcagcagcacgcttaacttccaaaaggacaagtgtttttccaaacaatttgaatgctgctattggaagttctaggttacctccttccctgatgcctggggatggaatagaggatgaagagaatcagaacgaattattccaacaacaagcccaggctcttagtcaaactatgaaacaggcacgtcaccggctagcatcctttaaaactgtgagtgaaaaaaagggatcagtgtttccagatgatggaaggaaaagctttcccacccgagagaaagtgctttctaggaaaccagcatccactgggataaatacaggaataagaggagagttgcccattaaggttcatcaaggtcttttagctgctgtaccttaccagaattatatggaaaatcaggaacttgactatgaggaacctgactatgagaaatcttcatctcttgtaactgatgagaaagcgaaagaagatttatttgggagagaccagcaggaccagcaggatatcctttccgaagataagaacgaacctttcagcagagttcagaaagtaaaattcaaaaatccattatttgttctgatggaagaagaacaacaaaagcagatacattttgagggccttcaggatattctgccagaagctcaggattatcttccagaagcccaaggtgatttgctggaaacccagggtgatttgacaggaatccagagtgttgagccagatacccaggctgttgagctgaaggttcagattactgagccagaaggccaggccactgagccagaaggccagcctattaagacagaaactcagggtattatgctgaaagcccagaatattgagctagaagaaaggagtattgtgttggaaactcaggattttctacccccaaatcaggcttttctaactaaaaaccaggatgttttactcaaagaccactgtgttctccctaaagaccaaaatattctactcatatgtcaggaccgggattttctccccagagacctgcatgttctctccagcgaccagaatattctatccaaatgtcaggaccaagattttctaccaaaatatcagaaagcagatctgaagcagccaacatccattttgatagataggagagggagagaggcgcttcctctggatgtccatcaggatcttctatgcaggcatcatcaggcctccatcagaggcaagaaagtacactttaaggagccatactctgatatgacagatgagaaagggagagaagacttgtctctggcagattatcagtgtttgcctcccaaatcccaggaccaggatgacatcagaaaccagcaacctgcatcttttatgagagaagagagagtgagagaagaattgcccctggactgtcatcaatatgttgtacctaaaatccaggaccaagactctcctagagaacagaacaagcatttcaaaccaccctcatcttttgagaaatgggagattgcaagaggaaatactcctggagtgccatcgcacaggaactatgagcagacctcacatgatatgacagatgagagatggagaaaggagttacttccagagcgccatggatatattttacatgaaatccgagatccaggctctgccagagagcaggcttatgatggatatcgatcaggattgagcactgaattccaagctccactcgcatttcagtctggcgtagataaagaagaagataagaaagagcgtcaaaagcagtacctgagacatagacgacttttcatggatattgagagagaacaagtaaaagaacaacaaaggcaaaaagaacgaaagaagaaaattgaaaaaaaaaaaaaaaaaaaa

SEQ ID NO: 3792 - DNA, 735 bp, Macaca Fascicularis
  misc_feature (1)...(735): n = A,T,C or G
gagacggcaggacgctggggcagggcnnnnnnnnnnnnnnnnnnnnnnnnnnnnnnnnnnnnnnnnnnnnnnnnngccatgagaaatccaccagaaaacgttaggtgagcaaacatgcctcggcgccagtgggctgctgtgaggataaggtgtgtgtnnnnnnnnnnnnnnnnnnnnnnnnnnccaccctgtggannnnnnnnnnnnnnnnnnnnnnnnnnaggctgccctctctcctgcccacttccctcccttctccatgatttccatggaggcctgcggctctgctcacccctggcacgcagaccgctctcctgtcnnnnnnnnnnnnnnnnnnnnnnnnnnnnnnnnnnnnnnnnnnnnnnnnnnttcagtgggactcgtccccagcgggcacaacacagcccttggtgggaggggaaggccccagnnnnnnnnnnnnnnnnnnnnnnnnnnnnnnnnnnnnnnnnnnnnnnnnnnnnnnnnnnnnnnnnnnnnnnnnattagaactgggtacattattttggttcaaatctattattccatcaattcagttagaattgaattttctaggtgttatgcagaatcttctgccagggcacgatnnnnnnnnnnnnnnnttctgttctctgtactgggcccccttgccctgttccttgagtgaagtgggggctgccctcacctgtcccccttgcctgtgaatcccttcctcgtacatggtggtcagtggcacgg

SEQ ID NO: 3793 - DNA, 728 bp, Macaca Fascicularis
  misc_feature (1)...(728): n = A,T,C or G
agggtgaggagcagagggagannnngannnnnnnnnnnnnnnnngggtggtgtgggggcaaagggtgaagagagtgtgggctttaggagaaaagtgtnnngcatgacccaaattgnnnnnnnnnnnncctcagggatggggaagaaaccccagagtatgagggtgcagggccccccttcatacataggagagaacagagctatttagggtgtttgtgtttatcgannnnnnnnnnnnnnnnnnnnnnnnnnnnnnntgttatttttgcttttaaatttctcccaccttcagtttttttttttccacctccactttttaaaagcaagaaaaaaaaaaagaaaaaaagtgtggtggtggagaataaagaccaaagggttctctctgcctttcaaaactctcctggggtgcaggagaccagagcaggatagcagtaagagaggggttgggacacccagggtactccttggatcttgggatctgagccaccaagggactgctaggcaagtggattagggggtctggatagggccccacaggtgacagggagnnnnnnnnnnnnnnnnnnngatcatgggagccagagggagtggggacagtgcaggcagtattggcaggagggccaatgcagaagnnnnnnnnnnnnnnnnnnnnnnggggaagcactgaagcctgtagtccccacttggggactaggggtttgctcactcagcaataaataactgtgtcac

SEQ ID NO: 3794 - DNA, 2589 bp, Macaca Fascicularis
tggccgtgatcctgtggtttcagctggcgctgtgcttcggccctgcacagctaacgggcgggttcgatgaccttcaagcgtgtgctgaccctggcgttcccgagaatggcttcaggacccccagtggaggggttttctttgaaggctctgtaacgcgatttcactgccaagacggattcaagctgaaaggcgctacaaagagactgtgtatgaagtattttaatggaaccctaggctggatcccaagtgataagtccatctgtgtgcaagaagagtgccgtatccctcaaattgaagatgctgagattcataacaagacgtatagatatggagagaagctaatcatcacttgtcatgaaggattcaagatccggtaccccgatctatacaatatgttttcattatgtcgcgatgatggaacgtggaataatctgcccgtctgtcaaggctgcctgagacctctagcctctactaatggttatgtgaacatctccgagttccagatctccttcccagtggggactgtgatctcctatcgctgctttcccggatttaaactcgatggatctgcgtatcttgagtgcttacacaaccttatctggtcgtccagcccaccccggtgccttgctctggaagcccaagtttgtccactgcctccaatggtgagtcacggagatttcgtctgccatccgcggccttgtgaacgctacaaccacggaaccgtggtggagttttactgtgatcctggctacagcctcaccagcgactacaagtatatcacctgccagtatggagagtggtttccttcctatcaagtctactgcatcaaatcagagcaaacatggcccagcacccacgagaccctcctgaccacgtggaagattgtggcgttcacagcaaccagtgtgctgctggtgctgctgctcgtcatcctggccaggatgttccagaccaagttcaaggcccactttccccccagggggcctccccggagttccagcagtgaccctgactttgtggtagtagacggcgtgcctgtcatgctcccgtcctatgacgaggctgtgagtggcggcttgagtgccttaggccccgggtacctggcctctgtaggccagggctgccccttacccgtggacgaccagagccccccggcataccccggctcaggggacacggacacaggcccaggggagtcagaagcctgtgacagcgtctcaggctcttccgagctgctccagagtctgtattcacctcccaggtgccaagagagtacccatcctgcttcagacaaccctgacacaattgccagcacggtggaggaggtggcatccaccagcccaggcatcgacattgcagatgagattcctctaatggaagaagatccctaatatggggcaggatgcagatgactttcctgctcctttggggaaaggaccttgtatcttggagtgagatcacagaaggatagagcttgggggcaaaatgtctaacttacctacatggggaccgcaattcacattgtgcatctcaggctccacagtgaggctgacaaactgcaatggcagtgcttttaaatgagatttgaggattcgccaagacccatggggaaccggggcagcggagaagccctcgcgcggtcttggatggaggtgttaaatgtgtatcgtgctgtggaacatgagacaattccacgcacatcccaccgaatcatcatacatcccattggctgacaagtcctccccgccccctctgaaagcatgtcacattatgtaaatttgcttctaaaacctgcttccaactggctctggactccaaatttggatgggccagcctctgcagaaagtttgtgttgagctgctgaaggaacagcagagcctcctgcaccctcagcaaggggccggctcccaaaggaaaggtccttgtgtaacatttggagaatcttccttcatccagacaactctactcgaagcaagatgaaagcaggatgtggcagttccagtgagaaaggaaaggaaaaagacgggcagactctgctttctggaaattttttcatgaagtagagctcgtgaactctgtgctgtcttctggtaacatatcatcagtgtttgtattcatgagtggcacatggatccatgcattgggtaaatctggggggttttacacatggtcagaatgtatttaaatacatctcatgatggagacagtaaccaaggtaatgttttgtttcagcattttgaaaagacttaacatttatctcagaatcatgagcctctctctagttgacaattgtcattgttccccccagccccaaattcaaccatacatctattttccaaaacagaaattgtttctgtaaacatatctcaccttcaaaagaagtgtgaggttggatttttcccccttttatttgtcctaagattccagaaggctggcctcccagcccagatagctcagccacctcacctgcctatcattcctgcattcctactttgagggtctcatggtgcccactgggtgttgttcctaagaaattgattgattaaaaaatttcccaaagtaaaaaaaaaaaaaaaaaaaaaaaaaaaa

SEQ ID NO: 3795 - DNA, 671 bp, Macaca Fascicularis
  misc_feature (1)...(671): n = A,T,C or G
cccaagtaagaggctggagttgtcactgcttttggcctggagtttgggatccctgtctttcctgagatgtggggttgtnnnnnnnnnnnnnnnnnnnnnnnnnntcnctgccttgcctttagcccctcccaagctggctggggtggcctgtgtggccacttccgtccatatttataggtacccaatagctgcccatttcgtgagccccatcttcacnnnnnnnnnnnnnnnnnnnnncannnnnnnnnnnnnnnnngagtcacnnnnnnnnnnnnnnnnnnnnnnnnnnnnnnnnnnnnnnnnnnnntggacagtctgctctagatgagctgggccagagggtcaggaaacccagtcgcccttnnnnnnnnnnnnnnnnnnnnnnnnnnnnctttctccccactgagacttgccttcctaagcctggggctgtnnnnnnnnnnnnnnnnnnnnnnnnnnnnnnnnnnnnnnnnnnnnnnnnnnncagagaaagggacaatgatattagagtgatatggagcaagagatattttgggcatgtggacnnnnnnnnnnnnnnnnnnnnnnnnnnnnnnnnnagtgannnnnnnnnnnnnnnnnnnnnnatgcgggtgctgagtagatgcgcagccccatctgtgcattctcctagatgcttagagggatttctt

SEQ ID NO: 3796 - DNA, 724 bp, Macaca Fascicularis
  misc_feature (1)...(724): n = A,T,C or G
aatgaattaagttnanttgnnnnnnnnnnnnnnnnnntccatttaaataaactggtgactttccttttatttttannnnnnnnaacccgttgtgtgcctctcgatttaagggtttctgatgacattattcttaagaccagcattgatcctttnnnnnnnnnnnnnnnnnttccttgttttttattgctatttcagaagaaaatgaaccttttattttgctctacccagtaactgcgctggtacatagacgcactgagcaaacaaacttttgtaaccacctctgactacttttgtatatcaaagttgattacttttgaaatatttggatctagtttctaagttattttagtgttttatatgttccccaaaattactttgaatctgtnnnnnnnnnnnnnnnttcttggtgatacaatggtgagacttgtaatgagcaaaaagctacctggagtagctcctcttttccttnnnnnnnnnnnnnntgttttttgattaccgtaagacatcannnnnnnnnnnnnnncccttccagtataactaggccctccttccttccacatttaattgcttaatagtttgaagaaactattggaaatgggcattttatatgacatgtatggctttaaaatattaaatatgagcaaaaagaaaaaatatgagaaggtttatgtgggtctgtaaggtannnnnnnnnnnnnnnnttgtagtagttttgacactattg

SEQ ID NO: 3797 - DNA, 1755 bp, Macaca Fascicularis
gactttcactaagtataacaatcaacaagttcaccagaaagcctttcccaacatcaggacactaaagtgaccacagaaaaccattcctgaatttgtgatcaatggactcaagtttagggagaggagcacctttggtctacaactatggtttgaatcccagtctctaattacttctttcccaaatactctggtaatcaaagggaaatatttggtgagatgcaagccttaatagacaaactggagaccgagttagaagatgacatcgccagggttgaggcaatttcagtggcctgtgctatgtatgaagtgatctcaataggcacctctgtcaccggcttgtattcagagctgttcactctcctcctgaagctggttagctgcacactgggccagaagatgcccacgtcttcctggagccgcaggcggcatgtgatgcagcagggagaacagcagcagatcccagacccctgcaggctttcaactgctactctaagatgtttgcaagcccaagccatgagagaaggccttgcaaaggaatctgatgagggggacaacttatggactctcctcagcagtcctagtacacatcacataggcgtatgttcactggccaggagcatggcagtgtggcaacacggagtcatactggacatcatggaacagctgctctcatctctcacctcctcctcggagagctaccggataaccggcaccgctttcttctctgagctcatgaaggagccaatcctttggaagcatgggaatctgcgagatgtgctgatcttgatggatcaaagtgcctgggactccaacgccactctgaggcagatggctatccgagggctcggcaacacagcatctggggctcctcacaaggtgaagaaacataagcagttaatgctagaatctatcatcagaggcctgtatcacctggctcgcaccgaagtcgtctgtgaaagcttgaaggctctaaaacaaatcctgaatctgctcacagaccgagacgtgagcttctacttcaaggaaatagtgctgcaaacaaggaccttctttgaagatgagcaggatgatgtgagattgactgccatcttcttatttgaggacctggcatccctaacaggaagaaggtggaagattttttttgctgaagaaataaaaaagagcctgatctcattccttctgcacctttgggatcccaaccccaagattggagttgcttgccgtgatgtcttgatggtctgtattccctttttgggcctccaggaactctacggggtattagaccatctccttgatcaggatctaccaagggtcagggatttctataggcaattctgtgtgaaactggccaagaaaagccaggaaattctgtggatcctccacacacactccttcaccttcttcactagcagctgggaggtgatcaggagtgcagctgtcaaactcacagatgccattattctcaatttgaccagccaatatgtggagttactagacagagaacaactgatcacacggctccaagcacttcgtcgagatccatgtattcgtgtccagagagcagctgaggctgctttgcagaccctcctgagaaggtgtaaagagacaagcattcctctgtaagccatcaagaaataaactgctggcttttcctaaaaaaaaaaaaaaaaaaaaaaaaaaaaaaaaaaaaaaaaaaaaaaaaaaaaaaaaaaaaaaaaaaaaaaaaaaaaaaaaaaaaaaaaaaaaaaaaaaaaa

SEQ ID NO: 3798 - DNA, 640 bp, Macaca Fascicularis
  misc_feature (1)...(640): n = A,T,C or G
gggcatccggtgcctttcagtggcctcatctgggntgtgctgaccctagatggccaggatgggcatgaggtggccaagnnnnnnnnnnnnnnnnnnnnnnnnnnnnnnnnnnnnnngtctggggccagcctcctgtggtctgctggggctgaggcaggtaccatggttaaacagtgactccattctctctccannnnnnnnnnnnnnnnnnnggcagagcctgtgtcaggccccagcccagcaggcctgggtggccactatctgactcccaaaggtggggagaggcatgggcccaggccatcagcctccctgctgggacagggacctacggcacctggggcagcttaggtttggcttaagttgtggtgaggggccttgctctccccctcccagcccagggtccaagctaccctgtggtcttccatggccattccttgtcccacacccacccgaccataccttcccccctctgccacagcttagcatgaatcttctttattgtcctgatttgtcttctttgttggtttttatttgcggggaggggcagctgagccacaggggtcagaaattctgccctttggctccaccacatggcattctggttttggtttctgtgtagttttgggtctttctatgctgg

SEQ ID NO: 3799 - DNA, 746 bp, Macaca Fascicularis
  misc_feature (1)...(746): n = A,T,C or G
ctagacttgatttttatagtggtgtatggcaacagtgctgaaactaatcataagtgaacatcagacgtactgaatttaagaaatatgcaacaaaataactggcctgcactattgaaaaataacaaggttaagaaagtnnnnnnnnnnnnnnnnnnnnnctagattgaatgatgttagcagcacttaatccaattnnnnnnnnnnnntagattagggaaaaatatatatatataaatgctatcactaagacacttggaaaatttgaatgagttcaaatttgaatgagttgaatcatataatattttatcaaaacaaaattttctgannnnnnnnnnnnnnnnnnnnttagacaacatacaatgaagtatttagaggtaatggggcattatgtctcaaaattgctttaaaatggttccaaaataatacatataaatatatatatgtacatatgagagggagaaagaaaaagtaaatggggcaaaataaacaatttctgatcttgagtaaactgtatacagaagttctttgtactaatcttgaaatttttctgtaaatgtgaaattatagcaaaataaaaagttaaaacaataaaattataagattcatttttttaatggaggaaaagggagtttggagagcatttcaaactcatagaaacaaagttttttttctgtgggaaatcacttgataatgtttttagtagctataaatgtataactataaaatctattactgtgcatttgcag

SEQ ID NO: 3800 - DNA, 102 bp, Macaca Fascicularis
agacctttgagagatcaacagcatcactgggtaggtcctgagtccacggatgatacgtgagggtcacatgggggttgctaaaagtccatagtcctagcccca

SEQ ID NO: 3801 - DNA, 1972 bp, Macaca Fascicularis
aattgagtttcgttccagcttctcttagaagctcttcccttctcccagaagggaggcaacactgtccgctcgcctgactaccagttaaggacccatcgcgcttggaaagccagattaaaaatcaagaaatataaaccagatgtagcagtttcttgacatggagaaccaagcccataatacaatgggaacttctccttgtgaagctgagcttcaggaattaatggaacaaattgacatcatggtaagcaacaaaaaaatggattgggaaagaaagatgcgggctttggagacacgattagatcttcgggatcaagaattggcaaatgcacaaacttgtttggatcagaaaggtcaagaggtagggttgcttcgacagaaattggacagtctggaaaaatgtaatttagcaatgactcagaattatgaaggacaactacaaagcctaaaggctcaattttccaaactaacaaatagctttgaaaaactgagattacatcagatgaaacaaaacaaagttccacgaaaagaattaccacaccttaaagaagaattaccctttgaactgagcaatttgaaccagaaattagaggaatttagagcgaagtcaagagaatgggacaagcaagagatactatatcagactcatctgatttctttagatgctcaacaaaaattattatctgagaagtgtaatcagtttcagaaacaggcacaaagttaccaaactcaactaaatggtaaaaaacagtgcttagaagacagcagctctgaaattcctcgtttgatatgtgacccagatcccaattgtgaaatcggtgaaagagatgagttcattattgaaaaactaaaatcagctgtaagtgagatagcactaagcaggaataaattacaagatgaaaatcagaagctcttgcaagaactgaaaatgtaccaaagacagtgccaggccatggaagcaggtctctcagaggtaaaaagtgagttacagtcacgtgatgatctcttgagaattatagaaatggaacgattgcaattacacagagaattattaaaaataggagagtgccagaatgctcaaggaaataaaaaaagacttgaatcatctcatttgccttctattaaagaaccagaaaggaaaagaaaagagctgttttcagtgatgcaagatcaaccaaatcatgaaaaagaattgaacaagataagaagccaactccaacaggaggaagagtaccataactctgagcaggaaagaatgaggaatgaaatctctgacctaacagaagagcttcatcagaaggagatcactatagcaactgtcacgaagaaagctgcccttctggaaaaacagttaaaaatggaattagaaataaaagaaaaaatgttagcaaaagaacaggtctcagatatgaaatataaagctgtcagaactgaaaacacacatctaaaaggaatgatgggagatttagaccctggacgatacatgagtatggacttcactaacagggaacattcaaggcatacatctattaataaactggaatatgagaatgaaaggctccgaaatgatcttgcaaaacttcgtgtcaatggaaaatcaacacggactaatcaaaacacctatgaagaaacaggaagatatgcctatcaaagccaaataaaagtggaaaaaaatgaagagagacttagtcatgattgtgagccaaatagaagtacgtctcccttgccacctttgacatttcaaaccaaagaaatgacaagtcctttggttagtgatgatgatgtattcccactgtctcccccagatatgtccttcccagcatctttggctgcacagcatttccttctggaagaagagaaacgagcaaaagaacttgaaaaacttctaaatacacatattgatgaactgcaaagacacacagaatttactcttaataaatactccaagctaaaacaaaaaaaaaaaaaaaaaaaa

SEQ ID NO: 3802 - DNA, 736 bp, Macaca Fascicularis
  misc_feature (1)...(736): n = A,T,C or G
tnnnnnnnnnnnnnnnnnnnnnnnnnnnnnnnnnnnnnnnnnnnggaacctnnnagtcnnngcactatattttaccgaatgtaagctatcnnnnaaaagtgtattgttaattaccattaaaggtgaaaaatcggctgccaattaaattgtgccatatcaaggcagattatcttagggtagatgaagtaatgactaaaattctgatggaaacccnnnnnnnnnnnnnnnnnnnnnnnnnnnntggtaaagagggcctcctnnnnnnnnnnnnnnnnnnnnnnnnnnnnnnnnnnnnnnnnnnnnnnnnnnnnnnnnnnnnnnnnnnnnnnnnntatagcaagaaagtctaacctattccggtgttctctnnnnnnnnnnnnnngccgttatatagacttaaacagtgtttcacctgtcggctgaagctggggtgagtttatgactgttcatgagggatgacagagagcaagcctttcactccctggcggaggcatcatcacttcatcttaatgttacctagcagttaaatactcctaatattttgnnnnnnnnnnnnnnnnnnnnnnnnnnnnnnnnnnntacatgatgaatttgatctgtgatgcctcttagcattgcgtgcgctgtgtggtttttctgaggggatccataggaaagttaagggcagggttttagatgttaataatgggcagtgaggtaacgtaagttatggggttcaattttttttccctttgct

SEQ ID NO: 3803 - DNA, 565 bp, Macaca Fascicularis
ccaacatagtgaaaccccgtccccacttaaaaaaaaaaaaaaaagccgggtgtgatggtgggcacctgtgatcccagatacgcgggagggtgaggcaggagaatcttgaacccaggaggcagaggttccagtgagccaagattgcgtcagcctgggtgacagggtgagactctgtctcaaaaaaaaaaaaaaaagtccacatcctcatgaaccctcagactctgaagctgggtgtcggcttttttagccagcttttgtgggaattgcctttgacctattaaaggagggaagtgggtaatggagtcccagccactcaagagactggatatcccccaagaatggcttgagtttccagctatggacccttggaagatgaatctaatccttctcactggtttttctttgcaaattcatttgcttttattttcctaataactataaactatattttccatgttctcagggcccctgggtagacagacagcttgatttcagagcatacgtaggccaagaaaccatggcattgagtgtgttgagtccagacaaatgttatttatatacacat

SEQ ID NO: 3804 - DNA, 175 bp, Macaca Fascicularis
tgttcaccattgtatttaagtatcttttattttttaatttcaacaataaaaaggtcaggatgaagttttttggagggtgtgttgtgtttattggcacactcaccttttatgttccatagcagctgggatatgcaatgtttatatggctaatatcacacaccaatttaatttatag

SEQ ID NO: 3805 - DNA, 672 bp, Macaca Fascicularis
  misc_feature (1)...(672): n = A,T,C or G
gaaagatgcatcaatcaacatagaaaatatgcagtttatacacaatggcacctatannngtgatgtcaaaaaccctcctgacatcgttgtccagcctggacacattaggctctatgtcgtnnnnnnnnnnnnnnnnnntgtgtttccagtttgggtagtggtgggcatagttactgctgtggtcctaggtctcactctgctcatcagcatgattctggctgtcctctatagaaggaaaaactctaaacgggattacactggaatcaggcagtctcctttggaggtgttctaacatgggcaagcagaaatcagtggnnnnnnnnnnnnnnnnnnnnnnnnnnnnnnnnnnnnnncagtttccttcttaggtttggtgagatgagttgctcagcagtttgtgctctgtgtttcaatatatgcactatgcaattagtattcttagtcttaagacttaagacttagtcttaagtcacttacccaatttaagagtttaatttcaatttcttggtaataaactcacaaggtggttctttccagttgggaaatataaaaccctaattaagaagaagctgtgagctggaagtagtggcatgcgcctgtagtcccagctacttaggctgaggcgggaggattgcttgagccnnnngtgtttgagtctagcctaggcaacag

SEQ ID NO: 3806 - DNA, 772 bp, Macaca Fascicularis
  misc_feature (1)...(772): n = A,T,C or G
ggcgtgagcctcnncgncggccggtctggnnnnnngccgcgacgtnnnngctcttgcgctgctgcccaagctggtcttgaactcctggcctccagtgaccctccgacctcagcctggagctgctgggattccagctgtgagtctcagcgtctggccctgtgaacaactttaggcccccaaatttgacaacttaaatatgnnnnnnnnnnnnnnnnnnnnnnnngagtnnnnnnnnnnnnnnnnnnntnnnnnnnnnnnnnnnnnnnnnnnnnnnagcaattctcctgcctcagcctcctgactatctgagaccacagactcannnnnnnnnnnnnnnnnnnnnnnnnnnnnnnnnnnnnnnnnnnnnnnnnnnnnnnnnnnnnnnnnnnnnnnnnnnnnnnnnnnnnnnnnnnnnnnnnnnnnnnnnnnnnnnnnnnnnnnnnnnnnnnnnnnnnnnnnnntgtgcctggctggacttgtatannnnnnnnnnnnnnnnnnnnnnnnnnnnnnnnnnnnnnnnnnnnnnnnnnnnnnnnnnnnnnnnnnnnngctattaggtatttacaaatttatgagcttcctatggaattgatcttattactttgaaatgtgtatctttatgtcttgtaattctactttagatctactttgtctgatagtaatatagccatataaattttcccttggttaatatttgcatgatctattttcatcctttcacttttagaatatgtctgtctatataaaatgtttcttttgtaaataaaat

SEQ ID NO: 3807 - DNA, 255 bp, Macaca Fascicularis
gcattcatgatccccggaggcgctgttatcccaaagctttgaagcaagcccgtgtgtcctcccacacgcggctatagcggggccgcccaagcctctttctccacctaccgtgccagcccgccggggaggatcctccggggtttaaactagcaggtcccgagggactgcgtttttgaattggatacaatttcctcatctttttttttttttttttttttggagacagagtacatcggtctgttgcccaggattgca

SEQ ID NO: 3808 - DNA, 1929 bp, Macaca Fascicularis
acactcacttccatgtgcctcctccaaacacggagctgcctcctggtgcagcctgaggcattttctcctcagtctgtccagaaaagtttctgggtcagattcagtttttagaagcagaacccacagaaccctcggctccgtacacacgcggcgcccaccccaaggaggcggcacagcctggcgccagccgcagggctcggcagagagaggggaattaaacagccgctggctgggaaaggacatttcaagggcgtaccacgcggccaagtcaacgaaaaaccaaattgcaagtgggaatgtgcatcagaaccagctgggatccagcaggtgttgccagggtggggtgatgggaggtggcgttcgaggcctggttgggctccggtttgtccttcaggtgcgtgaggccgcctctgccatggctctaggcacgtccctgctggtctgggctccggcataatccctcgtactgcagacacagtatcccccacccccgcaggaagtgctgcatctgcctgcctgggccgtggtgcccctgggaactcggacatcgcaggtgcggaggccgtgctcggggccaggctctgagaggtgacattgcctcacctgggtctagctccggccaccgaggatgatggaacgacctgggtgtcttccgggagccgtttgattgtctctggagaatcagccgaggctgatgccgccttggagaaaaacaggggaaatgagactccgcaccttctgccaagactttaattctcttccaagcttcagaactgaagtaattttagaagtcattgttcaacagctagctctgtttttccacggcttaaaaatgtcctaaatggtcgtcagagtcagggtgctaaaataacaacgcaaaccgggaggcccggaatgcagacagaaacagaggacccagcctgaaccaagcactggctgcagaggctcatggcagcgctgaagggaggacagtaacctcctgcctgaggccaccagggctcacatctgagctccactggctgaccagggctccagctgggcttgccaggcagtggcccttgggaaccagggacatccaggtagccatggccttgctctcagccatgcatgccactggccctcgacaggctttccttaggtcggcattttaaacagagaccccagagtgggttctggtgaagacgctctgttctctgcactgtcctctaactgtagggatgctgggtctgcagcatccatgcgctgggcggctctggtttgggcaggggtggatcctggttgtgcattcgtggacatcagcttctctagggtttgggatggaggctggtttatctcaaaccaccaacgcctcactgggacctcaggcaaagcagaggctagggtcagctttcccttgctgccccgtgcaggctgcggacactccaggaggtgctccgttttcccacccagcagtcaccatcatggagacagaggcctgaggctcagtcttttttccctgcttctcttcctcttgtgggaattactgcgaacgaaaccacagccgcctgggccttgccaacagcagatgctcagtggcagagccaggcggccctttgctcctcaaagccttgtcctgggtcaggcccgggaaggaaaggacgaggctgcgactgctgtccccagggcagccgtgcctgggcagcccccggacagagcctgtctcagccctcagacttcatagggcaagatcacagccgtctcagctggtttcagtgccccagaggcccctcccaggcccctccctgacctctccagggatcttgtggggacccacaggccatacgacattccgagggcctggaacggtgagttccctgacacttatctgttattttaagtaaaataatacatgctcaccaaaaaaaaaaaaaaaaaaaaaaaaaaaaaaaa

SEQ ID NO: 3809 - DNA, 723 bp, Macaca Fascicularis
  misc_feature (1)...(723): n = A,T,C or G
aggctattaggacgaggaaattcccannnaataaattttggtcagacaggtnnnnnnnnnnnnnnnnnnnnnnnnnnataagatgttatccatgactatgcatgcccaaaaattttaattttaacaccatcctgtgatctcatcctgcctccacttgctttgtgatattctgttactttgtgaagtatgtaatctcggtgtcatgatgacaatggtggttttgttgaaaagaaaagggggaaatgtggggaaaagaaagagatcagcctgttactgtgtctatatagaaagaagtagacataagagactccattttgttctgtatttgagatgctgttggtctgtgaccctacccccaaccttgtccttgcaagagacatgtgctgtggtaactcaaggtttaatggattttgggcgtgcagggtgtgactttgttcctagaaaagctaggtattgtccaaggtttatccccatgtgataggatgaaacaacgttgctaaaaggtttatctcaaggcacgggcattttcctttaaacttattcatgtcacagagatccttgttcatatgtcttactgccaatttcctctcctaaaaatgatcatattgtcctgccactcccctatctttaagatggtaaagataattatcaataaatactaagggaactcagagaccggtgccggcgtgggtcctctgtaagctgagcgccggtcccctgggc

SEQ ID NO: 3810 - DNA, 728 bp, Macaca Fascicularis
aaaatgacaacctgtaattataaagatgttttttgaatgtgtagtatcctagacaataaaagttcttgtgaaacttaacaatgaatgaaaaccaactaatagcatgcaagatcatagatcctgcattaaatttttatttgtgaaaatttgaaaattatgagctttaacttacaaagtttgccttcttaggtctaaagtcttttaaaggattatttgcatttatgtaaaactcaaaatgaagttatatatgagtgcaaagaaattaacttctgctcaaatatgtgttgataccctacagtaagttgaattaaatttttatcccaactgtttgattttgttatttcatggattagccttatgttaagtgaaataatagttatgttgttaccacccctaagagtgactctcatatattatggatgacccaggactgtcttaaaggtctagttttaaaaactgcctagtttgtaagtatttgaatccagtttcttttctaaattttaataatttgactcaaaatttttgctacagggtcaacttttaaattgtatacttcctctgaggcacactgggcatttggagaatggttcttcactggtgttgagagccaggtttactattggttgcaccatctgttatcaggcatgcagaaacatttttcttctggagaaacagaggagaaagtgttgttacagtgtacatgttttgtctgtgtcattttttaaggg

SEQ ID NO: 3811 - DNA, 748 bp, Macaca Fascicularis
  misc_feature (1)...(748): n = A,T,C or G
cacagtggtgcagaggtcagnnnnnnnnnnnnnnnnnnnaggggcactgttagnnngatgactgccggcctgggaaacaaacagaggagtcagccagcattcacacttgtctgaccaagcaggcgctggggagaggtggaccccgcagcagcnnnnnnnnnnnnnnnnnnnnnnnnnnnnnnnnnngaagcgtctccttccccactcccactgggccttgcctacagaagaggcaatggctcagatcagaccccacatccctgcagttgcccccccagcccgtgaatgaggnnnnnnnnnnnnnnngtgtccacctacacccannnnnnnnnnnagctcctccaaggggtcagactactggccaccacaaaggctccaagggcccagttcaaaggcccaggacagctcaaccctgtgctagctgagtccacctgcacccagaccagcccctagccaagactccactcctgggctcaaggccnnnnnnnnnnctagccagcccactcctatggatagagannnnnnnnnnnnnnnnnnnnnnnnnnnnnnnncacccaagggtcagaaacagcctctgcaggacacnnnnnnnnnnnnnnngggaccacctccacccagggccctgccccagacgcgcggaggccctgacacaagggaggannnnnnnnnnnnnnnnnnnnnnnnnnnnnnnnnnnnnnaaagttcctttgctgctttaatttttaaattttcttacaaaaatttagat

SEQ ID NO: 3812 - DNA, 1955 bp, Macaca Fascicularis
aattagttttgaacttaagagaaatcttcaaatctatcaaggaagaatgcttgtactgtctggatgaagaaaaaacactgatcataacatatcctgatatattttgaagatcatggatgaccatatgtactacatacactggcaaaatttaagtgacaaacagaatgaagtaaagctgtctgtggagtggagaagaaatttgcataagaattttaatagatgatttaaaatagtttaatttaaatgtgaactttaattacaaaataatatgagataaagtttgtcttacaaaatatttttatatctatttccacctatttagaattattgcacttctaacaaggggctaaaacggggcaagcttttattgagcaaataatgttaacatttttcatagagcaggactaggaaacacatctcccagttctctgtcaccaagaccaatcaagctctcgcctgaagcctttcctgaagttctttcctgagtctagactatgaattaccctcttctccttggccatctgcatttatacggaatattctactcttgccttagagcatatcctttgtcaaagtttcccttaaaaactcatgttttttttctgtaagttccaatttcacattgtatttatcacactcataacttctccatatctagtagaatattttctaacattatgtttacgttactttcctgtaaatgaagactttgaatgtaggatggcgtttttattaatctgtttatttgtaaagccaaaacttagcccaactaattttttttctagtttacacaatgctgtgaagatagtgtattaaaatgtcaaaagttacaggtgtaacttttgtaaagttagggtagataggatttgaccatagcgttgtgatctggcctaactcctttatatttatcttaaattgaaaagtagagtgatgcagtgtgaagcttatagtttccaagctgtttagtagcagagtagcctccaggactttaatataactctatgattaaagaaaaaggtcgagggttaagcaagggcgaggtaagttaaacaatgcatcagcaggagatatgtcaggagaaaagcgttgtatttatttctgaattacgtatttggaaatttaaatgtttagcagaaaaatcaaatttgataattaggttctaaagaaactggatatatgaggatgtgtatgtgtgtgtatttacgtgtgtagtttggggagataaattgaagtaaaacataacactaaaatgaagctactactatttactgggaagtggacaaatagtataataaatatctggtaattggaaacgccgtgcaagagctcaatttcaaacttggctttctaggagcttacagtttgaaaactgtgaaggaatagattttcaaattgaacatttatcaatttggaatcatatctaaagagaatgtatctaacatacttgtttcacaaagaaaactgaaggtcagaggaaaaataaagtactttttaaaaactccatggctattttctagtgaagccaggagttgaataattgttgccttgcacttcacaacctacagaacaagaggtacacagtaggtcgtcgtaaaaattggcatgtatgattttgaaatgaactttgtctctaaagaattttcttaggcgatacaaatgcagttctgatcactggattggtctgaagatggcaaaaaatcgaacaggacaatgggtagatggagctatatttaccaaatcgtttggcatgagagggagtgaaggatgtgcctacctcagtgatgatggtgcagcaacagctagatgttacacagaaaggaaatggatttgcaggaaaaaaatacactaagttaatgtctctgataatgtgaagaacagaaaataacattattaagtgtaaaccaaagcatttttttaattaaacaaaggtgccagtttaaaaaaaaaaaaaaaaa

SEQ ID NO: 3813 - DNA, 663 bp, Macaca Fascicularis
  misc_feature (1)...(663): n = A,T,C or G
ttctttttttttttgagacagtctcagtnnntccnnnnnnnnnnnnnnnnnnnnnnnnnnnnnnnnnnnnnnnnnnnnnnnnnnnnnnnnnnnnnnnnnnnnnnnnnnnnnnnnnnnnnnnnnnnnnnnnnnnnnnnnnnnnnnnnnnnnnnnnnnnnnnnnnnnnnnnnnnnnnnnnnnnnnnnnnnnnnnnnnnnnnnnnnnnnnnnnnnnnnctgacnnnnnnnnnnnnnnnnnnnnnnncctcccaaagtactgagattacaggcgtgagccaccgtgcctggcccaaaatgtctctttctacgtgcacttgagtaggtnnnnnnnnnnnnnnngcccatatatannnnnnnnnnnnnnttccaaatgtctccgatcagagagtcacaatcgagagcagcaaatgtggtttcataaagtgggaagaaagtggcaatttaaaataactttttgggagactgaattgagtaataataaaacttcagtctctcacacacannnnnnnnnnnnnnnnnnnnnnnnnnnnnnnncactaaatgaggaaagaggaaggcattttctgcattcttgcctagttttctttataagcgccatgnnnnnnnnnnnnnnnnnnnnnnnnnntgcactatgtaatgcttttaatactttttaattgtgctt

SEQ ID NO: 3814 - DNA, 460 bp, Macaca Fascicularis
gtgaaggaccgcgaggccttccagaggctcaacttcctgtaccaggccgcccattgtgtccttgcccaggaccccgagaaccaggcgctagcgaggttttactgccacactgagaggaccatcgcgaagcggctcgtcctccggcgggacccctcggtgaagaggactctctgtcgaggctgctcttccctcctcgtcccgggcctcacctgcacccagcgccagagacgctgcaggggacagcgctggacagtacagacctgcctaacatgccagcgcagccaacgcttcctcaatgatcccgggcatttactctggggagaccggcctgaggcccagctcgggaaccaagcagattccaaaccgctacagcccttgccaaacacagcacactccatttcagaccaccttcctgaggagaaaatgcagattcagggttccagtgaccagtgatggattc

SEQ ID NO: 3815 - DNA, 722 bp, Macaca Fascicularis
  misc_feature (1)...(722): n = A,T,C or G
tgcnnnnnnnnnnnnnnntcagcagggtggtctgagtccagactttgatgtgccatgaataccgtgtgaaggcatttgagccnnnnnnnnnnnnnnnnngatgctgtgttgggggannnnnnnnnnnnnnnnnnnnnattggttactgatcagggccaggtggcggggcnnnnnnnnnnnnnnnnnnnnnnnnnnnnnnnnnnnnnnnnnnnnngggtgggaattaagcgcagctctgcctgcgggtggtggcacgcctccagtcatggccagccgtggctaacctggccttttatctnnnnnnnnnnnnnnnnnnnnnnnnnnnnnnncaaatgggannnnnnnnnnnnnnnnnnnnnnnnnnnnnnnnnnnnnnnnnnnnnnnnnnnnnnnnnnnnnnnnnnnnnnnnnnnnnnnnnnnnnnnnnnnnnnnnnnnnnnnaaggatactgctagaaacggcccaggcctcacttgctcccgaggcccaaccaggaaacgctctgggaaacccctcccggttattcgtgttggttnnnnnnnnnnnngcaannnnnnnnnnnnnnncaagttgcctgatgtgtatggtgtattccagtttaaagtgnnnnnnnnnnnnnnnnnnnnnacacctgtactcttcnactcnnnnaagcataggtgacagcccgtttcngctanntgtgcctgcncggctctgnnnggccagtgtgctactctgtc

SEQ ID NO: 3816 - DNA, 742 bp, Macaca Fascicularis
  misc_feature (1)...(742): n = A,T,C or G
catgctgtgagccgtcaggacnnntgtcctggtgacagctcnccggtgggaaaagtgagtgtgctgggcttgctacatgaagagcttcacggaccaggccctgtgggagctctcagcagccttgcgcagactgaggtgaccctgggcggtacaaagggccaggcctcggcccacatcctgtgtcggaggccccgacagcgcccaactgaccagactcagtggttctccatacttccagacttcagcctggatctccaagagggaccctctgtagagtcccagccctgctccgatcctcatatacccccggtggatcccacaactcatttgacctttaaccttcacctgtccaagaaagagagagaagccagagatagcctgatcctgcccttccagttcagctctgaaaaacagcaggctctcctgcggcataggccaggccaggctaccagccacatattatatgagccagatgcttatgatgacctggaccaagaagacccagatgacgacctagatatttgaatggtcagatttgattagattgtaattggagggggcacaggaagactttgggcccagaaccatctttatcttgtttgtgttagccttaccctgtccctacccnnnnnnnnnnncnncttgtctgtggatccctgctctgtgagctcaggaagcagcgtctcatcaggacagaatttattattaatacatgggataatgtgagagtagaacatccctg

SEQ ID NO: 3817 - DNA, 1968 bp, Macaca Fascicularis
ttttgctagagactagtgatagagaagtaaatgaaactcaatctctgccttgaggacctcagttaccagttaagaattttagttgcaaaatacagaatcagctctagctggtttaagcaaagaggttatttattaaagcagctccagcagaggcagaattggcctggaagcaaagcagccagtccaggcaatgcactgccccagtggagatctttcactcatatcagtgccctggcaccagtgctggatgctgagtacaagacactactttaacctcctctgctgttgtctcctgaagttgggtgtctgcaactgcctttaccaaaatggcttccagaagatggtggctgcttcacctctctccctgctgattggcagagcccggatcacatgtctacatcttagctacaagggcagctgggaaagcaagtttctgccctctgccttaaagatgtgcagaatcagaagacgggagcttctgcaaatagaatgtggaaaggtaatgggtagccaaaaagcacagcaggtatccattctaagctcccagtctaatggaataaacagacatatgttcagaaacttcacaacatagtgaaaaacgaagctatactcaaggtatgcttatggcataataatatagggaaacttcccctttgcctctgaaggttcacagcaaatcagctgacaaaggacagattaataggggaaaaagaatacaagtttatttcaccatagttttatgtgccacaggagccttcagaatgaagacccaaagattcaggggaaagtgtccattttcatgcttaggtttaacaaagtttggactgccatgtggaaatatgattggacaaaaagcgtatgatctagcatgagttggctgagtggggaaacctagcaagtcctatctgtggagcttctgcttggcctgtctgtgcagtgttctttcctcctggggatggggcaggaccctctctagaatggaagtcttgtgatctacagtcaaacaagataggtcagatcatttctttatggacggtttttacacaaaggttggggagaaggtgggagttagggtaatatttttaggttttatggctggctttggagaataggggttctggtttctctgaaccgccttggggaaaaggcattcgagtttctttgggtggccttgggctggtggggagaatgagggagtcagagacaagagggcaggagaaggttggagagagctgcttccaatgccttcattttgggttattttctgagccccaacagtgaagaccagaaagggagctgttaacagactggcgtggtcagggaaggcttcctggaggaggttatggatgactgagtacattctgatggatgaagcaagagaggagaagcttagagttaaataagaacaaggaccctcactgtctgcctcacttaaggtgcctccacagtgagtatgccagattagaaaaatggaaactgatgaagccagaagaaaagacagattggagagaacccatgtgagaactccctggaaagtgctcagccctccccacatagggctatccacatagttgcctttccttgtatccttctccctcccaactctgttttcttcagatgtcctaacaggttagggcttccagtaggaaatatacagtgccttttcagaggggctttttggaaatacaaagcctgactccaaatacctggctcttttttcttttctttttttttttttttttttttagaaaaagtattaggagactagtaaggaaagcgaaggataaagtgaaacgtacaagccgctctgtaactagcatgtatatatttatgggctatctttaaaaaagaaaaccaacctcaaaggcaattaaattatgcctaatgctttgcgatttttttctgccttccctatcttagatttcttaagaaattagtcttagctgtctcaaaaaaaaaaaaaaaaaa

SEQ ID NO: 3818 - DNA, 2092 bp, Macaca Fascicularis
  misc_feature (1)...(2092): n = A,T,C or G
cagaaaatgaggacttgcccaaggcggtcagagaaaggttctctgaggagatggcattgaagccaagacccgaaggatgaggcctctgccgagcagagaagaagggagctggctggagtatggtggtcaaggcggagttcaggaagaggtcactggctgcccctgcaggtgtggaagcagggagcccaagtaggaggctgtggctgtccaggttagggggggtagtgaagtgggagcgaattcaaggtgcattttggagattcaaaagggctctcagatgggttgaatttggaaagtagaaaggagtggctcagagctgactccatcatcagtggcttgagtgactgggtggtggggacagagccattaagagtgaatgttgcagcaggagagggtttcggggagtagggagatacataaatgtgtcttggtcatgcggacatgactgtactctctgctgcgtgggtgtttgtggtaagtggcgcccgtttatctgggtcttcccaggactgttggatctcagttttgctgctgaacaaagagcaccttcacaggcacactgtttcagggccaccagccatcccttcgggtgaggtcagcctgcacgtgggttcctcctgtgttacaatgactgccccagacattggcagaggaggcaaggctgagatagtgtgaggtgcccatataaccaaggtctggcagcagagaaggcaggagccaggtgtgcaaccaggtcagaattgccaaaaggttggaaagtaggagatccaaagcacaccttcacccaccagccgctgggaaagcacccggcactgagggcatgctgtcagtcagccagtgtctggcaccagctacgaggaaacggctccaataaaagccaaaggcactgtacgtgtctgtggtcctggtgccctggcagaagcccattctgagtgaatccagccagggatttaaggttgatgaggacccagcagaatggcagcagttgctctatttctttctgacaaatcttccagctcactcattgaatccggacttaagcaagggattccatcactcgtgcttactctgaatgatgtggctgcccatagccctgtgtcgaaagagtctagagccaagtcagatttggtgggcaagagcccttctggcatatggtaggcacttgcccagtagaggcattgattatttggaccccagtatggtctcctaggaacttagttagataagatatggacacttggttgtagtgggttatagatggctcagtagagatacaggaagacaggaaagagtggaggaggtggtattccaggctggttcttgaaagtaagtttaggggtaccttataagccaggtgagatgtgaaggggccacatctcagggtacannnnnnnnnnnnnnnnnnnnnnnnnnnnnnnnnnnnnnnnnnnnnnnnnnnnnnnnnnnnnnnnnnnnnnnnnnnnnnnnnnnnnnnnnnnnnnnnaaaaaaaaaaaaaaaaaaaaggctccctaggacattcttttatcttacccatattctaggagcgcatcacttattttgaagtccttctattctcagacttttcccagtctctttcctaagagaacgctttgtcccattacaagtcaattgtttgacagtggagttggaaacgtgaataagtatcacctggagtccttcaaatagatgtgtaactttataaagtccgtccctgccccatccattctgagaagcccaccctctccccagggtgagtgtttttgttttgaaaagacttccagcagggcacgannnnnnnnnnnnnnnnnnnnnnnnnnnnnnnnnnnnnnnnnnnnnnnnnnnnnnnnnnnnnnnnnnntgagaacagcttgggcactaaaatgagaccctggtctccacaaaaaatagaaaaaaaatagccggacgtgatggcacagtcttatagtcccagctgctcgagaggcagaggcaggaggatcgcttgagcctgcgaggttgaggctacagtgagctatgatcctgcactgtaacctgggcgacagagcaagaccctgtctcaaaaaaaaaaaaaaaaaaaaaaaaaaaaaaaaa

SEQ ID NO: 3819 - DNA, 741 bp, Macaca Fascicularis
cagtattttatagttactgcttctacgccccattggctcagacataatttattatttgtttacatgtttcacttactctgcttaggtggaagtccagtgatgcattattactgagagcatctgtgtgtgtgtgtgtgtgtgtgtgtgtgtgtgattgaaagactcaaggagatctgacaggttctgaacctgcaacttttcagagcacaagtggcctcctcaggtctacaagagcctccctgggctcttggctcagatcaaatgtgttctatgtccctgtagttagttccttctacttctctgaggagcaagacaattccaggaagacacaggctccccgggactgtgactttctattcactcctttgacttgtcttcctgtgtaatgatcaaagtcctcccatatctggggggaacgtcacagtttacacagcactttcttcatgacaatagcataaagaaaataatacctgccctttatctccacatgagacacagagaggtcaaggacacgtgcaagttcaaagagcaagagtggaatccggctgggaccagcaccccatgatggaaggggcaggatcgtggctggcccagtcacttacagctctttgacctggggcaggtcaagaaaagctcaggcccttcacctgctaaaagatggaagtgatagtgcttactgcacagggctgttttagaaataaaatagatgtctaaaaatgctcagtaaaatgactggcatgt

SEQ ID NO: 3820 - DNA, 540 bp, Macaca Fascicularis
  misc_feature (1)...(540): n = A,T,C or G
tgttgtgaagagggagacgnnntcgccatgttcctagagcatttttgacctcgtgactacgaatcttttctcatctttccatatgtagataaatcttggtaaagataagccacctactaattttacaacccaaaaatgttatgcnnnnnnnnnnnnnnnnnnnnnnnnnnnnatataagcatctgagaaggcagcaccacacactccctatacctgtgggtttaacctaagaacctgatggttgcagctggaaccatctgctagcagggatggtaattgaagttttattatttcctggataaaggcaatcgactaaagcaaaaggtcgcctggattcccgcgtgagtttaggatgaactttgtaaaacatgcagtaaagggcactgttgagcttcttatgggaagacaaggggccataaatcctgacagcttatgaatatcatggttaaatataggggggtcggctgggnnnnnnnnnnnnnnnnnnnnnnnnnnnnnctttgggaggccaaggtgggcctcccaaaggttaggagattg

SEQ ID NO: 3821 - DNA, 759 bp, Macaca Fascicularis
  misc_feature (1)...(759): n = A,T,C or G
aaataagtatnnntgcaactngtaaatatattattcagacattggatgttgtatttttatgtattttttaaaatattaataaaattgaaaaaaagaaaattctaggttaattcactctttggatgacaatagctctcagctgtcctttttacaggaggttgcatcctgcagccttgcctgtgttaaagggagtctgtctcagtccgtcaaacagtatagaactataaatgggcatctggatcattaaagtatgtccttgtttagaaactttggcagtcctagtatttaaactgttttgaggatcaaatttttggttgcccttaagatactttgtcacagtttttatgtttgctatactgccgaatgaatttatatctcccaaagttgagatgcaacaactaagtaaagcaactatgtatgctttgtctgtgaattgttccacagactgatacattttgtaaataattcttccaaaatcatgtatttaaagcagttttgcatatacattatgtaaaaaggtgattttttaaaagcaatttttaaattcatgtttgtacattgaaaggggttttttttttttaaacctccttttctgtgtttaatatgctgtagaataataacctagatgctctagactgtatatcaggatctgatttacaagaagaagtcagagctaaacactagtgatggcatagcattactgaaatcattgtttcttaatttcattttaccacattgtgaacttgtgattcagattcc

SEQ ID NO: 3822 - DNA, 545 bp, Macaca Fascicularis
  misc_feature (1)...(545): n = A,T,C or G
ccaatggccagtatattctaatggacacaaatctcccaatccttatctaggagtatctgttcaccttgccatgtccatcttnnnnnnnnnnctaacttgcacctgcctgtttttctgcatgattggactccaaagactattaccaatgatgagaattgtcctgtgtcagtgtttataaaatggacttgaagcacacacacatgcatacccatattcacatgcacccttacaattctagatcaacccnnnnnnnnnnnnnnnnntacgttcagtttctttgcaaggtctgagnnnnnnnnnnnnnnnnnagtcagcctaatgggtaaaatgcaacctcagtgatgcttaataaggatttaaaatcattcacgtcatttctgtgttctttctcacactctttcctttctattttctcttcctttattttcaaaatgtctgtggaacaagaggatgaattgggggagaacttttgcttcttttggctctttttaggtaatatggagtctatctattgtgatttctgtttcttatggatcataaaatca

SEQ ID NO: 3823 - DNA, 1837 bp, Macaca Fascicularis
agcacggaaacggcccggggctgagctgcagtcagatccggggatggagggagccggagaagaggagtgagaaggccggggaggcaggccctgctgtcctcctgcaggccagcagcctgctggcagtggaggaccaggccacccaggaaaggaaggggtcaggaggtcgggcagggcctcagcaggctcagacaaggccccagaagggagctgcaggcgccctggagtccaggcctcaggcctggctccggttgtccaaagagggcctaggccaggcctctggaggggtctctacgctttggcgaagggcacagctgcgtctttttggcttgaggcctgaggccttgtcgagaagcttctgtgaaagggtgggccggccgggtcaagagaaagaaagtgaataaaccaggaatataagtgggcggggggcccctgagagggggttcacaaagggtgagacatggccaccaggcgtttaaccgacgctttcttgttgttgcggaataattccatccaaaaccggcagctgttagccgagcaagagctggacgagcttgctgatgaccgtatggcacttgtgtcaggcatcagcttagatccagaagcagcaattggtgtgacaaaacggtcacctcctaaatgggtggatggagtggatgaaattcagtatgatgttggccggattaagcagaagatgagagaattggccagccttcatgacaagcatttaaacagacccaccctggatgacagcagtgaagaggaacatgccattgagataactacccaagagatcactcaggcatgaagaatcgagaggaaagatcccagcattttttcgacacatcagtaccactagtggatgatggagacgatcatactctttaccatcggggttttacagatgaccagttagttctggtggagcagaacacactgatggtggaagagcgggaacgagagattcgccagattgtacaatccatttctgacctgaatgaaatattcagggacttaggagcgatgattgtagaacagggtacggtccttgatagaattgactataacgttgaacagtcctgtatcaaaaccgaagatggcttgaaacagcttcacaaggcagaacagtatcaaaagaagaatcggaagatgcttgtgattttaatattatttgtcatcatcattgtgctcattgttgtcctcgttggcgtgaagtctcgataagtggcattgggttttcgtgtgtgccgcacgtgtggatctcccgggtgtgaggggcttggcctgcgccccgccagctgcccacagaggtgcagcctcgaggaatccgagggcgtccgggcagcgaaccttaccatccacggactcctcctcccctagtcctgctcaagcggtccggggaatgggtttttgtttttccttcattgttgagaattgaagaacctttggtactgctgcacaatagagattgagttctgtgatcagttataatatatatattttttttagaaagaaaatgagctgagagtttacaggcactgcagaagctgttcagtgttatatgtgtatatgctatttttttagcagccatgtctgagcagaatgttaaaataatttttggaaaaattttctttaaaccatctggtttttaagaaatttgttaccaaaaattgatgagtagaggcaaagatgcctcttcatctttctctatatattttccagttgaaaacaaactaagaagtcctttaagaatttataatccgcatcccattctcaaaaaaaaaaaaaaaaaaaaaaaaaaaaaaaaaaaaaaaaaaaaaaaaaaaaaaaaaaaaaa

SEQ ID NO: 3824 - DNA, 753 bp, Macaca Fascicularis
  misc_feature (1)...(753): n = A,T,C or G
cagcagctgcagaggggagttggagagctggactggatgactctggaggcccnntccaaacctcaagtgtccgacgctttgattccctgagtttctgacacttcagggtccagaagtcctgggaggggcagaactgggcccccatgccagtgctgctgcaggaggacccacgcactaggggctnnnnnnnnnnnnnnnnnnnnnnnnnnnnnnnnnnnncagtgttgggacgggatagcacaccagctgtcccaggctttnnnnnnnnnnnnnnnnnnnnnnnnnnnnnnnnnnnnnnnnnnnnnggcacaaccagttgacaatgacaggttgactgtgtacccccaaccaaggaactggggcccaaggccagtcctgccccagagacactccaagtccgccaggggcacagaccagttctacagtgactgtccctggacaatgggtgtttattctgagtttcctatggtttacaaagaagattccagcccagccccaccacagaccccagagataggggcccagtccccatgggggcaggagcatagagatgtcttccaggaaggggctcagaagctgcactaggccccgagtccccatgtgtctcctcgaattgatgaggatgctcctgggagggatgcannnnnnnnnnnnnnngtactcagggctgcgaatgtctccgtgcagcccccagagagaggtccacgggctcagaccaggctttnntgtcctgctctgagtatcctgagataa

SEQ ID NO: 3825 - DNA, 703 bp, Macaca Fascicularis
  misc_feature (1)...(703): n = A,T,C or G
ggggaggagccgaagcggacgccgccgggagcgtgcgtcgtgacgtcatcacaagaactcttatatgcgggagcccaggcaccatattgtcttttcgaggtgggagccgactgttgtgagataatgatatgttacctgcatcattgatttaaaaacgacataaagaagcgtggaacaatgaatgaaaatctgtacccgatctctttaggnnnnnnnnnnnnnnnnnnnnnnatgtggctctcgatagcaccttatggacagttgtgtcccaaaggagggatgacaatagctactgaagtcctaaagagcaagcctaactcaagccattggcatacaggcattagacagaaaattagaagttgaaatggtggagtgcaacttnnnnnnnnnnnnnnnntttttctggtgccgatgtttggagaccttttaaaggtatggagagtcgacttgactacaccgtgtggagcaagttttaaagaagcaaaggactcagaattcatgcttnnnnnnnnnnnnnnnnnnnnnngaccacagcaagcaagcatgtannnnnnnnnnnnnnnnnnnngtcttgcctcatccaagctggagtgcagtggccctttgaggcttactacagcctcagacttctgggctcaagtgatcctcagcctcccaatggtctttgtagacannnntgatggagtctcatggcacaagaaga

SEQ ID NO: 3826 - DNA, 735 bp, Macaca Fascicularis
  misc_feature (1)...(735): n = A,T,C or G
caggacctgggcagtagccatggggatgatctagaaggagannnnnnnnnnnnnnnggaccagaagctgcnnnnnnnnnnnnnnnnnggtgattctgccatgctctcccctgatacctcctacctgtcctctagaggaagaatgattaaatggttctgggattccgctgaggagggctacaggacctaccacatggatgagtatgatgagaacaagaaccccagtgtgagtgaagctcccctcccactggcacccgagagggaactnnnnnnnnnnnnnnnnnnnnnngaccaataagnnnnnnnnnnnnnnnnnnttgtgaggttggagttacggtcctctgacctccaagagggcttctgatgtagcttagggaggctccagtgtactgcctggatcaggaaatggtccatttggaatacaggggaccttgatttgtgagggaggaattcaagagccacacgatgttcttctatggattcnnnnnnnnnnnnnnnnnnnnnnnnnnnnnnnnnnnnnnnnnnnnnnnnnnnnnnnnnnnnnnnnnnntttacttataggttgtttattgctgagctagttacttcacttccttgaatcttaaattatctctaaaatgaaataatgacaccaggcatgnnnnnnnnnnnnnnnnnnnnnnnnnnnnnnnnnnnnnnnnnnnnnnnnnnnnnnnnnnnnnnnnnnntgagaccagccnnnccacnnncaagaccc

SEQ ID NO: 3827 - DNA, 2141 bp, Macaca Fascicularis
gatcgaaaagggcggggactctgggcagcagttgcggagtgccgcgggtccacagtgctgcaccgagcagagaggaaggggcgtcccgggatatttggaggataaagggtgatgaccacacctgccggctccggcaggggcttcggctccgtgtcctggtggggcctgtccccggcgctggacctgcaggctgaaagtcctcctgtggacccagattcccaggccgatacggtgcacagcacccccgagctagacgtgctgcttctgggctctgtggatggacggcacctgctgcggacgctgtcccgagcgaagctctggcctcgcaggaggttcaacttctttgctctggagaataatctggaagctgtggcccgacacatgttgatcttcagcttagccctagaggatccagagaagatggggctgcaagagcggagcgagaccttcctggaggtgtgggggaacgcgctgctgcgcccgccggtggccgccttcgtgcgcgcccaggccgacctgctggctcacctggtccccgagcccgaccgcctggaggagcagctgccctggctcagcctccgagccctcaagttccgcgagcgggacgccctggaggccgtgttccgcttctgggcgggcggcgagaaagggccggaggccttccccatgagccgcctctgggactcgcggctgcgccactacctgggctcccgctacgacgcccggcacggtgtcagcgactgggacctgcgcatgaagctgcatgaccgcggggcccaagtcattcacacccaggagttccgacgctggcgggacacaggcgtcgcctttgaactcagggactccagcgcctatcacgtgcccaaccggaccctggcgtcgggtcgcctcctgagctaccgcggggagcgcgtggcagcgcgcgggtactggggggacatcgccacagggcccttcgtggcctttggcatcgaagccgacgacgagagccttctgcggaccagcaacggacagccggtcaagacggccggggagatcacgcaacacaacgtgacagagctgctccgcgaggtggccgcctgggggcgcgcgagagccagccgggggcacccggaggagcagcagcgctcggaggcaagcccggagccagggactccagcctccactccggaatcattcactgtccacttcctgccactcaattctgctgagactctccaccacaagagctgctacaatggccggttccagctcctctatgtggcctgtggggtggtccatcttctcagccccgagcttggggcctgtgtggcacctggagggaacctgattgtggaattagcccggtacctggtggacatgcggcaagagcagctgcagggattcaacacccaggtcggggagcgagctcaggcagcgggatttgctccacagaccggggccaggccctcagagaccttcgcacgtttctgcaagtcccaggactcggctctgggcagcactgacccagctgtggaacccggaactccgtcccttgacgtcctggcccagcctcttgaagccagcagcccagcccctgagggcctgacccagcctctgcagggcgggaccccacactgggagccctgccagctgccctctgagtctccaggttcactctcagaggttctggctcagccccaaggggctttggctctgtccaactgtgagtcacactccaacactggagtctgacccaacccctagataccccttatctccaacttccaaagtcaggttgtaggatgagaacccgctgataccatcctaagctggctgctagagtccccaattttattctaatcattcccactcagtacccgccacccccaccctgggagtgttgatagaatttcaaattatatttctgagattctatttctagaattctagattgttctctcagaattccaaattccacttctgaggccctgaacccagtctaggatcggaccctgagtctcaagcccttgactttggcccccttgttcccaggcaccctgggctggctgggggctggggtgtctcctcaccagggcctggtcagcacccagatggttcaagtaaagcaagttatgtccacctcaaaaaaaaaaaaaaaa

SEQ ID NO: 3828 - DNA, 700 bp, Macaca Fascicularis
  misc_feature (1)...(700): n = A,T,C or G
tatccatactaaaaaagtatcaggaaagtagattatttttgtgctgtgaaacactattcagtggaaagnnnaatggcaacttttccatatcattcataatttaatacctgaaatgcactttaaaatgtttgctttatacccaagtgtttacttgttacccgtaacctaacagtctattgaaaagaatgttttcggatacagattgcaatgttgtttgtattcataggcaaaagtcctcttctctagtataattttttaaatctgagagaattgaaggtacagaannnnnnnnnnnnnnnnnnnnnnnnnnnnnnnnnnnnnnnnnnnnnnnattctttgagtaaatttgggggaaagaaatttcagctacctggttagcttcagtgactactnnnnnnnnnnnnnnnnnnnnnnntacttgtttccatcacaaccacatcctatatacttgcaatatccaaaacatcttctaaaatcactcaataaaaaaattcacttctaaccaactccccctttatacctgctctgtgttagggcgtagtctgtttccacctccnnnnnnnnnnnnnnnnnnnnnnnnnnnnnnnnnnnnnnnnnnnnnnnnnnnttaacccaaatgacttctggaaaattcccagccctggatgtatccaagcctcctacccttcctcaccagttatttcggagaaagatcaccaaa

SEQ ID NO: 3829 - DNA, 1806 bp, Macaca Fascicularis
tgtttaaagacagttttataatccatcctcttaattaggacctgtggatatattgtccctttgaataaaaccaaactagggtaagcattgaattgttgtctaattgggtggattacgggggaatcatcatgacatggaggcatctgctctttaggtctttgatcttagcctctgatctgtgtctagctactccctgtacttttcccccgcaccctgaccatttgataatgacttgggaagatacattatttgatttggctcatctctaggttttgttttggtttggtttagttttcgttttctgtgagacggaatctcacttcagcctgggtgacagagcgagactttgtctcaaaaataaaataatgagaaaaatacataaattttcatcattctttctgcatttgtcacttggtactctatggtaaagacatgctttctcttatactttatttctttatattagcatgaacttatggattattatacttttggttaagttttcattgctgtcattatgtattttgttggtcaaaattatcccatatttgcctgctatgaggcccctggaattagctgctgtcttcttttgatgtccccatcattttctaaagagcttttccaattttataataccacaggctattccaggctcatcttgtgctttgcttgctctgaccctggaatgagggtgttttaccagtgattcctggtttcttttattacagaatagtatttggaaaccatggtgggggaggggagcaaagcatgttattgttattggagtaacattggtttcatgccttctcagtgaccagaactagaaaatgtacatacatatatgtgcacacacatacacatatatacacatttgcatacatttccatacctatcagtatatttattaaaatccacaaatttatcccagtacctctaatttcagtttaacataataagaacctaccgcttccctatttctttatttctaactcttttccattgtggaagttggctactattataaataatatgcttgcttatttgttaattgaggaatatagaaaagtagtgttgaaatttctaacccatacccctgtgaaagaaaatctatttgtgtgaagttcttttcgtcttcatagagtcaatttactatttccaaggtcacatagattatctcagcatttcagtgtggatcatgctaggcatttataatagagttagtttcatttgtggtggtatatcatcttctcatctttaattattatatagtgtgtgaaacatgatcatagttctgaggtcagaaatacatgagaagttatactcagagaatacgtccttcccatcctttctgcctcaatcccgattgctcattcttaccattccattcccattatctcctaggtgtagccaatctcattagtgtctggtatatccctcctgtgtttcattttgcacaactgagcaggtacatagatattttttatacagtcttctatcttcagtaggagagaggttgggttaacttttgtacattctcacaatggagggctatgtagctgtctcagaggatgaagatctctgtgaactattatagcaataattccaaaatatactggtatctgaagaaaaccaatacatgaaaaacaattttaagaaaagattccaactggaagcccctacaacatgtaccgtcacacggttcttttcctaccactgtttttgtccaaaattctgccactgggggattatctttttaggctttcacaccagcccctccaaaaaaaaaaaaaaaaaaaaaaaaaaaaa

SEQ ID NO: 3830 - DNA, 811 bp, Macaca Fascicularis
  misc_feature (1)...(811): n = A,T,C or G
gatttgaatatatagatgtagtattttggntatctaggtgttttatcattatgtaaaggaattnaagtaaaagactttgtagtttttnnnaaatatgcatatagtagagtgtgaaaatacagcaaaaataaaaactaaaggtagaaaagcattttagatatgtcttaatttaggaactgtgccaggtggccctcggaatagatttcaggcagagaccagtgcctggtggtgcctcctcttgtctgccctcatgaagaagcttccctcacgtgatgtagtgccctcgtaggtgtcatgtgcagtaatgggaacaggcagtactgttgagaggagagcggtgtgagagtttttctgtagaagcagaactattagcttgtaccttgaggcttcaagaacgtgtcagatggagaagtccaagtttccatgcttcaggcaacttggctgtgtatagaagcaatccagcgtggtaataaaaagcaaggattgcctgtataatttattataaaataaaagggattttaacaaccaactactcccaacacctcaaaagcttgttgcattttttggtatttgaggtttttatctgaaggttaaagggcaagtgtttggtatcgaagagcagtatgtgttaagaaaagaacaatattggttcccgtagagtgcaaattagaactagagagttttataggattatcattttgagatgtgttaaagtaggttttcactgtaaaaatgtattagtgtttctgcattgccatagggcctggttaaaactttatcttacgtttcaggaagactgtcacacacagta

SEQ ID NO: 3831 - DNA, 747 bp, Macaca Fascicularis
  misc_feature (1)...(747): n = A,T,C or G
tgcaatgaatgtgggaaatcctacagcagcaaatcttacgttactgttcataagagaatccacaatggggagaaaccctacaaatgcagtgactgtgggaaaaccttcagcaattcctcatacctcagaccgcacttgagaannnnnnnnnnnnnnnnnnnntacaaatgtannnnnnnttgtcgtgagttccgcactcagtcaatcttcacaaggcacaagagagttcatacannnnnnnnnnnnnnnnnnnnnnnnnnnngtggaaaggctttcagcacagggtcatctctttctttgcactatagcattcatacagggnnnnnnnnnnnnnnnnnnnnnnnnnnnnnnnnnnnnnnnnnnnnnnnnnnnannnnnnnacagcacgtannnnnnnnnnnnnnnnnnnnnnnnnnnnnnnnnnntgagtgtgggatatccttcaccagtagcttttctcttnnnnnnnnnnnnnnnnnnnnnnnnagagagaaatcctatgagtgcagtgactgtggaaaagcctttaatgttctgtcatctgttaagaaacacagnnnnnnnnnnnnnnnaaaaagaccctatgaatgtaattattgtgggaaattcttcacaagtaacgggtacctttctnnnnnnnnnnnnnnnnnnnnnnggcagatgtgaattcaataactgtgcaaaaagcattcatcgatctttcatgcctcagataacatgaaagaactcttcaccagatgtatgaat

SEQ ID NO: 3832 - DNA, 715 bp, Macaca Fascicularis
  misc_feature (1)...(715): n = A,T,C or G
catcagcacttttaaataacgtgctacgccacactgtcatggannncagatatatagcagcaaacaaaacagccatggtgccttccctcggggagcagtcagtccagtggaggagtcagatatgactcaccatactgatcgaaaactctccacaaattatgagaagaatgctgagggaagaaagaacatagatggactgctgctgagtccaggcttacttgcagagatctatgctggctaggccctgtgctaggcagcggaggacgcggaataaaatcaaatatggtcactgtgtgcaggcagctcactgtatggtaaaggagcagccccatcaacaggttctatgaattccagcctgtgagaattggaaccacaaggtgaattttggaggagaggcacttacactatcaggaagcataatatataaagagtacctacaaatcaataaaaaataaaatagaaaaaaatgagcaaagcatatgaacagaaaattcaatggaaaggaaatagaaatggctctcttaaatgaaagaaaacataccctcactcagagaaatgaaaatttaacccatgtcaagatacttggggtgaaggaagtgttctaaaattacattgtggtgatggttataactctataaatttactaaaacttattgaagtgtacatttaaaacaaatgaactttatagtatgtcagttatatcgcaataaggcta

SEQ ID NO: 3833 - DNA, 768 bp, Macaca Fascicularis
  misc_feature (1)...(768): n = A,T,C or G
ccaacgacaagggccgcctgagcaaggaggagatcgagcgcatggtgcaggaggcagagaagtacaaagcggaggacgaggtgcagcgcgagagggtgtcagccaagaacgccctggagtcgtacgccttcaacatgaagagcgccgtggaggatgaggggctcaagggcaagatcagcgaggccgacaagaagaaggtgctggacaagtgtcaagaggtcatctcgtggctggatgccaacactctggccgagaaggacgagtttgagcacaagaggaaggagctggagcaggtgtgtaaccccatcatcagcggactgtaccagggtgcgggtggtcctgggcctggcggcttcggggctcagggtcccaagggagggtctgggtcaggccccaccattgaggaggtggattagggaccttcgttccttattatgtttgtctttgaggtggactgtttggactcaaggactttgctgctgttttcctatgtcatttctacttcagctctttgctgcttcacttctttgtaaagttgtatcctgatggtaattagctggcttcattatttttgtagtacaaccaatatgttcattataattctttgcatttaatgttgatactgtaagggtgtttcgttccctttaaatgaatcaacactgccaccttctgtacgagttctttctttcttttttttttttttgctttgggaaaacactacaaaggctgggaaatgtatgatatttaaaaacatacatnnnnnnnatc

SEQ ID NO: 3834 - DNA, 120 bp, Macaca Fascicularis
ggggcaccccgcgtttctctcctagagattatagtgcacagtttagagcaccgcaggtgttttctgagaagggagatgggggttttgtaacacacacagagagagaaaggggagtcccat

SEQ ID NO: 3835 - DNA, 695 bp, Macaca Fascicularis
  misc_feature (1)...(695): n = A,T,C or G
cggccgacccagcccccgccgancnngnnnnnnccctgctnncctcggaggatgaggaggaggagnnncnggcagccaccgcaggctgcagcccagcccgcctgagacacgacgcccgccccaggggactgtcaggcgtagaagtggcgtcctcccgtgccccagactgtccgaattgcttttattttcttatactttcagtatactccatagaccaaagagcaaaatctatctgaacgtggacgcaccctcactgtcaggatccctggggtcgcttgtggggacgggagggcatggtggcagagannnnnnnnnnnnnnnngcggagcggagagggcggtcgtggtggaggcctccaccccaggagcaccccggcacaccctaggaggatgggctttggctgcgcggaggccgtggcacacttgcgggaggcagccggggcgcggccagcaatggcccccacgcagacgccgagagcccccgggaacacaggccgctcgattcctctgtacttnnnnnnnnnnnnnnntactaaaatcactttctgttttaacnnnnnnnnnnnnnnnnnnnnnnngctccatttttgatagttggataatccagtatannnnnnnnnnnnnnnnnnnnnnnnncgtgannnnnnnnnnnnnnnnnnnnnnnnnnnnnnnnnnnngcaaagaaaactcgagtaa

SEQ ID NO: 3836 - DNA, 689 bp, Macaca Fascicularis
  misc_feature (1)...(689): n = A,T,C or G
gtgaaaaggattaagattttattcnnncttgtaaacattacttgattttttaaaaaaagttttgggctcactgctaaaatagattatgcaacctaaggtttttaagtcaagatactgttttaggagtttgccctcttatttataaccaaagttgctctaaagcactttnnnnnnnnnnnnnnnnnnnnnnnnnnnnnnnnnnnnnnnnnnnnnnnnnnnnnnnnnnnntctaaagtagatagcttnnnactggagagtaaacaacaccatccctcccaacatcaaagctaggccacactgtaattcaaagcattttctttcaactgataaggtgtcttcctgaagccaaacagnnnnnnnnnnnnnnnnnnnnnnnttaggcacaggtgctatcacagaaaaagttctggggtggaagttttaagatgaggagctctgatcttaggcgtcnnnnnnnncacaaggcgaaaagtcaaatgaaacagtacaattcttgatgagtcaggtgtcaccttcctgtcacacagaggacgttttggctatgatcatatgatggcaagtgaaggagaagtgagtgatagggcttttcattttcatccagatgccgtggccttgtgtnnnnnnnnnnnnnnnnnnnnnnnnnnnnnnnnnnnnnnnnnctgaacaacaaatgaataatgatgaatgtc

SEQ ID NO: 3837 - DNA, 717 bp, Macaca Fascicularis
  misc_feature (1)...(717): n = A,T,C or G
caaaaatacatnnnnnctctagtaagtagatgtttttagtaatctaggcaatttatttctgaatttataccaatgtttgattgtcatggtacaaaacnnnnnnnnnnnnnnngctttcactggagttgaaaggcattataatctttaccataaatacccatgactattttgggaagacatttaaaacccaaaacaaacttttaaaagcatttgccacattttcccatgcctatttcataaattgcaactttttgtttttacaatttctggtattttttaagacccatttcccattgtactaggatacagcagtccacagtagagtgctactctccttgaaatcaannnnnnnnnnnnnnnnnnnnnnnnnnaatttatgttaggacaaatcttgacaagatcaacctattatccatcaaataattttaaaacaatgtgtaatcttgtttaattgtctgcattctctccccagttcagctgtatttgaattactaaacactttatcatcaaactgtacctagtctaaattatttttcttttgatatcagttttacaagcattttaaaattataatattcatatatagtggtgtttaaaacaaaggttctcttattcaagtttcaatataaaagtttttggatataaatggatgatagtttcttgataggttataagtaggtttttttttttttaagttgatttgtaatttccaaagag

SEQ ID NO: 3838 - DNA, 721 bp, Macaca Fascicularis
  misc_feature (1)...(721): n = A,T,C or G
agggctgagcagaaagttaaatggtggtttcctgannnnnnnnnnnnnnnnnnnnnnnnnnnnngtcaggaagcacagctgatgtgaaggctagttcctccctatcgttgtcccgtggtataaatggannnnnnnnnnnnnnnnnnnnnnnnnnntggctattaggatggggaaggggtgcatcaggtttccactcatagccctggttcgnnnnnnnnnnnnnnngctcnnnnnnnnnnnnnnnnnnnnnnnnnnnnnnnnnnnnnnnnaatatcacacctcggtctccttccgagcagcccaggtccctaaagcaaggtcaccaaacttgggttaaactnnnnnnnnnnnnnnnnnnnnnnnnnnnnnnnnnnnnncttgtagtgtggagctgaattctgggtagagaagggagagctgactctccattgcttttcnnnnnnnnnnnnnnnnnnnnnnnnnnnctgcgcgggtacaggactccatcaggctagtgttggggaaccagcctggcagcgttccatgtgtattccatatctgttccaacactggctgataggcagacaaaaggttacttgtgtgtttctctgagaagcggtataaatgaagtcaccttagaatnnnnnnnnnnnnnnnnnnnatattttgttaacttcacgacttatggcatgtcttatttaaaaaaaaaaaaaaaagtactaagtgtgaataacattatgaa

SEQ ID NO: 3839 - DNA, 665 bp, Macaca Fascicularis
  misc_feature (1)...(665): n = A,T,C or G
gacggctaaaacacagaagagtgtggagtttgggatagagattaggctcaagacagcgtaagcaattttttaaagttatgtctgaagcaagaagaaaagacaaggaataggttcagtttcatctnnnnnnnnnnnnnnnttgttaaaattgatgttttttttctgcnnnnnnntgnnnnnnnnnnnnnnntcccactcagccatccacctacactttctaccaagtcaatttatactgattcttcgggtcagtcnnnnnnnnnnnnnnnnnncctctctggtcaaggatcttttattatcccctatcacagaatcatattcctttccttagtgcacttctctcaactgataagtacccccattaatgtaattacttgattttnncatgcctgcctttcctcttccagggccgaaattgtacctggttttgctcatcattctatagtatatagaaggagttcaataaacagttgttaaagcaacatatttaacttccattttgttcccatctcttcactcagagacttttctttggattgggaagggtaaaatacccgaagacttgaactccaaaagaaacaaaatgattttatgcaaacgtttcttccttaaaactcattcattgggcaaatattcatttagtccttggcactatttggtaatgg

SEQ ID NO: 3840 - DNA, 663 bp, Macaca Fascicularis
acacacgggcaaaacttttctggaagtggaattgctcggccatatggtatgctcatgtttatgggaaaattactctccaaagtggttttgccaatttatgtctctatcacccaggctggagtgcagcgatgcgatcatggctccctgtaagctcaaaatcctgggctcaagtgatattgccacctcggcctcctgagtagctgagactacagatggccagtcaattgttccagttctattaaccccatacatttgacagcaatataaataaattgatactgcaggtacactcttaaaactcaacagaagaatgaatgaagctttggaaatcttgttaaccaaagtaaacagaaacagaggcttgtttcttctttccaagatggatgcttggaaagtcaacagggaagtgaaccattaccaaatgaaacattaaatatggttatattgaggactttttttttttttttgccatactcagaagaactgaaaacaataatatgttttaacctcaaatatttatctcaggcaataactttatgtagtttgtatttttcctcaaaaacaattatgtaacttcaaggaaacaaaatctgtactattttgaattttaatcagagttcattaaatgtaaaatgaggacaaaaaatgaaatacgtgtttcaa

SEQ ID NO: 3841 - DNA, 1166 bp, Macaca Fascicularis
  misc_feature (1)...(1166): n = A,T,C or G
gctggttgagttacagaaaaggaatcctgagttcagggagcgtgagttagttacactagaaagaaagcgtgcctgggtctttgctgtgggtggagacgtctccctctcacagggcctcttgctgcaaacatcctggaaaagatttcctgaaacaaagttttccaatgacttgtttgcaagacgtgcaaaaacagagaccatggggaatggtctctttctccaccctaaccctcacctccaaaatctcagattcatcctgtatgtcgcaactgttacgtcacttccctgtttagacagcgttcacatttccataacattctagaagataaagttcacctggttgcccctggtatatgaggcctcagttaactctgccagccttctattttcccagtccccttatccctacccccttacttgagccacatcacagtttctggaactttccatacagatcacacctctgggacattctctcacctttttcagaattgttgtatatccttcaagacccagttcacgtgtcactgtcttttaaagttactcttgatgaccgggcatggtggctcacacctgtaatcccatcactttgggaggctgaggcaggcagattacctgaggtcaggagttcgagaccagcctgaccaatatggtgaaatcctgtctctactaaacaaacaaacaaacaaacaaacaaannnnnnnnnnnnnnnnnnnnnnnnnnnnnnnnnnnnnnnnnnnnnnnnnnnnnnnnnnnnnnnnnnnnnnnnnnnnnnnnnnnnnnnnnnnnnnnnnnnnnnnnnnnnnnnnnnnnnnnnnnnnnnnnnnnnnnnnnnnnnnnnnnnatcccaaacaaaaacaaaaataaagttactcttgatgtttctcccaactcttaagtataattaaatcttccttctctggtttcttgccactaagttttacctgtattttatagcagttttcacatttcttatttagttataagtgtgattgatttctaaggcaagaatagcaccttcctggtttttgtatctctgttatttaactgaatgtctggcacgcagaagatactcaataaatgtgtattcattaaatgacttaagttctgataaaataggaaagtatacctaagtatagaaaggagataatgcaaaaaaaaaaag

SEQ ID NO: 3842 - DNA, 693 bp, Macaca Fascicularis
  misc_feature (1)...(693): n = A,T,C or G
aaaccagaggtggccgtgtcttcatgaagtttacttagtggaggcaggctgacagtaattaaataagtacacaaataaatatatgaccacaggccgggcaggtggctcacgcctgtaatcccagcagtttgggaggccaaggcaggtgaatcacctgaagtcagnnnnnnnnnnnnnnnnnnnnnnnnnnnnnnnnnnnnnnnnnnnnnnnnnnnnnnnnnnnnnnnnnnnnnnnnnnnnnnnnnnnnnnnnnnnnnnnnnnnnnnnnnnnnnnnnnnnnnnnnnnnnnnnnnnnnnnnnnnnnnnnnnnnnnnnnnnnnnnnnnnnnnnnnnnnnnnnnnnnnnnnnnnnnnnnagagtggaactcttcagcctgcccgagggcgaggagctggagggagacgagtgaaggcccttcttcctgtgcctgcagcaatggctcccaggacacctttgaagcatgttacagcggcacgtccacaccttcttttcacggctcccactgcagcggcagcgaccacagcggtctgggcttggagcagttacaggattacatggtcacggtgagctggggctggcggtgggaatggcacaagcaaagtcctggaggcacatccctcggctcacagggatgcggcccttcacccggaccaggaatcggctacttcgagggcttcctggagggcgtgggca

SEQ ID NO: 3843 - DNA, 816 bp, Macaca Fascicularis
  misc_feature (1)...(816): n = A,T,C or G
atatactttnaacattttgtntaattnncanctgaaattctctgggcatatagatttnttcttggagggagtttcaaaattttgttttcaacttccttaatagctattagactagtcagataatctatttcatattaggtgaattggtccttttgtctaagttgtcaaatttatgtatgcataaattctcttatcctttgatatgtatagaatctgtagtgataaccctatgtcatnnnnnnnnnnnnnnnntccccccnnncccaaccccccaactctttttttagttaatcttgaaaaggtttgctaattgtattgatttttttcgaggaggcagttgttggttttattgatttttctctctgttttctgtttcattgatatctgttcttatctttatgattccccttctgcctgatgtagatgggctcattttttataggttcttgaggtggaagcatagattattgatttgatgcttttatgtatacacttagtgttatacattttcctgttatcactgcattagctgtgccccacaaattttgatatgtgatatttttattttcattcagtttattgtatttttcttttcatttttcttgagatcacacaatttgtttattcagtaacctggtattagacatttagatcatttctagtttggagctactaccagtagatctgccatagatattcttctaccactttttgtatggtcatatgcttttatttctcttggataatttcctaggagtagaatatcataggtgtgcattcagttttttaaggaattgccaaacttttccagaattt

SEQ ID NO: 3844 - DNA, 2738 bp, Macaca Fascicularis
taaagctacattttgtaagaccagaaatgagtcttttcaaaaccaaaagtttggtgtgaggacagagaaagtaggctagccgggagacaggagaggtctatgtgtgcagaaacctgcacctcttcgcctcccgctgcccgtgcaggtcatttccgcccaggcccacccaggcctagcaatgtcccagcactgccccctggtggagccctccccacgggctgcaggaagggcatgtgacttgactccctcagcgccctgcaatcttgtctcctctggtcccaaaagtgtatcctgcctctgctttgtgatagatttcttcctgccttttgcatggaaattttatctctggttcttgcagacattatttacagctgtctaattttttctctctacctcacagctgccaaactaaagtaggtgggaagccattttccctctctaggtcagtgaataacccccgttctccacccgcgcttttgaagattccagcactgctgccaagtcaacccatctgcagcaaacgctttggaaaaaacagactttaaaaagagaagcaaattgctcttagcccctgatagcctctccacaggagagggaatagggacagagctgaggttcaagacacatgtgctgtttgagctgaatctgtgctattttcttttttccgtggttacccaacaatgaaggcgtgttgtaccttcttgccttcaaccctgttcctcctcccgtcagatgtccttactcctcaactttaagttttccttcataggatttctgagaaggactttggaaaaagtgctccagatctctgccagttccttagccatgaaaatcaaacataaaagaccatctggggacattcgttcagagcacgttacccacattccaccaccactattctgacagcacaaaacatataccaggagctgggggttatgtggtggagaagtccttcctattgtaagccctagcattatgaccctctggggttaaatttcataattttcatattgtggagtcccatattttgttctactgctttccactagtccaggcttctgaagtcttctctgtgttcactgcttattaattttattcaacaaagattaattgagctcctgcaatgagacacacaccctatgttaggtgctggggatataatcaggaacaaaacagggaagggccctaccctcagaaagcttgcaatttatgaaagaatactaacaaaacctgcaaagcggtattttaagttattttgtttcatttttgctattgaaacaaagaaactgagaatttggtaagattcaaaaaatgtttaggtacaagaaaaagaaaaaagcaagaagcacttgccagatttaactgtaattcctaaaaatgatgaacattttcatcttcaggaacatgaaacatcattgactattctctacagacgataggcaaagggtcttactggtccagtacgtacaagtccttcaggaagaaaaacatgattctaccaggattgggttgaatagagagagaactgcagtttaagattcatgagtatggaaataaacagttcttctgtctaataaactctctaggacctttaaaaaaatggctttttaaaatccaaagtccttgccttgggaagggacaggactaaagtaaaaataaatgaagtctgtttgaaactcatgagttgcacacctcatgttgccagaagctagtttaaaaagcagtctagctggggtttccacacaaactcagcaagtcatgaatcaacttgcaggcttgtctcccagaggccataggagctgggtgtgtcccagagatggtgtgtcctgattctgtggaaagggtggggaagagaggtcacacaggatgtttctggagaaagttgtgcatggctttccttcttagctaggagggaaacgggggtgtgtcaggagagtgaatgggagaagtgagggcagatgagtggatgtgtgagtagtgttagcactccagattaaacaaactgctcgtagtttaatctgatgctcaaataaaacactttgcctgtatttctaggtatggaagaagagaaagaaaagcctaaattggaatgagatccaagcctaaacgcaagagctagattgagccgccattgaagactcattcccctccggcattggcagtgggggagaaaaggcttcaaaggaactggtggcatcagcaccccccgcccccaatgaggacaccttttatatataaatatgtataaacacagaatacagttgtttccaaaagaactcaccctcactgtgttttaaagaattcttcccaaagtcattattgataataacattttttccttctctagttttaaaaccaaaattggaacttggatttttattttggcaattgtaactccatctaatcaagaaagaataaaagtttattgcacttctttttgagaactatgttaaagtcaaaggggcagatgtagagtaaggcttttgtgtatttagtcctaaaggtggctgtaatcatgaacctaagccaccatagggacctgagaggaaaggggacagatgtttctcattgcaataatgttacagttgcctcaaatgagcactatttgtaataatgatgtcaatttcatgaaaagcctgagtgtattgcatctcttgatttaatcatgtgaaactttccttagatgcaaattctgactttaataaagacgaagccactctgacaaaaaaaaaaaaaaa

SEQ ID NO: 3845 - DNA, 2152 bp, Macaca Fascicularis
acggtgccacttagcagcgcttccctgagagcgccctgcgaccacttctcattgatcatgtcagcgactctaccaaaccgcatctttaagccagtgaaatagttctgcacgacggattacaaagaactcagcgaaggtatctgcaatctccgaatacctcctgatgcctagagtttaaaaaggacgttcctaccgcttactgggaatcagtaaaccaaggatcagtgccaaagcctcgcttaccttgggctccgcgtctatttgcaacggtaatagcaagggttgcacggaactaccacctcgacagcatccccatctttggagttgcttattacatttaattgttaacgctcccctctctcctttttttaatctcagggaaaggacgcctgggttgattaaaaggcaaaatagaaaggtgggagggagaactgtaagtgacttagctaagggctggaatgaagaacagagtggagacgaggaggatggcgaggaggaggaggaggaggtgctagccctagatgtggacgatgaggacgacgaagatggggggagtgcgggggaggaggaggaggagaatgccgatgatgatggtgggagctccgtgcagagtgatgctgaggcctctgtggatcccagtttgtcgtggggtcagaggaaaaaactttactatgacacggactatggttccaagtcccgaggccggcagggtcaacaggaggcagaggaggaggaaagagaggaggaggaggaggcacagatcattcagcggcgcctagcccaagcgctgcaagaggacgattttggtgtcgcctgggttgaggcctttgcaaaaccagtgcctcaggtagatgagactgagacacgggtcgtgaaggatttggctaaagtttcagtgaaggagaagctgaaaatgttgcgaaaggaatccccagaactcttggagctgatagaagacctgaaagtcaagttgacagaggtgaaggatgagctggagccattgttacagttggtggaacaagggatcattccacctggaaaaggaagccaatatttgaggaccaagtacaacctctacttgaattattgttcgaacatcagtttttatttgatcctgaaagctaggagagtcccagcacatggacatcctgtcatagaaaggcttgttacctaccgaaatttgatcaacaagctgtcagttgtggatcagaagctgtccgcagaaattcgttatctgttgacacttaaggatgatgctgtaaagaaagaactgattccggaagcaaaatccaccaagcccaaaccaaagtctgtttcaaagactcctgctgctgcctgtgctgttacagatctttctgatgattctgattttgatgaagaagctaaactgaagtactataaagaaatagaagacaggcaaaagctaaagagaaagaaagaagaaaatagcactgaagaacaggctgttgaagatcaaaatgcaaagagagccattacctatcaaattgctaaaaataggggacttactcctaggagaaagaagattgaccgcaatcccagagtgaaacacagggagaagttcagaagagccaaaattcgaagaagaggccaggttcgtgaagttcgtaaagaagagcaacgttatagtggtgaattatctggcattcgtgcaggagttaaaaagagcattaagcttaaatgaagtttttgcttagcataaggtttttggcaattgtggatcaatacatttttacttttaactaaagtgattgtgttaatatataatactttaaattttaaaaattcttgtccacagggaaatttgtctgggttattggacaatttatattgagattataagaactgtgggagcaatatgaaggtgcttgagaaaagagatgatgttgaagtttttcagtattctgttaaacaggtattagcttaggcaaatttcacagttcattgtacagtgttaaactcagaacatgtgtaacttttcacataaagagaatgcacctttgagagttatttgtaaagcagcctataaaatagttctgaaatattttatttacctaactgtaattattgggctacttgttaataatggacttaatgttaaaaaaaaaaaaaaaaaaaaaaaaaaaaaaaaaaa

SEQ ID NO: 3846 - DNA, 601 bp, Macaca Fascicularis
tgaccagagcttgcttctgtgggatttaacacacacccactacgcgtccccgagggcagtggggagtcgggctcccgtgcccctgtggagatgaaggtgtgtgctgatcccccatcctcctgtggggatgaaggtgtgtgctgatcccccatcctcctgtggggacgaaggtgtgtgctgatcccccatcctcctgtggggatgaaggtgtgtgctgatcccccatcctcctgtggggacgaaggtgtgtgctgatcccccgttcccctgtctagatgaaggtgtgtgctcatcctgattcctcgtgccccagtggagatggaggtgtgtgctgattactgatccacatgcacaagaacagggtgtccgtcaataccctgaattaatgctaacacagtgccacttgagttcacattaagttagaaattgaaaatctaaaagtacttttattttaacttaaaaataatttctatactgtatattgattgattgtgacacaatttacaaagtctgaggtgtggaacagagttatttaaacattaatcaaccctggtccttaaaaagacagttctaataaaatgggattgtatatatttgttca

SEQ ID NO: 3847 - DNA, 762 bp, Macaca Fascicularis
  misc_feature (1)...(762): n = A,T,C or G
gaaactaccttatcaagaatgaaaaatcatatgggaagaatcccctatttatcactgctatattaaaatatatatattttaattatatttgacaggttttgcatctaaattgacctatttattcattcttgattaaatgcactgaaaagtaaagagtctgtttgtatcacgttcatgaaaatgcagttagagaggtactattcaagttattctgaaggcaccccaaggtatatctgtaatttaaagatattactgcagatatttttactttactgttggtttttggtacatctgttaatttagtatttctttgtgtgttttgtagactagtgttcttccatccttcaattgagctcaaagtaggttttgttgtaacattgtgattaggatttaaactaattcagagaattgtatcttttactgtacatactgtattctttaagttttnnnnnnnnnnnnnnnnnnnnntgctgatggcttggcttaagattttgatgcacaaatgaggtcactgttgatcagtgttgctagtggcttggcagctcttcataaaagcatattgggttggaaaggtgtttgcctatttttcaaattatttaatagatgtatgnnnnnnnnnnnnnnnnnntgtatctgaatttactgtggggannnnnnnnnnnnnaatgnnnnnnnnnnnnnnnngnnnnnnnnnnnnnnnnnnnnntttgtatttcagtttaaaaaccnnnnnnnnnnnnnnnctctgagatgcaataaaca

SEQ ID NO: 3848 - DNA, 699 bp, Macaca Fascicularis
  misc_feature (1)...(699): n = A,T,C or G
ttnnnnnnnnnnnnnnnnnnnnnnnnnnnnnnnnnnnnnnnnnnnnnnnnnnnnnnnnnnnnnnnnnnngcctgctagctaatataagtattggacaggtaataatttgtcatctttaatattagtaaaatgaattaagatattataggattaaacataatttttatactgttagtactttattggctgacctaaatttatannnnnnnnnnnnnnnnaaaaatgaagaaacaggacacatatgtgatgaattaaaaatatatataggtcaattttggtctgaaatccctgaggtgtttttaacctgctacactaatttgtacactaatttatttcttgtttagtctaaaaatagtaatttgtttgcaagtcactaataatcattaaataaattattttgttggccatagcccataattttgtaattagtactaagtgtgtacgtatttttgccactttttcctcagatgattaagtcaacagcttattttaggaaactataaaataatagggaaagagatttcactatttgcttcatcaatggtagggggcggtgactgcaactgtattagcagaaattcacagagaatggggatttaaggttagtcagtagagaaacttggnnnnnnnnnnnnnnnnnnnnnnnnnnnngaattaactttttgcaaaagttttatacacagatatttgtattaaatt

SEQ ID NO: 3849 - DNA, 734 bp, Macaca Fascicularis
  misc_feature (1)...(734): n = A,T,C or G
aagcctgtgaggatgccnnnnnnnnnnnnnnnnnnnnnnnntgtggcatccccgtcaccaatggcaccccaggcagagatgggcgagatggacccaagggggaaaagggagagccaggtcaagggctcagaggtttgcagggccctcctgggaagtcggggcccccaggaaacacaggggctcctggaattccaggaccaaggggacaaaaaggagatcgtggggacaattnnnnnnntgaggctaagctggccaacttagagagacagctacagagcctgagatcagaactggaccacatgaagaagctgcaagccttctccttggggaaaatgtctgggaagaagctcttcgtgaccaacggtgagcggatgcctttctccgaagtgaaggctctgtgtgctgggctccaggccacggtggctgcnnnnnnnnnnnnnnnnnnnnnnnnnnnnnnnnnnnnnnnnnnnnnnnnnnnnnnnttcctgggcatcacagatgaggcaaccgaaggccagttcatgtacgtgacgggcgggnnnnnnnnnnnnngcaactggaagaaggatgagccaaatgaccacggttcaggggaggnnnnnnnnnnnntnnctgagcaatggctctggaatgacatctcctgcatggcctcctacatcgccgtctgtgannnnnnnnnnnnnnnnnnnnngttcctcaacccccttcttggctccctattgctctctctgctg

SEQ ID NO: 3850 - DNA, 2875 bp, Macaca Fascicularis
aagtcacgtgagaacccgaggcctctaggtgccggaacctgacctgagctggggcctgtgcttccagtgggtggtggggggcctggtgtgctggcatcaggtaagcggactgcctcggcaaaggcttaaggacaagagaccggcagcctgaactggctggggcatccggaaggcttagatcttgtggccaagagttcagaccgtggcgaagtggagagtgacatgcagttggatggcggtgactgcgtgttttgtatgagttcaagacttcctacaatatgttgaaaaactaattcaatgtagaggactggaaaattgcagaagaataaaactaaaaaaccatctgtaaatcatccaggtcccacaacccaggttccagtctggcaagcattctagacctggctgctgaagactgacggggtccagggtgtgctgcccccaccaccttcaccacctcagaacccagggtaacgctgtcagtctctggtcccacaacccaggttccagtctggcaagcattctagacctggctgctgaagactgacggggtccagggtgtgctgcccccaccaccttcaccacctcagaacccagggtaacgctgtcagtctctggtgcccgagacgagtggtttccatctcgacggttgaaacagtgccatggcgaagaggagccaatccgaagagttcctgaaggaattccaggagctaaatctgagcgctcagagaacattcaccttcggaactcgacgtgtggagcccctgacatgggacaactgaaaaagttaagaagctgaaggggttgttcaacaagctgggcagcccaaaaccccactgactttattcctggctatgctggccgtagtaagttgtcaggtaacggctggagaatttacatactgggcttatattccttttccaaccttatatcaaagtgtggcctggggagacagagaagtcccagtatttactaatgatactgcttggatgccattgccttttttaaaccaggatcctgaattaaacactggcacagtaaatagttcatatcaatttggggttgaagggttacctatatgtcttgggggtagtccacattgtctgcatttttctcatgaggcttgggctgttcgctataaccatagtcatatctctgcctttacaatgattattgtggctcaaagttttaagtataatcatactgcagtacttaatgaaactctgccaagtacattatctttatgccccatgcccgatgtgtccggaggtgtttcccaactagagtggactagatgtagaggtggtgggccacgattgttgttagaagtaaaagggaagagtcgtaaataccttgttgcagattggagtgtacatggagattttcagactaaattcagccatgtcaacctgcgttggcataaaggtaatcacagcatcgctgcagatggcaatgaaactattatttggcatgatggtggtttatcaccccctatgccgcatttggctaatacctcacaaatacaaagtcatatttggaagttgctaactgctggtaaaccaatgttcactttcacaggaaacatgtccttaaatcttactactaatattgctaaccctttccatatatctttgcatcaaaatagttctagatatgttattgcatgtgtaagaaaaccttatttgttgttaacaggaatttttaaatgggataattatacaggggtagttaactgtacaaacaattgtatattcttaagttgtataaatactacttggtggaataataattggaatgagtctcattccgatttatatatactaacagccagaaaagaaacctggctacctgtaaacttaacacgtacttggagtgaatctgctggggttactcaaatttacaaggttatgcaagatcttgtccaccacagtcggaggatggttggaatcctcatgaccgtggtgataggacttgtagcgattgcttccaccgccactgttgctggactagctctaccccagagtgtacaaaatgcagaatttgtacaaaaatggcatgaacaatctcatttgttgtggcaacaacaacgagacatagatgctcatctgactgaatgagtagataacttggaacaagtggtttcttggataggagatcagctaacagtgttgaatacttgagctttgttgaaatgttattggaatactacccaattttgtattactcctgttctttttaacagcactgtacataattggactgagataaagaggcttttaattggtcataataatctttccctagaaatacacgaattaacacagaacatttctgaaacattttgcaatcagttaccgttcctgactggtgcagatttgatgactggtattgcacgaagtttgatgtctttgaaccctatgagccctgtaaaaactttgctgacttctgtttctagtaatgtattgattgttgttcttgcctttgtcattttcacagtctgctgtagacggtgccaaagggcgaacaccgaatcccagcgagcccaacatgtaatgatggttttaaaagaaattcaaacttgtaaataaggaaaggggaaatgtagaggactatgtgctcgcaaacgagacgttctgataagtcctgctcttgcaaacgaagcagggcgttccttccctgtaaacaggaaggacaaaggagccagctgcaaacagcagaccctgggggcttgtttatgtgtaaacatcttgaaaatccagaaagggaaaggtcagaaaaacaacaatgtgtcttgtgacttggcaacattccacaaacaactgtataaaataaagcagagtgcgccattcgaaaaaaaaaaaaaaaaaaaaaaaaaaaa

SEQ ID NO: 3851 - DNA, 300 bp, Macaca Fascicularis
atgaaagtctctgcagcacttctgtgcctgctgctcatagcagccaccttcagcccccaggggctcgctcagccagatgcaatcaatgcccccgtcacttgctgctataacttcaccaataggaagatctcagtgcagaggttggcgagctatagaagaatcaccagcagcaagtgtcccaaagaagctgtgatcttcaagaccattgtggccaaggagatctgtgctgaccccaagcagaagtgggttcaggattccatggaccacctggacaagcaaatccaaactccgaagccttga

SEQ ID NO: 3852 - DNA, 705 bp, Macaca Fascicularis
  misc_feature (1)...(705): n = A,T,C or G
cggagcgctggcacccgcggagcggcctggctcacccgaccgcctgggaactgatcggggtctctggcagcctcccagggctgaggttcagactgttccgcctacccaggtccacacctgatggggctggagnnnnnnnnnnnnnnnnnngcaaagagtcagctgttggcaggtgtgtggttacactgcccttcgacgttaaggttttgttcgtcttgctaaagtttgcaaccttttttctccttcaaatttggagaaggggaaaacagtttctctttgaaaagaagaaacnnnnnnnnnnntaagcaaaatttgtaatctttaaaactggccaggctctggggctgagttcaagtgacatgtctaaacnnnnnnnnnnnnnnnnnnnnnnnnnnnnnnnnnnnnnnnnnnnnnnaagaaaactcatgttatagacaatcgtccatccaaaaccaagtctttctccttcaggagggacccatctttggcaactgcagctggattcctgcgcagtgcttatggcgccacctcttgtcatgtttagaaaaatggnnnnnnnnnnnnnnnnnnnnnnnnnnnnnnnnnnnnnnnnnnnnnnnnacccttggaataccaagctcatttacttgtttgctcaattggaaaacgctnnnctctaggatcacacagaatctttgggagagtattttttatggtatttagaag

SEQ ID NO: 3853 - DNA, 735 bp, Macaca Fascicularis
  misc_feature (1)...(735): n = A,T,C or G
cccgacccctacccatcacctttaagaaacatacaacgccagtgtaacgtgggaaccattgagattgtatttgnnnngagtattaaagctggcttagcaaaatacttttaaaaacatattggtaaatgatacccataaaactaaattagttatattttattttaaaatgcaaaatacattggtatttattaatcattggatttagggaaagggacagatttttggtgaacctgacttgtggcagatggtaaggaatattataaaacatttggatgagaacaatcagggcgaactacatttttctgttacactggtaatcatttgaaaattgatttacctcagtgtttaacagtttttgttttgttttgttttttaaataataactaattgtcaagcactgataagagatgcagattttggtggggggaggtggtgggggagataatcacttcaccaactgcagtgcatttgtgtgtttttaaccctcagagaactctgcattttagggtacttgaggctgacttgcaaattaactaaaagttttaaagtaacctttttttccattgtaaatatttctgtaaatactaccaattggaaattagaacagtagagtacttttctgaatccaatcctatttttattttatacagtatttctcagctgtgatctttggagcaaaagccaacggcaggaaaaaatagtttgtaccagtttcatgaagtatgtctttgggtt

SEQ ID NO: 3854 - DNA, 190 bp, Macaca Fascicularis
tctaaattgaggggattaaaaataatttaaaataattttgaaggaatctattttcccttcagttttggagggcattaaaaaggcattaaatcaagacaaatcatgtgcgtgagaaaaatgaaattaaggaaaacacagcacttatgttggtttagaaagcagcctcgcttggtagagtatgagattgtga

SEQ ID NO: 3855 - DNA, 2494 bp, Macaca Fascicularis
  misc_feature (1)...(2494): n = A,T,C or G
cttttcaaatctgaggttgcccatagccagatgaggagtgttattcatcatcttcatcaacatctagcaattatcagtgactcgaaatccctctcttcattggtgtaaaagaatgcatgaccacagctgtctggtggctgctttctcttggcccaggtctcgtctggcaggacatgctcacttcccagcagaatgtgaggtttcattccatctacagccttgcaaagccgcagtttacctggtttgtcccactgaccaatctgacaccccagtgcactgaccaccagcttcacgaagatggtcctggtgtttatccctgtgacctgaaagagccgacctgcatgctcacgggcctccaaatacccacctcaccccagacggctgccccaccatccccaggaccagcctccaggataactgtggacaccaatctgcacgcgggggtgggggtcagggggagtccagccatttagaccacagccatggtgctcaaaattcagtgtgcaccagaagcacctggtcaggtgaaaacaaaccctggcctcccacctccatcaggaccaggccttctgcacactcctgatgaagaagcttgataaggaagagatgagaagcctgagaggaagaagaaagaaggggcagggaaaggggagggaatgtgtgtccgggagcagtgaaggccggctgctgatagccggatgggggcaggacatcagctttgtggaccacactctgcatctgaactccctgaccccagctcatgctcaggcccagtactgcctgacgtctccagacttggtcagctccagcaaatgcctccccagcctgcatccatcacaggctcattcttcctgtgcaagttctgacacataatcctcctgaaacacctttgaattaatttacagtactcttcttctacatacccaatatttgcaacacttactgcaaagtccctctttaatgccatattttctctcccataagcagcctcaatatgtgtaactatgtactggttttctgtgatatttggttaggcccagctagttaacaataaggagaaaggacaattggcagccatccttgaaatcacccaatcacagcccatttgccaaccaaagaagtgaggctcagaaaggctaagggaacatctcaaaaccagacagcaggaagctgaagccagaattggcaccccatctgtcagatcgatagccctagctctctccatggcagttcttgttgagaagctcatggtggttgcagagttggtgtcaccagtagccatgtgtggcacgagcatcacaccttctccaggggaaggtcctcttggtgcctcccaaaccccactgatgaaggatgtggtgggcagcaccaggatgccctggcaagacgtgcatatgccctacttacagagaagctggcacagttcccaaggaccagactgcccgtcaggggacgtcagcaccatctgtcccatcaagatctgctcattgcactattcctcttaaatgtgtaagtgtctagtgctctgggaaagatccctgatgaagagtcaagcatctggccagcacactaaggacagcaacaccctgcttcctccagagacgccagaggagcgcccctcagccaacccctgcagtcagtaaactcttactgcattttcaggggttggaagaagagaagagatcttaaaagcaggggggggggaaagatgaaaaagagaaaagaaaaagagagaaaggaccttgatcgcccctgagctaatcaatgccaattactaatgtcatggatcgtggaagcccaaagagcctttataaaaaaaagcatttgcgctaactttcaaaacaaaccagacaacatcaccaccttcagttcgagatttctgctgcccacagcaagcatccagtatttcagagactctggcttcctgtcttccaggatcctgcctgacatcctgggtgtcatcaaatcaggaagcctcaggaaatgccacttgatacggagtcaagaaagggacgttgctgtcagttgctggtgcaaggctgccggcatctgtgcccccaagtgtggtaccctaaatccatcaggactggccgggcgcggtggctcaagcctgtaatcccagcactttgggaggccgagatgggcggatcacgaggtcagnnnnnnnnnnnnnnnnnnnnnnnnnnnnnnnnnnnnnnnnnnnnnnnnnnnnnnnnnnnnnnnnnnnnnnnnnnnnnnnnnnnnnnnnnnnnnnnnnnnnnnnnnnnnnnnnnnnnnnnnnnnnnnnnnnnnnnnnnnnnnnnnnnnnnnnnnnnnnnnnnnnnnnnnnnnnnnnnnnnnnnnnnnnnnnnnnnnnnnnnnnnnnnnnnnnnnnnnnnnnnnnnnnnnnnnnnnnnnntcaggactgtctcaggtacaaagtaaactctttaagccatcctggggccactccaaaaaaaaaaaaaaaaaaaaaaaaaaaaaaaaaaaaaaaaaa

SEQ ID NO: 3856 - DNA, 737 bp, Macaca Fascicularis
  misc_feature (1)...(737): n = A,T,C or G
caacatcacacacagntnnnnnnngatagcccagcacccatgatacaggggctaccaatgcttaaaaccacacccagggaggccacagaggcactcagtgggtggtgggttggtnnnnnnnnnnnnnnnnnnnnnnnnncggaggtgggcaccacaaagttgcattcactcagcaaacgtactgggtatcttgtgccnnnnnnnnnnnnnnnnggagctgatattctagtgagagacagtaaatgtgataaaagtaaaacataacagatggtgaaaaattaaagcagaaaagtgagatcagaagtnnnnnnnnnnnnnnnnnnnnnagtggcccaggcccgtaatcccatcactttggnnnnnnnnnnnnnnnggatggcttgagcccaggatttcaagaccagtctnnnnnnnnnnnnnnnnnnnnnnnnnnnnnaaaaaaattcaaaaatcagctaggtgtgnnnnnnnnnnnnnnnnnnnnnaggtactcggaggctgagaggtgggaagatgccttgagcttgaaaggtcgagactgcagnnnnnnnnnnnnnnnnnnnnnnnnnnnnnnntagttgacggagaccctgtttttttaacaaagaagcgaaggtgtttacacaagcaaaatactccttcttttaagtgtaattaagttgatccaaaaaaagtggaaatgtataattaaaaaacataggagcaaatctaacatgaaatgtaatatctgcatgtgg

SEQ ID NO: 3857 - DNA, 759 bp, Macaca Fascicularis
  misc_feature (1)...(759): n = A,T,C or G
tcaggtggtcagctccacatnnntgttannnngacactaacagccaataatatgcttcttaactgtcaaattacagtttcccaattttatactaattgggggtgggtgacaaaacagttgatccttgtaaatacattgtacagaatatttattttttctcaaaatgcattttaactactacattggctgtgcccagatgagtcctctttgaatagaaagtgaacccagnnnnnnnnnnnnnnnnnnnnnnnnagggcttatgggtcggggtatgaattgtgcacacacagcccaacaacgggcagtggtctctgtggtcctaacgcatccagcacaggttctggcaagggtacccctgctcggggtgtgggctggtctgtgcataatcccggactgnnnnnnnnnnnnnnnnntgcagtctgaatttcagttgtgttgaaactactttaatagacaaagtaataaatgatgtttatcnnnnnnnnnnnnnnnnnnnnnnnnnatcctactgagaaatgttgttagtgattttgatatttaaatccttaaaagattgctttctttttaaaataacgcatgtccattttagaaaattagaaaatcagtcccaccacccaaagattattgtgcatgctgaaaagaatatgaaaaatcccctcagcaggcataggatagaaatgcattgttgtatatttccattttcgaatagggtcaaggaacccaagaaaatcatttctacttttttnnnnctctaagcat

SEQ ID NO: 3858 - DNA, 750 bp, Macaca Fascicularis
  misc_feature (1)...(750): n = A,T,C or G
gagtcccgtgtctggnaaatctgtcattccaaatctgtaagcattccaaacatctgggagaatggtttcactgttgagggtgcatgtggcagaatctgtctgtctctgcacctgtgttctgttaccatccctggacagtgacagattttaaaccagccaccagaattatttttgagttaaccatttcttagtttctgtattcatgacttgtcttactgaactacaacctggtttgtagacttccagcacctacactgctgctcttcaccattggaattcactgtggtattcatagtattggcttcagtccgagccacagggaataaaaggatatcagcatgtagttctcagctacatcatggtatatagatgctgttattcaggtgaacttgctcatgggtggactaacacctggtttggtacagagactgagaagtttttcattttggtgtcaaagttttgttacattatgggtgtgaagggcatttgatatatttttcttaactatggggtttatttttctaaatatgggttgattgactgttcatcgattcagggtacccttaaaagaaaagttttcccattgtgaaccttaaaggatcagggaagtaagttcattgattaaattctctgttgggagaacaaaacttttctcccctgacactttattatctttgatttttcaaagggccttgattggtggttgtgtctcggttagaatttatgggactttgctatgtagttgacatt

SEQ ID NO: 3859 - DNA, 741 bp, Macaca Fascicularis
ttggctcatggttctgcaggctgtagaggaagcgtggtgccagcctctgcttctggtgagggtcacagggagcttccatccgtggcagaaggtgaagggggagcaggcacgtcacatggcgaaagcgggagcaagagagagcaggaggaggtcccagactcttaagcagccagcctcgtgtgaactcagaactcacccatcaccatcaggagggcaccaaaacattcaggagggatctgagtcactttgtgctgtgcctggcacatagtaggtgctcagcatgtcatggcctcagacacacaggcagatgagaggcctggaagggtcatgtgggcatcccaggctgcgctatttgtgtcttagctcccagcctctctgggcatctggccatcggctgaagggaggagttttagggcctggcttgctctgaagaggcaggcgcaggggtgggccttccaggagagtccaccctcgggagaagccgatgcgctttctgctggctgcatgattttccgtggtagacagctccaggagcaggtgacccaaaccctcagctgccctttgcagggaggagagatgggcccacagcaggagggaggcccattggctgagtttgcagagagggcttcatgaaagcggggtcttgagctgaggttgccgggtgaacagggagggcttggaggagggaggtggaaacctgcaggcacagggcaaagagctggatgggggtgtccatgctgg

SEQ ID NO: 3860 - DNA, 5086 bp, Macaca Fascicularis
ataaagcaccagtgaaatcaaatctctgtatttgtattctgaagacaggggagtggagtgactcagggtactaaggaaggaaggaaatgcaagcaaacccattccccaaggtcaaaggacaccccctccgaggctccaggctgcaaggggtcctgcagagggaccttcagtccagggggttcttcagggggaccgtccagagggctctgcagggggctacagagctctcaccagtaggtttagtgttctgtttctctttctagacagttttggaaagttttccagtttctaacatgtataaatatgttgggctaataaacagtaatgaaatttaaagcaaagtttttcagaaatataagaaggttgaagtgcaaagctatcaaggccatgcccaggcctcacccatgctccctcatccccttgcccctctgtccggacacctggcctgccacacccagcccaggacagaacttttctttcctcctgtatactgagctgtcagaccattagtgttaatcatgggctgatctgatagttgatgctggagaaactaatgttttaggggccagaacaaggtctgcagcactgtttgcatggaactgccttagtcaggatgagtaacttcatggctgtagattacttgcatcatcagttcaggaggaaacattctcctccattggatgaatggatgaatgagtggtgagaagctgtagagatcttgtgtagtgtcaacaccctcatttcacaggggaggaaactgagtcccaagagagggcagcgacttggttcaggtctcagggaattggtgaaagagattggagtatggccttggccgagatctgacttccagtgacagctgccggaatgtgaacttcagggatagctctggctcacaccagtggtgcttagtgtaggctgctgagctgaccacttgcccttgattctttcaagtggccgtgccatgtgccaccttcagacctgctcccagatcgatcccagagcctagggtgggactgtggttgctgtcatcataggtatgtgattttccacaggtcatataaccctattgaggctcatcttcctcttctgtgacacgagagactctttctgcagaggctggtatgtaatacatgcaagctgcatgcccaccttcagtccagcaatagccattgggcaccaattctagaccaggtcctgggccaccctagaaactcaaagttagacaggagctgtgtgggaaggcaaggaacactcaggattttggacacagctgtccacccctattcctaaattgaggaaggcaaatcctgggacttgaataaatacattgggaagactcatggctgcgctagttcatgaaatattatgtaaaagcaggagaataaggcagtccttttcttagccctgttcttttccaggccagagcctgggctttaacactgactcaggcagcagcccctgcagaagccacccacagccaggttggcctgtgctcccagagcccctgccatggatgtccataggagcctctttatcccaaagtcatggcttccttctcaaagatagggctgtacttccctgctttccgtgcccacactgagctgtgcatggtggatgctccgtgagtgtttactcacaatgatgacaggagctggctgatggtaagaaacggaggtgagacttcatggctggagaacacagctgtctgaacccacgcccaggcctcacccatgctctctcgtcccctcgcccctctgtcctgacacctgactggccacacccagcccaggacagaacttttctttcctcctgtgcactggagctgtcagaccgtgggtgctaatcatgggctgatctgtgctcttataggtatggtttgcaaaggacgtcttttgttcttgttagagtagctaacctctaaatctatttaataccccttccctggttgtccatcattatgacacatgattttccaaaggatttactattagttagcagcgtagggctttctccctggggtagcagctacttgcagtgaagaaaatgcatgttcaatgtagcaatttgtctttttttatatatttattgtaagagtaaatgagttattgttggagacttcaatattattgcaaattaggtgctgcaaacagagccgggcccatttattatgtttctcaactcccacagcaagcacaccagttcagaaatcagctgagagttgtggcccttcccagggtgagcatggagggacccctggggtctgggcatgacaaccacgacgtcacattgtgccagaggcaaaagagacaggagccacctgtgtaggcggatgaggggtcctggaaggggagcacaaagtttattgtgccaggtggtcagtggctggtgggctgacagctgtggtcggagagctggaggaggtggagtggcctcatgctgtgacacttgctccaagcccaccgctgtggtcatggagcagaggtgaggtggtagacgtttccagagtggtccctaagccttgaactcacttccaaggtattggcagtttcagccacagaggccgggcctgggttctgatttagggtgtgccccatgagagagagagtggtggctggaattaaccagcttacagtggggtcccctgaaatggtgcactccccagtgaagaacggctgttgcctagtcctgtcctttcgccacctgcccagactaggggtggacagaggggctgcaggatgcatagaatattagggtcctgcctaccagagatgaaggtcatactgcaaagtggcatgctggctgtgtgtggtcaatacaaagaagtgggcaggctgaggcccgggcatacagccctgctccatggctggaggagtccgtagggaaggccacctagcccagtgatctggagcacaggcttctggtgagaggccagcccagattggagtctaggtgtcatctgctgattgtgtgattgctgacaacatactcaactttgctgtaacctcagtgtctcttctgtaaaatggggctgataatccataggtgttactggcgttgaatgagctcttgtccttgaaacactcagcgtagtactagcccatggtaagggctcaaaggtgtcacttgttcaattactattcagtaggcttctctgaacgtgacaggctaaactcaaaacattaattagtcacttcatttgatggcaatagtaatatatgtgagtgacagccacgaaagaggctaccctcagtgtaccacccagggagagccagagttaagatcttggagtatatgcttgcagtcttctgtgttgtatatagtgtatgcacaattattcacacacacatatctgcctgctttttacaaaatgggattatattgtgcttgctacctcgtaacctttccacctgagaatgtatcctgttattactgatgcctttccattcacgttgttctgcagcttcagtctcaaactttttgatctcaggacccctttataccctcagaaattattggtagcttcaaagagcttttgtttttgtagtgtgtatttcttggtttaccgttctagaaataaaaactgagaaatttgaaagatattttaaacttatttaaacctaatagtaatagacccatttcatgttaatgaaaacgactaatttttatgaaaaatgttttccaaaacaacaacaaaaatgtgaaagacggcattatttttcaatttgacagacctctttgctgtctggcctagtagaaggatgcattctcctagcttttccgccttgggtctgttgcatagcagcctctggacacccacagtgtctattcaagagagaagaagagtgaaaaacacaaatcatgtcttagtatagagacagctttgactttgcagaccccttgaggcagtcttggggaaccccagggctctgcaggctacattttggtcccctttttaatgcctacagaatgtttttgaccttcccacctgaggctgggctgagaacatccctccagcaaccacaggctccctgggcctcctcatctgaccgaacctgtgtccacagagcgtctgagctctcctctctatcactgcgaagcggaccgacataaaatctcgcttgtttgcagagtttgtgaccacagagaacatttccataccttctcacaatcatctttgggggagagagccaggagactgcaccaccttgtcccggacatatgtgttgtggccagatccccatgtcaggaacctgctccaggggcaatctgctgcccctaaggcctgggggtccagctctgtggacttagctcatcttccaggactctggtcacaagggaacaacccaactcctgccttgtcctcgccccagaggctcccggctgcacacagctggctagagtgacggtgttcaaccgcctggtgcctcctgttcagaaccacccctcccagccaacagagcccggtctgtgcaggctccgtgggtctgtgtgagagcccctgtttgccttggctttggcctggcttctcaactggctggccggcccttttcaaaaatcggctgggtgttttgaaactttattttccaaagagaaaaatttctgggcctgtagcaagaggaaaaaaagttataataataatcaaaagcaccagcagtcaaagtagaatggtgagggtttggagaaacattgaaagttgtcacaaaacagtgcagctcacccatcagccaaagcccccatctgtgcgcagagccctggccatgccggcttctccctgcatcagcgtttggggaaagacggatgtgcccggaagcgggccttgctcctgtctgtgtaggcaggccggcgttgaatgtctacgggtggcatctatcatctgtgacctgtagcatttgtacttgttgtttatggtctcttggcatgcattgttttctcgaggctgaaatatagcacgctaatgaggtatctctctgctcgggaggacgcaggcggctcagaaagacgcctcggcagcatgctgactagtttgtcaacagccactcgctgtggcagctgctgtcccagccaagaagaaaaaaaaaaaaaaaaa

SEQ ID NO: 3861 - DNA, 2679 bp, Macaca Fascicularis
caccagttctgtccaccaggctccctgctgcaccggcgccgctactccagtggctcaaggagcctggtgtagactctgccccactcccctcctgccccgggagggctggccactggggggcctgggctgcccctccactgctccccacaccctggcacgatgcgttcctggtcactgatcctggcctgcccccgggccacagcggcaccctcatgatggctttccgggacgtcacggtgcagatcgccagccagaacatatccgtgtcctccgccacggctctgtccgtagccaactgcctgggcgctcagacggcccaggccacagcggagcccgcggcgggcaaggccgagcagggcgggacccccgggcaggaggccgcggaagcccccgcagtgggccggggggacgcgtccgcggaggactcaggcacagaggctggggctgggggagcggtggatgaagccacagcagccaaagcagaggaggaggaggaggaggaggaggcagcagacgtggggaaaggggccgaggctgaggcaggcgacttggagcagctgagcagcagcagcacgtccaccaagtccgccaagtcaggctcggaggtgtcggcctccgcctccaaggacgccctgcaggccatgatcctgagcctgccgcgctaccactgcgagaaccccgccagctgcaagtcgcccacgctctccaccgacaccctgcgcaagcgactctaccgcatcggcctcaacctgttcaacataaacccggacaagggcatccagttcctgatctcccgcggcttcatccctgatacccccattggtgtggcccatttcctcctccagcgaaagggcctcagccgccagatgattggagagttcctgggcaacagcaagaagcagttcaaccgcgacgtgctggactgcgtggtggacgagatggacttctccagcatggagctggacgaggccctgcgcaagttccaggcacacatccgtgtgcaaggagaggcccagaaggtggagcggctcattgaggccttcagccagcgctactgcatgtgcaatcccgaagtggtgcagcagttccacaaccccgacaccatcttcatcctcgccttcgccaatttgccctctcccctgtggctgccagcccgtctgcccctccgtgtccttgctgccgtggccctcctctgttttcggtaacagatgctccagccattgcatttcagagtggagcagacaacagatggggtgcacaaattcagacacctctgatgcccttagccaaggcagggatcgcccttaaagtgaaggcctgaacaggaggtgtcagggacttgggaggggtcctggggatgggagtggaggaatcttaaaatgagggaagctgaaaatagaatgaaaacgatgactaagaggcaggagtgctaggtatgggggaataggaactatgagctaaatatacttagggggtgggggccagggacactgtcccagacagccctagcacgacaggcaggaccctgtcccctgctcacatagctcttcaggcttacaaagtaccctctcccctgttgaggggcacagtaaccccacgccctccctcccacctcagctgaagcccagatcttccaaattggaaccagcaaaagtcagggctggcgcgcatgtgggcctccatctgagaaactggactctcagggcccctgcccagggcagaggcccaccccttgggttggtgcagtggctgccctgggccccactggcagcacagggagtctccaggaagcagcccggcctggggtcagcttcccatggagccagtccagagctgggaggggcattcaacccctgagggcctggggcaggacacagctgccctcctcactgtcaggggaagcaagtgcccaacatctgtaacccttccctgctcagtccccaggccaaggttgggcctcctctccgtccccgtcgctgtccccagagcctagacctcggggacctgggaaaagcctcctgctccctcccgagggcagcagacagagcagggcctccagccccccagaggaccagtgggggtgctcttaggccttcctgctttcccaaggttgcggggacagtagagtgctgactgagccccagactcaatcacccaaagatggccccactctatcccactccagacctttgggaaatctgggtccctctcctgatttgatccatttggccccaactccagagcctggaatgggagatgaaactagttttccacccacttttggggaaatcccacccccaggtctctagcaagccctgctgacagcttgtcctggaagcctgcctgcctgtctccacgggtgttttgatccagcacacactgatcagccctgcgtcttcgggcccctgcgccaccggtccccacggcccgccaggagtctctgtacccactaggcttccctgatgaccatctatctgtccgtccctgtgtaagctgtacgtccctcctgctgcaccctctccccacacacccgtcgcccataagagagaaacctctctagggaaaggcagggtggctccacccagcaactaatccaaatggcaaatattttgtaacaaaatagcccagaggtattttatctgttcaattcatagagttttagagattatattgaaagat

SEQ ID NO: 3862 - DNA, 646 bp, Macaca Fascicularis
  misc_feature (1)...(646): n = A,T,C or G
aaaggcggctccttccnnctgtaccttgtctnnngctgggtagagcagcacaccagtaacctgcaaggctcatcaacatataccctaaaccctggggctggcccaagtgaggttgcaaannaaatcgccgtgaactctgttgtcggtgaatatgccaatgcgtgtttacaagtggcccaagactgtgggactgacgtacttgacctgtggaccctgatgcaggacagccaggacttctcatcttatttatcagatggactacatttgtctccaaaggggaatgaatttttgttctcgcatcnntggcctttgatagagaaaaaggtctcttctctgcctttgttgcttccttaatggcgggatgtagcagaagcaaaannngaattaagtctgctgggagatggagacccccacacctctcagccccactaatacagaaacccactacccgtgagctagaaggtgctcagcggccagggggtctccactgcctgtaacgggcggccttcccgtctgtgcacagcgaagccatgtgcagggcgcccccctcaactctgccctggaacatgccccagggcacggaggggtgaagccagtgcttggactctggctgggagtcttgttgtgtctgcgtgcgcctgtgagt

SEQ ID NO: 3863 - DNA, 772 bp, Macaca Fascicularis
  misc_feature (1)...(772): n = A,T,C or G
tgaccactactgctactactactnnnanntnnntttaaccgacacactttggggagaagaagcagacacaggttcccacagcgtctgacgcctgccgagcaannnnnnnnnnnnnnnnnnnnnnnnnnnnnngctcggcggcaccagctccccactgggtcattttaagcgcgctgtggccaccttttctgttgcgtgtggacctggggaggatcttctaagtccctccagcgaaggcaagtgtgagactctggccctttatttgtaagaagcaagccttcagactgcagaagtgtcgcgcgggtcgccgtgcgttgcgcgagtgggaagatggaggaggccggcatggtgctttcgtggacgcaagtgaaccgggcgtgaaggcagggtgcaagctctgcccttggcccagcccggcgtgggtgccgtcccagattccgggcggtgcggggtgcagagatctggagagagnnnnnnnnnnnnnnnnncaggctgctctgggatttcgttggaagatccggtagagccttggaggagagggccggggaggctgtgtgtgcagcggaagcttgtacgaatgcccccacagctgaaatggtgcgcacgannnnnnnnnnnnnnnnnnnnnnnnaaacattgactgaagtgaacaagatcaattttttaaaaaagcaaaagtagaaaataaaaggcgtgagacttcttgactggcttgttcccgcctttcttccttccctatactcagatcagaaactttaattgctcttattca

SEQ ID NO: 3864 - DNA, 738 bp, Macaca Fascicularis
  misc_feature (1)...(738): n = A,T,C or G
tcagttnnnnnnagatgttagaactggtatttgttgttgnnntnnggttgcagtggagttatatactaagttacttatagtaaggcattagtagtctcatttctgaagagcaattgtatttttagttcagctaaattgatacctctctttaaatactaacttgtactacttttgtggctgtgaatggtatcttttactgaactgaggcagcttttaaaagacttgactgatgatttagagcactgccattgaggttaaattagacttgaatctgtaatgattctcatatctgttcctgatgtgtgtccagcacagcgttgctgggcagagcagaggggcagaggctcaggtatgtacttcattgaccagtgggcaaggccatcctgggtaccacattggcttaatgatctcttcattgtgaagttgggccaccttgtttgcataagaactacagtaatcaggcaacgtattgtcagaattgggaggaataaaatcagtgagtctctaaggagtgctctgtatacaattgcaaagaacaaaatggtcaactttaaggtacctgattgcatgcacttaaatgcagattatttttgagtttgaaaagggactattaatgaaatctttcttttccctcctttctctttttgccttccccaccactgatttagtgagctggagattggatcacagccgaaagagtaaaggtgctgcagtaaaggctacctgtgtccattttgg

SEQ ID NO: 3865 - DNA, 699 bp, Macaca Fascicularis
  misc_feature (1)...(699): n = A,T,C or G
ggggtgtggtgtgttatgtggggnnnnnnnnnnnnnnnnnnnnnnnnnnnnnnnnnggcattttannnnntcagtaacattttatagatctacttgtcaatgtannngagacattcacagccaaaaccctgggannnnnnnnnnnnnnnnnncccgcctctatctttctttctctctctctcaaactttccttaaagttctcattgcctttnnnnnnnnnnnnnnnnnnnnnnnnntctcctccccacctttggtgnnnnnnnnnnnnnnnnnnnnnnnnagacactcatgccctggcaatgtggctgccagagaatgttgttgcagacccaccagttnnnnnnnnnnnnnnnnnnnnnnnnnnnnnnnnnnnnnnnnnnnnnnnnnnnnatttttagacttttctttctgtcacttgggagtgtctatgcctcccatatttccctaataaactcaactttttatctgactgctgtgattatggtggggagaggagctagaggtggacttacttattgcacagaaatgtaatatatggcattattattctaacataaaactttnnnnnnnnnnnnnnnnnnnnnnnnnnnnnnnnnnnnnnnnncccaagtccccatgttnnnnnnnnnnnnnnnnnnnnnnnnnnnnnnnnnnatttggtcattnnnnnnnnnnnnnnnnnatttactatgtaggcat

SEQ ID NO: 3866 - DNA, 555 bp, Macaca Fascicularis
attttctttccgaacggggttaaagtctgtccacaggaatccatgaaacagattttagccagtcttcaagcttattatagattgagagtgtgtcaggaagcagtatgggaagcatatcggatctttctggatcgcatccctgacacaggggaatatcaggactgggtcagcttctgccagcaggagaccttctgcctctttgacatcggacaaaacttcagcaattcccaggagcacctggatcttctccagcagagaataaaacagagaagtttccctgagagaaaagatgaagtatctacagagaagacattgggagagcctagtgaaaccattgtggtttcaacagatgttgccagcgtctcacttgggcctttccctgtcactcctgatgacaccctcctcaatgaaattctcgataatgcactcaacgacaccaagatgcctacaacagaaagagaaacagaactcgctgtgtctgaggagcagagggtggagctcagcatctctctgataaaccagaggttcaaggcagagctcgctgactctcagtca

SEQ ID NO: 3867 - DNA, 2519 bp, Macaca Fascicularis
ttaaataaattaccatcaaccagcccgatggtcagcaattttaaaataagttctccaagatgtgcgttaagtgacccatgtacaaaatgtgtgaaatttggagcaaaattgaaaataaatgagactccacacccttaagtgattgcattcccataaaggaacctggaaaggatgagtcagcaggcctgacggctggcggcagctgccctggagagtgcctgggaagtggtgtgtgcctttatcctgctatctgaagcgttaagtcacctgtgatgggaaggacggaaacccctgcctgtaggcaagggcccctgctgcccctcccgtggcctgtcccctctgtggggcacgctttctctcccttatggtcctgcccactccacctcccagtggggagcagtggtccgcattccaccagaaacatgcgctgccctgcagcctacttgctgcttcttggaagacccagaccaaaaaatcaaaggagcaccctggctggattctggaatgttccagaactctctggatatgacttctttctgagctcgtccccagagctcttggaggcccacagcttccctagttttgggggtggcaccccacaagttcccatccctggcctcctaggtcaggcctcctccctgacagcagcctgctgcccacacggggtgaaggtgcaggcaggcagggacctagcaccacccacagaccctggtctgaggtcaccggtggggtttttcacctgtggcgccttccaggtgggaacttcctcctcagggcctcagggcgacacctgctcgcaggaagggtctcttgacccgggatgaggggtggggtttcctcctctggaggcacctggatcagggatgtgggtcaatgaaaatgaaataaacactgtcttctattttttcccccaaaactacagctttattgcccacgtgactgtaaatcataaatcagattatgagccttccttcattaaagtcccccaggaggccccgtacgttccgacagccttgcctgtgcctgctgtactctttcaaaggcctgaagtcatcctgtggccttggcactaacggaggagtgtgacgtggccgtgcgcagggaggctggtgcagccccgcagaggaaaagcaaaaccctgggcccctggacctgggcctgcggcaaaggaggctcgggctgagaggggccatgggggactggcccaggggagaagcctgcgggggtggtgagtgtgccagacgcaaagccagagtcccacagagtcccagggctctctccgcctgtgttagagtctcacctgcccattgaagggctttcgagccctctcctgtgagggtataaggacggggtccctgatggcctctcagagccctgccccatcagacagggtgcccaggcaaagttgaatttcaggtgaacaccaaatgatttttagtacaagcatgtctcatgcaatattttaaaaattcaaaattaatggggtgtcctatgtttcttcactttggctaagtctggcaactctgtccctctgcccctgcacctggcacaggcccagggcccgtccagtgagtggcagaggaaaccctcacagttcccctgcgctgtagagtgtcgtagagcagctggagcgctctgctttgctgtggggagagcagcacagtagggccactttggggacgctgtggccacatctacccaagctcaataggtgccttccatgtccagcaattccaccccaggtacacagcccggggaaatgaaaacgtgtgtccacaaagagacttttgtaagtgtgttaattcccagtctggaaatgacacagctgtccactgacagaagacaagataaataagttgtggatattcatcagatggaaccctactcagcaacagaaaaagaacatggtaccgacgcgcacgccagcatgggtgcaccttgcagacgggatgctgagcatgtgacggagggcatcctgtgcgactccactgatagaaaattcaaaagcagaaaagaccattagctattagccatggaagtcagaacggtggccacttcaggtgggggtggcacaagggaacgcaggagtggtcgcataggtgtatactgttagggacaaactgccccaagaagcttcttggtgctgcccgcccctccccactctgcagctcctctctgtgctgccccagcctctttacacttctgagcccttatctagatgccgcggtggcgccagcagactttacctgtcaggccttgcagctataaagcaaatcccaattacaaaccatggagaccacacgggatgtcgtgggaggcataggcaaactttacccgcactccctggtagcatgaacgtcaccaggtggtgtgtggcagagtcgaccaaccaatgaccccagggcctctctaccccatgtaaacccctcattgtgtaggctcagggctgcctcctctgcctgtaatggagcagccggcagattcaataaacttacttgcctgaaaaaaaaaaaaaaaaa

SEQ ID NO: 3868 - DNA, 698 bp, Macaca Fascicularis
  misc_feature (1)...(698): n = A,T,C or G
aaggatatattcggatggcaagaaataaaggaaatcattgtgggattgctagtttcccctcttacccagaaatctagagaggatctcttctttttataacaaatcaagaaatatgaagcactttctcttaacttaatttttcctgctgtatccagaagaaataattgtgtcacgattaatgtgtatttactgtactaattaaaaaatatagtttgaggccgggcacgnnnnnnnnnnnnnnnnnnnnnnnnnnnnnnnnnnnnnnnnnnnnnnnnnnnnnnnnnnnnnnnnnnnnnnnnnnnnnnnnnnnnnnnnnnnnnnnnnnnnnnnnnnnnnnnnnnnnnnnnnnnnnnnnnnnnnnnnnnnnnnnnnnnnnnnnnnnnncagctacttgggaggctgaagcacaagattccttgaacccaagaggttgaggctgtggtgagctgagaccacaccactgtactccagcctggacaacagagtggagactctgtttcaaaaaaacagaaaagataatatagtttgattcttcgttttttaaaatttgcaaacctcaggaaaaagtttgctaagtaaattagtagtgtactatagatataactgtataaaaattgttcaacctaaaacaatctgtcattgttcattgttttattttatactctttgtctttttaagacccctgatagccttttgta

SEQ ID NO: 3869 - DNA, 770 bp, Macaca Fascicularis
  misc_feature (1)...(770): n = A,T,C or G
agctggcannnnnggggagcgaggctgannnnngagctccgtggagaccgttgtggtgagggctgccacacagggcggagcagggtggccgagggcacgggcgcctgggtctgtcccacggggcagcgctttggggtggtgtaggctgtgatgctctgggaagcccgcttgggtcctgggtctacagagggccctggccccggagcccagccaactcttcctctctcagggcctggagtcctgggggagcccagccggctctgcctctnnnnnnnnnnnnnnnnnnnnnnnnnnnnnnnnnnnnnngttgcactggcccagggaggaagcgggggttgtcaggtgggctctcctgggggtcctgcagtggcagaggtgaggaggggattatccgaggnnnnnnnnnnnnnnngtcctgtggtttcccttgcccgtctgtttctgatgaggtgtacggatgagtgacctgcgctaagaagtgagttaccacagtgaaaatgggttggtttttgtcttcgacgctcagggtnnnnnnnnnnnnnnnnnnnnnnnnnnnnnnnnnnncacggggagctccgtgtgccagcctgcggctgccctgctgtgggggtcctgggggcggcgagcctccttcagtcttgttctggggaggatggcccactccggggagggggtgtgctgtgctgagcgctgtatccctgaatatagtttattttttctacatttgaattctgttgtagatttatgtaaaaatacatcttttgaaaata

SEQ ID NO: 3870 - DNA, 668 bp, Macaca Fascicularis
  misc_feature (1)...(668): n = A,T,C or G
tgggtctcatacatgcatattgctaatatcattcacgnnnnngattttcaacaaagaaccaatttattaatataatgtacaaaaatagttggcttattttctgaattcagtctttgaaataaaactccttgttttggctgtgtttctgaatgtataggtgattcacctccaagataattttttaaagtcatttttgaagttgggaagtctcatgagagatgttgaagtatgtgtttaatcaagagtcatgatttcaaactagttttacatatgaagcagttagtgttctaatttaatgggtaaatgtgtgtttggataattaaatacccgaaaattttatccttaggtatatgtaattatttgcctcttatatgtcttaaagctatttaaacaaggtgttcaatgagccaaaacaattgtttaagtaattagaacagtacgtctttatcatagtgtctgtcatatgcaatgaatgtatgtaatactaaaaaatcatgacttttatcaaagaaaaaccacacattaatcctattaatcacgaaagcatagcactgtaaattaaaggttttctatgacgctcttgaaagtgatcccactgcttttctgttttagaataatattttatgctctttatttccatttctgtgaatgtgatatttctattttgt

SEQ ID NO: 3871 - DNA, 227 bp, Macaca Fascicularis
cccctcactcacatataaaaaaaaaagagagagatctctagaagaggagcacatcacaatggggcttctctctttgtgtatttatataacacttcacccacgagtctcatctgagagtgatatataatgcgcgccccatcttaaactcacactccccaatatcgtgaccacaaaaaataaaaggagaaaagagttttttagagctcgcgctaagagtgtatatatat

SEQ ID NO: 3872 - DNA, 672 bp, Macaca Fascicularis
  misc_feature (1)...(672): n = A,T,C or G
tctagcaatttctcnnntgggaannnattctacatatatattcannnnnnnnnnnnnnnnnnnnnnnnnnnnnnnnnnatttcactttnnnnnnnnnagcagaagactgcaaaatagtaagtatctacccaaaagggtttaagggattagtttttggcatatcagcacatgataatactatgaagccatagaaaagggagatctctatatgtattgatgtggggctgtctttaagttgtactgtggtgttgaacaaagcaacatgctgaaaatgtctatcttattcttgtagaaccaatataggtatgtgnnnnnnnnnnnnnnnntttggaagtatacctaaaaaagtggtacagtgtttgactccaggaaagagcagatgggtgccagggtgaaaaaagatagcttttgcttcttacgacttttggattctgtaccacataacagttttgatgtaaattttgctgtgtgtgtttttacttgttcatgtaatgattttataaattactcttttagttttctatcaatcaatatcctgggataagcccctcatgatcataatgaataatgatgtgtggagagtggggaggggttaaatttgaaaaatgcagaaaatacaaaaagtgtttatatatacaaaaatataagtgttaacatttttatatttgcttc

SEQ ID NO: 3873 - DNA, 725 bp, Macaca Fascicularis
  misc_feature (1)...(725): n = A,T,C or G
gacagagtgagactccatctcaaaaaataaaagaaaatcaagataacctcttaaatgtagtagctcatagcactttaatttggcaagctatttttcctgttttattataagtctatattagatgtttgaatgtggtttgaaatatttcactaccatgctgaaaaagattggttgatagctcttcggagtgctaactggaagacaaaatcatgtctcttgctgataacctaagagcattaaactctgagtccagtgaggtcatagcagtgtatgctccttgcccttacggagtgtccatttttagaaatttannnnnnnnnnnnnnnnnnnnatatgaccaggccctatagccacataaaaataaatttcatagaaaaattaataaaagcagannnnnnnnnnnnnnnncagaggcaggcacccaaagaaatacaaacactgcctagctgctgccatttctgtaactgcccagaaggatgacagatttctgaaggggaaaggattcagatatgaccttttctttagtcccaaccactagttttaacaaatgtgaattattgaaatgtgaagggacaaaaagaatcatacatttaaactgtcttgttcagcacaccagtattgtatgttataaatcatcatttctaaatctggatttattttgttgtgtttttgactgtttctaaagtaagtgtatataaaagttgtctccttttaaaaagatcata

SEQ ID NO: 3874 - DNA, 726 bp, Macaca Fascicularis
cacacaccaattaatttatagaatgggctcctcgtttacatctcagtcacagactcaaataaattgtcagtttgtccttttatgtttgtttaatattttacataaagcgtctattccataaaaatcttcagaaagagtttcccatttaatttttgattttaaagaattatattggataaggcagttttcaccataagctaatttactctctgcagctgtctgcattcttcacaaatcatgtgttacgttcaagcctcttttacatgtcaacttgtgacaaatataaacgtcagattttatatttcccttgtagaaatgtgatcaacttcattagcgacttataactattttatgtgagattgaataattcagcattcatgtaaacttatgaaataggtatgagtaatggcctttgttaatttttttaagtattgttttaaaacttctgaggatatcagttattcacaaaataaagggaaattccttaagatttctagtttacctttagccatcttgccactcattcttttgctatacaaacaagtttttcctattaatgagtttctggagtgtgccttattcaggacaatatgctgttttagattttgtttaatattatatgatatatacattttgatccattgctaacagcagatattccctttaagagttattctgtctataggatcatagttgttaaactgcatggatatatcttggcagaat

SEQ ID NO: 3875 - DNA, 602 bp, Macaca Fascicularis
  misc_feature (1)...(602): n = A,T,C or G
gcgccgagctggaatatgacnnnnnnnnnnnnnnctggcatggctttgaatgaggcctgaggccccgcctgccccgggcccctcagccttaaaccccgccttgtccccccgacatgctgcgtgatggtgtggcttcctcgcccctatctggggtgggcgtgggggtggagtggccttgcccacgcctctcacctctgccttcatttgtgccgccaccctgcccctcccgcgtcctcctctcccacttcctcctctctgtgtgcctcagtctcctgccggaagaaatgggttgagcccgaaacgaggatgtttgaggaagggagagggagggcctggggtgggtttcccactccccaccccaagccataggggctccaaccagggtctgggagaggatggagctggctctgtggcgtcgtggccccattactgctgctgctgccttgcttcagccacctctcctgcccctccctcgtccccactgctgtccaccatgagtaggagggaggtgcagtccccagccccccccccccagccctcaggtctgtgttacttggtttttaagcgactggttgggatagaaccnnnaaaagaaaataaaa

SEQ ID NO: 3876 - DNA, 714 bp, Macaca Fascicularis
  misc_feature (1)...(714): n = A,T,C or G
gtattcatcaaannnaaaagaaatagaaattcctgaacttctgtctaattaggtaaaaaggaaaaagacccatgctcccaagaaaacaacaagattgcatgtcactttcctttctgggcttgagggaagccagctcttccacggtcagaacttgcgggcacacagcccgtgcaccgctcagaaactcccatcctcaccaaggttcaggcagcttcaagtcttcttgatctgtggaaaataaagttttgttttatagaatgttactggaagtgtgttctagatgacattctcttgcttgtggagctcttaggttttgtggctgcgctaagtttcttttcttagaagggctggcctgttggggcttcagacagggcagcaagagcctaggtgggttcaagggccttagccccctgtggcagtaaagaccaacatctcctcacacttctcccattgtactgagttccaccagtggggagaacaggccagcgtgctctttgtcagctgttaggtcttagactgttcgtttaacttctaaaactcaacttgctggctcatccctaggctgggaggtgattgtaggtcagggaacatggacagtcaggtagctgccaagacatagttttacggattctagaccagcactttccaatagaacttcctctgttgatggaactatcctctgcctgcttggtgcagcgcagtagaactgaccac

SEQ ID NO: 3877 - DNA, 770 bp, Macaca Fascicularis
  misc_feature (1)...(770): n = A,T,C or G
ttaaaatcannnnngcatcagctgctgaaacaacaaatannnattgtttttatggaagctttgcatagattcnnngagcaggattttaatctttttctaactggactggttcaaatgttgttnnnnnctttaaaaggatggcaagatgtgggcagtgatgtcactagggcagggacacgataagagggattagggagagaagatagcagggcatggctgggaacccaagtccaagcataccaacacgagcaggctactgtcagctcccctcggagaagatctgttcacagccagactggcacagttttctgagaaagactattcaaacagtctcaggaaatcaaatatgcaaagcactgacttctaagtaaaaccacagcagttgaaaagactccaaagaaatgtaagggaaannnnnnnnnnnnnnnncccccaggtgccagttatggctataggtgctacaaaaacacagcaagggtgatgggaaagcattgtaaatgtgctttaaaaaaaaacatactgatgttcctagtgaaagaggcagcttgaaactgagatgtgaacacatcagcnnnnnnnnnnnnnnnnnnnnnnnnnttgtattgcaaatcttaacttgaaggagtccctgcctcaatttttcttatttcatttctttgagtgtcttcattaaaagaatactttaacttccttggactcattttaaaaaatggaacataaaatagaatgttatgtattattattcccactctacatactatggaatttct

SEQ ID NO: 3878 - DNA, 394 bp, Macaca Fascicularis
gcagcagggcagtttgtcgttggtggtctggaccagcctcccccaccagcgcaggaactcgttctttacctgttgatccagaggcatgaggagctgggcgatgatgggtggcagcctaaacttccagtgcaatggatcatcgatgtgtttcctggcggcagcattcctccctgcggaactaagtcctgtagtccagcagagcataaggtattggggacgaagagcaaaactttgggtagtaattttgttatttcacaaatgttatatccatggaatcagacagtatgtcccttttaaagatcgacttactgtttaaaattgataatttatttgagtttcattcaagttgtctcacgagtcagtagattgttctttggaatgttgggtagtattc

SEQ ID NO: 3879 - DNA, 639 bp, Macaca Fascicularis
  misc_feature (1)...(639): n = A,T,C or G
acgctgcggaacagcagccaccannntccactcccaacnnnnnnnnnnnnnnnnngtggcgttgggatggccccgcccctcgctgcaggggaaggccccaccctctcttgcagacctcgccctccggtgacgtcacgcgcgacagcaaggaaatttccgcccactgcctgacggaggctgcgtagtatgggtggaagcgccgagggaagtcgggcgccccctcgcgggaggcggctgtcgcctnnnnnnnnnnnnnnnnnnnnnnnnnnnnnnnnnnnnnnnnnnnnnnnnnnngacaggactgtctatgaaattccgagttcacacatnnnnnnnnnnnngaggatcctcccctttacagaagaacccttcacttcgcgaggcgattcataatagattttactcagtagccagcccaactacctaatagaaaatgtactgtccccaaaagtttatttcattcatttttcaaggacacagtaattgcgtagaactgtgaggtaccctccagtgtgccaagaactgtgctggacttttggaagagtcaaagaaatgagagaccgactcttccccctgaagaatttataatctannnnnnnnnnnnnnnnnnnggaatgctgcagatagttaaaactgggt

SEQ ID NO: 3880 - DNA, 725 bp, Macaca Fascicularis
  misc_feature (1)...(725): n = A,T,C or G
attcattcttntaattctttgttgctggtaaataaatcatatttaatatatgaccctgtatctaatttttcgcttgtatcttacctccagtaaaatgctgaatggaaaagctgatggcagaaatacttgtgttattctcagtattttactatgaagcataatttagcccgaggtgtttttgtttgttggtttgttttttgtttttttgagacagggtctcactctgttgcccaggctggagcgcaatggcgtaatctcagctcactgcaacgttcacctcctgggttcagatgattctcctgcctcagcctccctagtagctgggactacaggcaccagccatcacacccggctaattttcatatttttagcagagatgtggtttcgccatgttaccctaactggtctcaaactcctgacctcaggtgatccacccacctcggcctcccaaagtgctgggatgacagttgtgagctaccgcgcccagcctgccctaggtttttagtagaaacattttatcctcttagaaaatttcttttcctagtttgccaaaagttttgagccataaatgaatgttgagttttatcagatgctttttctgtatctactgagataataacatggtttttctcccttattctgttaatgtggtgaattacattcattgatgttcaaatataaacccaaatttgccttcctgaaataacccagtttggtctttatat

SEQ ID NO: 3881 - DNA, 744 bp, Macaca Fascicularis
  misc_feature (1)...(744): n = A,T,C or G
tccttaatagaaaaatgactgatctcccccaaggaagaaggaatttggctagcagactgcctttgaacttgagccataatatcaagtcttccctgtctaacctgccagcccaccctgcagattttggactggtgtgagcccatttcttaaaataaatctccttctgacacacacacacacacacacacacacaccctgttggttctggctctgtttctttagagaactctaatacaggaggattaaatgataaaaaaatataatataatgacagatgccagacagagtacaaactgtgtgattccatttgtatgaacttccagaaaaggcaaatctaatctatagtggacaaaagtaggtctgtggtagcccagggctgaggttggaggatggactgaaattggcacaggagactttttgggatgacgaaatgagatgtggttttgtgggtatagacatttgttaaaactcatcaaattgtaatcttcgaaattggccaggtgtcnnnnnnnnnnnnnnnnnnnnnnnnnnnnnnnnnnnnnnnnnnnnnnnnnnnnnnnnnnnnnnnnnnnnnnnnnnnnnnnnnnnnnnnnnnnnnnnnnnnnnnnnnnnnnnnnnnnnnnnnnnnnnnnnnnnnnnnnnnnnnnnnnnnnnnnnnnnnncagctacttggcaggctgaggcacaagaatcacttgaacctgggtggcagaggttgcagtgagctgagactgtgccactgca

SEQ ID NO: 3882 - DNA, 667 bp, Macaca Fascicularis
  misc_feature (1)...(667): n = A,T,C or G
ttttagcttnnnnnnttgaaatgggcattttgaagcaagggtcaagggacagcttctaaaggtgtgagtctctgacctgagcatctgggccttgcctcagccttttctccccaggggtggaaacctggacgggccagcagcgccccggggtctgcccaggggagtcgaggcccccaggtggtaaggcctattccaggaggagggggatcttagccctgttcagagcaagttaatgtgtccatccgcctaaccctgtcctgagaaaggacctggttttggccaggacccgacaaatgcctaatggcagcagtgttagcagaccagaggtgggcgcccttgtcattgaggccagggacagctatctccaggttatgcctggccccaccaagcagggagttggggtccccccacaggctgtgagctctgtgggccctgggatgtgatctagctcagatgccctctcgtccttgatgtcacagttgagtgcacccaagtgacactcactggcagccaggggcacagcctggtggtggtggcggcaatagaaccgtgctcctccccagctcctcgcttcccctcccacaaccccagccttactccaccatgcagacnnnnnnnnnnnnnnnnnnnnnnnnnnnnnnnnnnnnnnnnnnnnacactggtgatt

SEQ ID NO: 3883 - DNA, 615 bp, Macaca Fascicularis
cggacgcaagatggcgacggcgaccatagctctccaggtcattggccagcaaggaggggggtccgagccggcggcggcggcggcagtggtggcagcgggagacaaatggaaaccgccacagggcacagactccatcaagatggagaacgggcagagcacagccgccaagctggggctgcctcccctgacgcctgagcagcaggaggcccttcagaaggccaagaagtacgccatggagcagagcatcaagagcgtgctggtgaagcagaccatcgcgcaccagcagcagcagctcaccaacctgcagatggcggctcagcggcagcgggcgctggccatcatgtgccgtgtctacgtgggctccatctactacgagctgggggaggacaccatccgccaggcctttgccccctttggtcccatcaagagcatcgacatgtcctgggactctgtcaccatgaagcacaagggttttgccttcgtggagtatgaggtccctgaagctgcacagctggccttggagcagatgaactcggtgatgctggggggcaggaatatcaaggtgggcagacccagcaacatagggcaggcccagcccatcatagaccagctggc

SEQ ID NO: 3884 - DNA, 2033 bp, Macaca Fascicularis
gagagaggagagggagaaggagagaggggcagaggagaagggagagagggagagtatgcgagacggaaaggagcgccttagagtctctgaagcacgcaagaaataacagattaggaatttttcgggcaactgtcacccggataacggtcagagaatcaccatcaccgcaactctgacgtttcctacaagaagttagagacttaagcagtactggcatcggatggaaatggtatgcttgatgctgtggaaaatatccctgagctgaagaagtgcaactgaatgttgtgtgtgtgctacatacccagaagaacccagacccagtggggaagagagacgaaatgtggagagaatgactaacgacaaatccgtgaatttgttctctggagttgctaatttgccagtccgaagcaacacattttacagggaggaaacgttttgctgcttctgatttctccccaaactggtgctaccagatgcatggctttctatgtgttggaacaaatcattcctaactgcagcatactgggaaaggagaaaggttgaggcaactaactggctgtctccaaataagtgatgagatataatgcatcctccagtccatgcacgcttcctcttccaatttgtgcatcattcctcagtggaaacctttaaataatactactgggctgattacagttcagaggtccttagatagagaggagacagccattcacaaagtgacagtgctggctagtgatggcagctccactcctgctcgagcaacggttaccatcaatgtcaccgatgtaaatgataaccctcctaatatagacctcaggtacattataagtcccatcaatggcaccgtgtatttatctgagaaagatcctgtcaatacaaagattgccctaattacagtttcagataaggacacagatgtgaatggcaaagtgatctgttttattgaaagagaggtcccatttcatttgaaggcagtatatgacaaccaatatttgttagagacctcttctttgttggactatgagggcaccaaagaattcagctttaaaattgttgcctctgattctgggaagcccagtttaaatcagactgccctggtaagggttaagcttgaggatgaaaatgacaacccaccagttttcaaccagcctgtaattgagctgtcagtttctgaaaacaaccgacgtgggttatacttaacaactattagtgccacagatgaagacagtgggaaaaatgcagacattgtttatcagcttggaccgaatgcctccttctttgatttggaccgaaaaacaggagttttgacagcctccagagtctttgacagagaagaacaagaacgattcatttttacagtaactgcgagggactttctcacagcttgcatagccatccagagatccacagctacatcgctgaattgttaatgcacatttgtacttggtttctctgtatctattcacaggcaacaaatacttatatgtatgatctttcagggaatattttgtttgtttttaaaagtattgggaatcagattaagacagtcggtttcagagaaccaggaggtttggggttaagagatacttaaaaattttcacaagccaagtagggcatatatcagatttggccaactgattggcatctgtcctgtcatccatacggtgcctggaaatattcaccagtcaaggtcaaggtcagcatctgtggttaaaaatacagcattctgacccaaaaaattattttgcagatgaatgtgatttcaactcaggagctatccaaatgaggattaaatattcattttttttcctatttttagacatcaattctatagattctaactttttctaacctcttcttgacatgctaaatgctggcaaaaagaagtgctttttggatatggcaacacttgtaaaaataaagcagtaagcaaaatccttttaaacacagaaatcctgagttcttctcattggtggactcaagcaattctgtagcaaataaatcctttgaaagagcaaaaaaaaaaaaaaaaa

SEQ ID NO: 3885 - DNA, 722 bp, Macaca Fascicularis
  misc_feature (1)...(722): n = A,T,C or G
cgtnnnnggccatctcccaggctgcccaccacagcccccacgtggctgcccgtgtctgtgttcttgccactgtccctaccctccgggagtgggtctggtctcatcagggagggcagcgctctcttcactctgtccttactctggtgttttactgtgattttaaaaactgaaactggaattgttacccnnnnnnnnnnnnnnacctgagtgggcctctgcgacgcccctccttctcttaagcctttccaagctgtctgacgatttttaagtcccatttcctgagtgacacagagcatcttcagcttctgagtgacttgtgttttcctcagagacaaaggggacccccaatctgtttgtttccagaggccctgatggtgtcgtcttgggagtggaggaacctgagggaaagtcccgggggcgagtcaggcgagagctctgccctggcgcccttgcacgtatccacatgggccacagctgcaccctgctctcagcagagcaccttgccatgctcctgggcacagccgggccctctcacctccctgcggctcctaatgcctcccaggctctgccgagtcaccttgggcacttagcgtggctgcagctctttgcggcccggtgtcctgtcatccatgtggcagtcatgtggtgacttttcnnnattgccctgcacaaggtccatggggactgggcacctttggccattctttcttcggttgtctatg

SEQ ID NO: 3886 - DNA, 1006 bp, Macaca Fascicularis
  misc_feature (1)...(1006): n = A,T,C or G
cagattcgagttgtnnnnnnnnnnggaagagtaatcacnnnnnnnnnnnnnnngcaggagctacaggattttcttctgtctcagatgtcacagcaccaggtacatgcggttcagnnnnnnnnnnnnnnnnnnnnntggcaagtactgagcttcagtaatcatgtgggacttggnnnnnnnnnnnnnnnnnnnnnnnnnnnnnnnnnnnnnnnnncctccccgagtggggactatgctatnnnnnnnnnnnnnnnnnnnnnnnnnnnnnnnnnnnnnnnnnnnnagtttcctcgtaaccaatgtaaagaccttccaaaaagtgatgttttacaagataacannnnnnnnnnnnnnnnnnnnnnnnnnnnnnnnnnnnnnnnnnnnnaaatggaaggtcgaaactttgtttataaaatggagctgcttatgtctgcacttagcccttgtctactatgattttttccagatgtttcctaaagaagttnnnnnnnnnnnnnnnatgaaatgtttgcagatcaactataagtacaaagaagagataacttgcaaaggagtgctgtttttaaaaacaataattaggaaatgtttatttagcactttgaaacttttcgctttataaatgacaagtgctttgaaatgcagaagtttatgtacagttgtatatacagtatgacaagatgtaaaataatatgtttttcatgcagtttaaagtattactaacttaagcgtttctatttgctttttaatattccttctttgatgtggacatcacataaagtgtgtggtttaaaaaatctccaaatactttttcttcccccaaatacttcctaaactgtttttttttttagatggatttcactctgtagcccagtctggagtgcagtggtgtgatcatggctcactgcagtcttgacctcccgggcttaggtgatcctcctgtctcagccttccgagtagctgggaccacacacatgcaccaccatgcctggctaatttttgtattttt

SEQ ID NO: 3887 - DNA, 717 bp, Macaca Fascicularis
  misc_feature (1)...(717): n = A,T,C or G
ggaatnnnannctgcagctccacgcaggtggccaacatnctgagcactttgtgcaaatgcctgtagagagcaaaaacatctccatccagaaccccttccccatctgcagagaccatgtccaggcctttcttgtgtctgcagaggtgaagnnnnnnnnnnnnaagggatcaaatgtagcacagtgtaaagaaagacatcggcgcgggtagagggaccccagtnnnnnnnnnnnnnnnnnngtggaaggtaagtatagacccacatctctgtcagggaggtggtcagggcagagtggcctgggtgtttagcagctgctaggggtgagggnnnnnnnnnnnnnnnnnnnaggccctcttcattgttgttgtaatannnnnnnnnnnnnnnnnnnnnnnnnnnnnnnnnnnnnnnnnnnnnnnnnnnnnnnnnnnnnnccatgtaggagggtgttaccttgtagaagaagctggatggacctggtgggagagtacagtgaggcagggtagaaatggtcagttgtttagggccagtggccacatnnnnnnnnnnnnnnnnnnnncccagggccaaactgccttaattctgannnnnnnnnnnnnnnnnnnnnnnnnnnnnnnngggagaagggtgtatccaggcttacctcccagcaggagtggtaccatatggtgtttatgtactactctgcnnnnnnnnnnnnnnnnnnnnntacagctc

SEQ ID NO: 3888 - DNA, 728 bp, Macaca Fascicularis
cttcactagacaccaccaaactgtataccaaagttgtaccaattctcacttccaccatcagtgtttgagagttcctgttgctccacattctcacaaacacttgacactgtcaacaaagcttcataacttttgcttcaggttttgtatgtctattattacatttcgttcaaggtaattgtgtatgctactataaatgaaatattggtttaaatttcattttctaagtgcttattgatggtgtatagaaatataactggtattttgatgttgatattgtatactgactttgctagtctctcttaataattttaatctgtagcttccttagaatttttctgcatacacaagcacatcatctgtgaatgatggcagttttacttcttctttaccaatccatatacatttctttttcttaccttactgcattgactgggacctagagtacaagaagtagtgagaagagacattcttgtcttattcctgaactcaaggggaccactttgaacaattcaacgttaagtggatgcttgctgcaggtttttagtaaataccacttatcagtttaaaaatgtttctttccattcctaatttaccatatgtttttaaaataatcaatggatgctgaattttatgaaatgctttttctgtatctattaagattatcatatgcttctttctcatttattaggtaaaatgctaaattacattatttgtgtttctaatagtaa

SEQ ID NO: 3889 - DNA, 703 bp, Macaca Fascicularis
  misc_feature (1)...(703): n = A,T,C or G
ttgtttagtctgcgtttctttgatttctattaataaaatatatatttattaaaccattggtttttctcctttgctatggtcttgtcatgtcctggttgatttcctaacaaaggcagaccagggaggtgtcagagttttctctctagggatgcatccatctgtgtgcatttgatacacctggtcgggcaggctcacatggggatcgcgctggctgcaaggccctggccgccctgggctgcaggtggtccacatggagctcagagacttgaccaggatttacaaacaactggaggctcgagctctggggccatgactctggcccacacgtcctccacccctaatcttctgtgattggggttttagtgagagctaggaggacagagtgacaacgttggccttgaggtgggactgggcaagaggagagtagtgaagggaccccagctcatctcagactttaactcactctgcacatcccctttctccctcctccggcagaggttttaaaaaccgtgtctgccattgtggacgccggctcctccatcaacctctacatgttccatggaggcaccaactttggcttcatgaatggagccatgcacttccatgactacaagtcagatgtcaccagctatggcaagtattcatcaacactgctctccctggtctgccgtgcatgggcatggctggngcttgctatggagag

SEQ ID NO: 3890 - DNA, 625 bp, Macaca Fascicularis
  misc_feature (1)...(625): n = A,T,C or G
gcaggtagttgaagctagtagaggagcccagtggtgccttgcaggacacctccatggttcttgagatgctctgcagccaattaagccgactgagttcctttcctcatgggggcccagtgtgcaatgactgcaaacagcagcttccttggtagtgtatgcagcctgtttgttgtatgggttgctctaagggaccttggagacaggcctttccgatggacattcatgtttctaactttgcattaccccaatgtaggctccaaacgggcatgcgaggtgcttttggaaagccccagggcactgtggccagggttcacattggccaagttatcatgtccatccgcaccaagctgcagaacaaggagcatgtgattgaggccctgcgcagggccaagttcaagtttcctggccgcnnnnnnnnnnnnnnnntgcagtccccttctcccacctttctttgccccaggccttctgactcaattctttccattgctccctagatccacatctcaaagaagtggggcttcaccaagnnnnnnnnnnnnnnnnnnnnngacatggtggctgaaaagcggctcatcccagatggctgtggggtcaagtacatccccaatcgtggtcctctggacaa

SEQ ID NO: 3891 - DNA, 735 bp, Macaca Fascicularis
tgacgaccagagcagctctctggggggtgcccctgtagtccgtcccacagccctctggtgctactcccatccccagcagcctgtgcctttgtcactggcgtacttttccagagctaaattgggcgcgcaatccctgcagagtaggactgcagccctgactgtggcccctggcctgtctttgttgcttgctgaagtccatgaacagagtgttgtttccctccagtggaagggaagcagggagctctgtggacttcacgctgcgcttggtctagcttagcagccccaagatcccttagtgaatcgaggcactgtgttgctttcctatgtgataatttcaaaggagtccctggcagtgcctgttgcccagaggctgcagtctccagtggacgcgggtttgtgtatagcctgagtcctctgggggctcagcgcgtgaggctcagggtgggatgggctcctaaaagatgcaggcctgcctgtattcaggagtacccaccggccctgcttactcctgcccaggccaagtggagaagttgttagatgaggtcttaagaggagagaggtggcttctttgaggtggtcgagtggcatcacaaacaagcattgaatggaagaaaactagaagaagcagagcctgtcgcaggttcaccatcatccagccaacaccgtgggaaatctcacatccaccactgtcaaaccgaggactttggacttcataactgctcggaattaaatgac

SEQ ID NO: 3892 - DNA, 317 bp, Macaca Fascicularis
ttaaagggagagtaggtgtgggagtatatgtatccgggtattaaaaacacaggcataaagtgggagaggagcttcacgcgcactgagaatatctttagagatatgcaaatctaagaggctttttaaatttctatctcagcgaaaaagaggggtttacactaattcaaaaacataattctgggtttgtgtgggggagctttttaatgtgaaatacacctatacacaggatcttttactctgagttttaaaaaaagtgatttttccctctttttttccctccatctcgcccctctttttttcaatatttcatagcgcta

SEQ ID NO: 3893 - DNA, 1366 bp, Macaca Fascicularis
  misc_feature (1)...(1366): n = A,T,C or G
agtacagctatatgtcacatttcaaatantnnnnncnngtaagtaataactgcaaccnnnnnnnnnnntttagtgctatgcctacttgtaatgggtagttattattttcagagctttccggaaatactgtcctaattggctgtgtttaggatctttgttannnnnnnnnnnnnnnnnnnnnnnnnnnnnnnnnnnnnnnnnnggggtgcttattgactcttagttgggannnnnnnnnnnnnnnnnnncntnnnnnnnngtnnnnnnnnnnnnnnggaaaccaccaccacaggaagaggctggaggctcccgtgccctgttcattccgtaagggccctgcttcccttatgaagttggcctgtggccctaaatatgcaaatgagagccgaagggttttaaaaggtagaaaggaaaagggcaggggcttnnnnnnnnnnnnnnnaacgactgacttatttattctctgcttccatttcttgtggagagagtaaggatagaaccaagaaggggctgagtagctgagaaaggggccacccaagagtggaacacactttataccagaggagcagggagcctcatgcggcacattctcattggttctttgggtttaataattttgacatcttttcactcatgcacaaaaagtcagaactggttttatttactgttgatttcatcctcnnnnnnnnnnnnnnnntgaagcctagaggaatgaactagtgctactgaactgtttaaattatttttgtgttaatagtacactttgagtatctttttccacattaaaaactttctgaattataaatgttttccttccattatttaacaatgtacactgtttaaagataaaaattcaaacttcgggggtttcccagcagccgttaattgtacattttgcactaactctgggtgttgcgcttcttgtaagattgcgctttgtgcttcagtttgttacctttgtagacttatttaatgaaaccattcaaataaaccaaacttgcttttgttgagctgtggggtttcatttccagaaaattccttcacattctcattggcactattttaagtgcaattgataactggattcctnnnnnnnnnnnnntcttttgctgcctcttcatcttccaaaggaatagannnnnnnnnnnnnnnnntagtactttcagacttccttatctcaggttcacagcttcccaaatgggtctgtgagccaaaaaataagaagtcactgcttcaagattaggcacagccaagccccaaaataggtctaaaaaaaaattaaagtggctggatgcggtgactcatgcctgtgagtccagcacttttggaggctgaggcaggcagatcacttgaggtcaggagtttg

SEQ ID NO: 3894 - DNA, 735 bp, Macaca Fascicularis
  misc_feature (1)...(735): n = A,T,C or G
gannnagggcagccaannnnnnnnnnnnnnnnnnnnnnnnnnngaagcagcgccagagaggggacctcccagctcttatttgcaccctccccacctcaccacctttgctccctctctgggggcatgagtggttaacaaaaaccagagtagtactccaatattggagagtcactgggggctnnnnnnnnnnnnnnnnnnnaatatcctgccttccctcccccatggtctcagggcccccttagggcccctaccccactgatagcttcgtccttctctggcacaaggggagccccagggcttgggggagggggtaaggtggagggaaatgccactnnnnnnnnnnnnnnnctcccttccagaattaaccagcctgcctcctgcaccccacccccaccaaccaggggagccactaagctgacgtaacaactgtcccctacccaccagctatttccccagggtagagtgggcaannnnnnnnnnnnnnnagtccccgcctgcccaggccgttggcccagaggctgagtggacggtcaggagagaggcnnnnnnnnnnnnnnnnnnnnnnnnnnnnnnnnnnnnnnnnnnnnnnnnnnnnccagggtaggggtttccagcttccccaggctcccgccttgtcagtctctttgcatgtgtggatttttctgtgtgtgtttgtttgggtttttgttgttgggtttttttttctttttcttttttttttaataaagaaaagaa

SEQ ID NO: 3895 - DNA, 522 bp, Macaca Fascicularis
  misc_feature (1)...(522): n = A,T,C or G
tagaagggcgggagctgacccaggccccagcagagtcctnntctcnctcaggctgtgggagctggcagccccggaagctgccagtcttcaagtccctccggcacatgaggcaggtaggcagcaggggcaaagcacatcaggaactcgggaggagagcccagccgtccctgcccacacgccttgcctctggaccctgcatcttcaaaaccctgcaggaagtgactgacagcctcctcagtgggtggctgggggcacggggtgtcgggggtattagccctaggatcagtgctcacctttcaatgatgacctaagtatcttcaaagaaaagcccacatagttggcatcccatggtcctctaatcctctaagaacctcctaaaggcattgaacagcaccataattggtttggatgcagcctggaccctgcccattgaaagtcatggtcattcttggctgggtgcggtggctcacacttgtaatcccagcactttgtgaggccgaggggggcggatcacgaggtcag

SEQ ID NO: 3896 - DNA, 2112 bp, Macaca Fascicularis
attttgtgtttggtgaaaggtaatagattggcagcactggaaaatgaattactgtattcccagaacaggtataacccagcagtgacacgatgaaatttctctctgcctttggggaccattagaatactattcaggaagtcactgccctggtgtgctgtgctgaactcaccagtatcctagtggactgaaataattaacatagcactccaagggcctgacttgaggccattcatttattcattcaatgttatggagtgcttactatatgcctgatgctgggagaagactttcacaaatgttatatcatttaatcctcacaacaaccctgtgagggagataatattattgttttacagagaaggaaactgaggttcagagaaatgatttgtccaagttgccatgcaaacactggatccaagcttatctgactccaaatccagcattctccctgaactgagtgctgtaggggttgcaaagggggagagatgagacatatggtcaaatggtgtgacacagagcagaatgctctacactatgagcactcctggtggttacagagcagttaaatgacctaccccagatcaaatagcacagatagccttaggattcatattctttaggtcttcttccattttttgttttttaacttagctctccaaaccagcctacctctcttcccaccctaccccctgcccagataatgtacactccgcttgctaggtcatctggcctctcagaatgaagagagccaaagaccattgggatttagtaacaagagcattgcattcgaattagaattagtgttctaattctagctctgacgattcacttcaggccactggtaaggtgccatgcaaacactggatgactttaattctggatgactcactttccgttgtgtgaatgagaatggtttacttctaagaggtatagtgagagataagtaagaatatgctaaaaatagtatgcagccctttctgttgccaaggtgacacgtaattgatgagtagaattacctactacaaggcatgttagaaagagatgcccgttagaatctatgtttctatataatagactcagcagtgagagaaaagatgcccctttaaaatgttaagaaattacgtcacaaaaattgaaacagcaaaagagatatgaggttgtttgctggttggttggttggttggttggttggggagcttaaggtttgtcttttattttatggatttggtgttttttttgtttcatgtttttggaagttcatggaaccagtgctgcttgtttgatgctaaaagcagaaaaagaaacttagagaaaattaaatgtcttctgaatatgtccaggaggcacccatgttctccaacaaaatgacacatcatgctcactgcaaggcaacctccctcctcccaaatccctgcatccctgaaccatttgtaatagatattcagaagtcactgaggcatttaccatatgctgcatcccctggcaggttgagttgttgcagaatgagtcagcagtacctgagctcaaataggattgagagaatttagagaaaacatacctatggaaagttgaacggctcccatttgggactgactagtaatactttgggtccttaacacagtctgcctctcaatcccatcaaatgcaataggtttaaaatttatgtcttagaaaggggttttgctgctggcaataacttttctcaggctgacattgataattcaaagcgttagtagcaaatatttttctcttctatccctctgcatcctacccttcttggtttttcaactttgaatttctcatttctttaatctctattgagggagtctctagagggtgctgagagtgtctgttggaaagcatgaagatgacaaggctggtttagactggtgtacaaggtagaaagtcaggagactaaaccttctgggagcatgaacccgtcagaggtcttgctagagggacaagttagggttaccacactccaccaccagtattggttaagggtgactataacgccattgctctggtatcccattgccctgagatgaatcttttaggatattgattatctaaataacaacaacaaccaaaaaaaaaaaaaaaaaggccaca

SEQ ID NO: 3897 - DNA, 2646 bp, Macaca Fascicularis
gtggcaaccggcaatccttggctctggcttaggaggaactcagctagaacggcaaaatggccctgagcccctggaccccagggctgggcgctggcgagaagctggtgcaggcggccgccgtctccaccggcccctccctggagttatgcgctttcccctccaccctgggcccctctgtcgccgtcgaggcactggagcagctgtttgttgtggaacgatcactgcaaagtgactattttaaatgtaatgaagaagctaagatctttcttaaggacattgctgtagctgttaagaaattggaagaaatgagaaaagccacaatcgatcttttggagattgaaagcatggaactcaacaaactatactatctattggaaactcttcccagtagcattaagagggaattggaagaatgtgtcagagacgctcgcagattaaatctttttgagataaatacaataaaaatgagaattacaaggacagaaaatgaaatagagcttctgaagaagaaaataactgacctgaaagaatataatgaagctctgggggagaagcaggaagagctagcaaggaagcatgcaaggtttgtgctgtcactcaacaaaattatggagaaaaaagccaccaccactgtttacataaatgagacttatacccaaataaatttgaagagagaagacatagcattgcaaaaaaaatgtattcaagaggcagaggagctaatggaaaaagaaagggcagaatatttgataagaaaacaagagttgactgcacagattaatgaatttaaagatatctgtgaaataaagagagtggagacttataaaaagaagaaagaattggataaattacaaactaaaatgtcaaaaataaaagaaacagttactgtttccgcagcggttcttagtgatcacaatttagagatagcacgactacatgaatcaataaagttttgggaacaacaagtcaatgagctaaagaaagcccttgcaattctggaggctaaactgtgttttttcgcagataacaaagaaaaactggatgatacatctaatgatgaaaaaaatgaattcctgaacaagataaaacagctggttgaaacactgcatgatgctcgtatggaatacaaagacctacgagagaaaatgaaaacccttgccagacaatataagattgttttaagtgaggaagaaaaaacttttttgcaaaaacgaaagatctatgatgaaaatcagaaacagctgacatatattactcagaaagaatactttctgtcacaaaagagagtagacatcaaaaatatggaagaaggactcatcacactccaggaacttcaacaagcaacaaaacagtataccagcaacaaatcaaaatcctgagtgctaacctggaaagagaaagtcagagatgtgttataactcagtggaaaatagcttgcttgagaaaaaagcatgcacgttggacagctcagataacagctgagatacaaactattacagaaaaaattcagaatgcagaagctagacgaattgaattacttaacgagaccagtctcagagaaaaggagatcaatgactttgtggcacagattgaaaaacttacaatagaattgaaagaagaagagaaagcatttgttaacaaagaaaaaatgttaatcaaagagttaagcaagtatcaggaaatatttgttaaggaaacacaaattaacaaagaaaagcaagaagaactagttgagtgtcttccacaacttcaggtggcagaacaagagtataaagagaaaaaaagaaagttacaagagctcagtaatgctattacagcacaaagacaggaggaggatttgctgaacaatcatatttttctgtttacaagggatttttcaagatacattagcaacacggaggatataaaacaagaattaaaacaattacgagatcaagaaagcaaaaaaaccaaagatcattttgaaactctaaagaacttagaaaatgaattctatataaatgaccaaaaagcagatcttctgctcctggaaaatacaaaattaaaagaatacattttatacttgaagaataacatagagaaatacagaaaaggacaagaagccctcatgcacacctcaaatgacttgtctcggcaactaatagctcaggaggcacaatataaggatttgtgggctgaatttcagaccacagttaagatcttggtggacaatggtgaagagaccttgcatgacatgaaaaatctaacagacaagctgtgtgaaagagatgaaaaaatgcagcgtgtcagtacatggctacaagggagtcttgaagggctgcgttcgcttgtgaaacaggaaccaccaatggaccttgttaaaaagaagaaacacattcgtaccaagagttcatttcccagtggttaaatgtactgagaaaaatacattaacaaagaataactaacaaaataactcaaggatacaactgctgtgaattcaaaagacaaacacaactacaggaaaagtgagtgcacttgctttcacattttgcagctgttaatagaagtcttaaacatttagaatttaactaacacaacctccaccaagtagcagaatcaataaataaaattctaaacaataaaaatggaaaaaaaaaaaaaaaaaaa

SEQ ID NO: 3898 - DNA, 735 bp, Macaca Fascicularis
  misc_feature (1)...(735): n = A,T,C or G
aatnnnnntatttnctttgtagtgctatgangtcnnnnnnnnnnnnnnnatataaattgcattctccttgcttatgtgggtagaatgggaagagaaggcaagacaaagtatacttaaattctatgcatatttctgttatgctttctgtttttttagttgattctgaaatgaatacgccctattcttttgaaagaatggccttttagttgtatagccaaagacatttagtattttccggttccttaaggtattactgtaccattttgtaaaaggaatattattattattatttttaattatttggtaaatattttnnnnnnnnnnnnnnnnnnnnnnnnnnaacttagataatgtcagaactaaggtgatttttttttttaattttgaaagaaccagccaaaatgaggtgtgaatttgtcatactgttacattgaaattggtaacaaaatgtatcccctcccattttgagttttagggtaaatgaaaattttattgtattttaaagtaatttctaagtgttagcaagactgactgtaattccagtttctgttttctatggacagacttgataaactggagaccctaaagcaggaatacccaaattatagtgtcaggattttagctgtaccagaggcctttatgtgctacacataatttgtataaaattttatatgtgcagattgggtacatannnnnnnntccatttttctaagggaatgcaataaatgagcatcg

SEQ ID NO: 3899 - DNA, 728 bp, Macaca Fascicularis
  misc_feature (1)...(728): n = A,T,C or G
aagtcaacataacttgaagatgtgtctttctgtggcccatggtccgctgtgatgacatttagannncatttgtgctatgacctttggctcatgaaaacacaaatttaacattgccaggttctagtgatttaaaaccacaactgcccacgtggtggaaatgtgccctcgatgctgatttgtggtgtgctgctgtccacagataaaccagtgccgttagatggaaggcagaggacgctgcggccacccccggcagacggtggcgtggacaccagatgcgccctctggggctcagagcaacgggtggtcagctgcgaacagtctcgtccgatgttaggaaatggtcctacggccacgcctttgtgttcctgtcttctctccaccaccaaaagcaaaagacgatttcccattcactgcggtcatctgactcattttattatctgtgctagtgacaaggaatgtcagaactgccaaaggataccaagtgatcatatgnnnnnnnnnnnnnnnnnnnnnnnnnnnnnnnnnnnnnnnnnnnnnnnnnnnnnnnnnnnnnnnnnntgagcacccttgctgtggtgtaaacttcctgttatttaatctccccacaatttcatttttctcttctgttaagttacttagaactttctaagaaactccatgaaatgaggaaatactgtttctaataatatgaggaaagaggtaaaaatgttcattccannnnnnnnnnt

SEQ ID NO: 3900 - DNA, 1934 bp, Macaca Fascicularis
ttacatctcaggccagcaagatcagctgcttgaagctctgtataagagcactgcactgatggtttggagacctgggcctgggtcctgatttttccactgactaagctctgtggccttgggcaagtcattccgtctctgagcttcagtatcctcctgtcacaggagggagtggggctagatcatctttaaggtaggttctagctttgacatcatcttgggggttaggccagaggctgagaagactgagtgcaatttctcagttactctgccaggagggaacaagcccagaggctgaagcttcccagtatttagaggcgtggtagggcagtgtctgcattcccaggagacccagggtggttaaaatatattctttaggtggctcggagggctggggaggcccagtgaggcgggggggatggggggagagagagagagagagagagagagatcgatcgagcttgatgtattgctcagtattcacctagaaaagtttcttccttctttggcctagtttgtggagggatcttcctttggactttctctgagttgggagaagaacattcttttcaatggagctcatcttctatctctaggctctgtgaagcctttcatctgtctgtccttcctccttactggtagaagaaacagtggagagaaaccacttctggtcctagcacttctctttggtctagatagggtttggatttagtatgaagctttggctaaaacccttgggtttgccttagagcactgaactaagaaccacatacactgacatggcgaggaccaagagagctcaagaggagtgctttgtgagaagtggattctctccgtgtccctgcccccacccaaacttgaacatacctattacatttccaggcagcatccccaggatgaggtcctggagaagggactaggggaagtatctttctggatgcttgtggtcccagaagggtactttctgtgccataccatgtcgcttctttaagctctgcagggcagccaaagccagcccttttctcctactgcccccaggagaaatagcactcttctccctcccccagatggcagggctctggtctccctacaccgcataccctgcctgcctcctccaggaggaaactccagggccccttcctgactctccccaccctcaccacttgtctctaggctatgggacaatcatcccattcaccacttcacatccttgactttcattcccccaacctccagcaggttggccccaatccccttcacctctgtgttttcttccagaagatgcattttgggtctgagaggagcattttcctggaaggccatcttttaagacccctgcttgctgtcatagtgcagagcaggaatttgcaactgtttagagagctcccttcccaccgctctgcccagccttgttacctcacttctgctctggccatagttgtgaagggcccagccagctccctgttttgatgttctgtgcaacagctctggggtcttgtgactggagatcctcagcaggccctggagcccggactggagtcttggcagctgatgagcagcaccttgccggccaggaggagctgatgctggacgatctccccaacatttgaaggcttaaagaacattgtcattcttcagccctccttgcttctctcaatacaataagacattgcagaagcaaaagggtggcctctgctccaggcaaggcagctgactgtctggggcattggcctggggcttgggtgccacgtgctgagattgcatagtcaaagcagccatttttgccaacaatagcttgtggctccccacattttcctaccctgcacttaaaggccagaccactctctgcatggaccagaccatcttcccaaacccatggtgctttttccccaactcaacctagactccaaggtggggagggatgggtcagaggccat

SEQ ID NO: 3901 - DNA, 360 bp, Macaca Fascicularis
atggtcccacggcggaacccagagcccttaaggtttctgccggatgagtcccggagcctgcccccgcccaagctgaccgacccgcggcttctctacgtcggcttcttgggatactgcgctggcctggttgataacttcatccaccggaggccgatccggtcggctggtttgcatcgccaccttctatatattacggccttttattttgttggatattatcttgtaaaacgtggagactacacgtatgctgtgagggaccgtgaaatgtttggatatatgaaattacatccagaggatttttctgaaaaagagaagaaaacatatgctgaaatttttgaaaaattccatccaatacgttaa

SEQ ID NO: 3902 - DNA, 757 bp, Macaca Fascicularis
  misc_feature (1)...(757): n = A,T,C or G
caggaaannnnacactttgtgttaagaaaacaaggaaagaggcctgacacagtgctcacgnnnnnntcccagcacntnnnaggccgaggcgggcggatcacctgaggtcgggagtatgnnnnnnnnnnnnnnnnnnnnnnnnnnnnnnnnnnnnnnnnnnnnnnnnnnnnnnnnnnnnnnnnnnnnnnnnnnnnnnnnnnnnnnnnnnnnnnnnnnnnnnnnnnnnnnnnnnnnnnnnnnnnnnnnnnnnnnnnnnnnnnnnnnnnnnnnnnnnnnnnnnnnnnnnnnnnnnnnnnnnnnnnnnnnnnnnnnnnnnnnnnnnnnnnnnnnnnnnnngcaaggaaagagtgatttacaaccaaggaaagaaacccacagcacacccttcgcgggtgtcagcgctcccctgacatcactgtggctgcgtgtccttggggtgggtgaggtgtggggagccaagcccctggccctgcctcccgcgccccgccccgcttctctcccttctcggttaagccatagcgaggcctccgctcgtttcagatgtgaatttgttttatagattataaatatgcatatacagtgtatgtataaagcagaatgcctgcctttcctggttattttttgtaccatattgtaaattatattatttattctttaccaattttgggaataaaaggtgttttggttatttaatataataagagctgttaaacttctgtttaaatttccnnnttcaacttnaannnntgtttttatt

SEQ ID NO: 3903 - DNA, 757 bp, Macaca Fascicularis
  misc_feature (1)...(757): n = A,T,C or G
ggcttactgtgtggtaggtggtatacacannncacaaannnnnnnnnnnnnnnnnnnnnnnnnnncaaaaaatnnnnnnnnnnnnncatatttttattatggtaaaatatacataaatacaatttcaccattttaacatttaattcatattaaataaatacaaatcagtgacatttagtacattcacagtgttgtgccaccannnnnnnnnnnnnnnnnnnnnnnnnnnnnnnnnnnnnnnnnnnnnnnnnnnnnnnnnnnnnnnnnnnnnnnnnnnnnnnnnnnnnnnnnctgtttacagctgtggaaaccaactgtaccataaagatagttcgctgagtnnnnnnnnnnnnnnncatcttatttttccgaggtttaatttagtgagagggcagcnnnnnnnnnnnnnnnnnnnnntttgccctatcatggaatttacacatcagaatgtgcaggaaccaagnnnnnnnnnnnnnnnnnncctgtcacaaaacatgggctttgtttgcttattccatgaagcagcagctatggnnnnnnnnnnnnnnnnntgaagaggccctgtaccccnnnnnnnnnnnnnnnnnnnnnnnnnnnnnnnnnnnnnnnnnnnnnnnnnnnnnnnnnnnnnnnnncttgttccaagctctccatctctagatctggggactgactgttgagctgatggggaaagaaaagctctcacacaaaccagaagccaaatgtccctatatctcttgaatgatcaagtcacttt

SEQ ID NO: 3904 - DNA, 773 bp, Macaca Fascicularis
  misc_feature (1)...(773): n = A,T,C or G
cccctagaannnnnnnnnnnnnnntaccgnnnncnnnnnnnnnnnnnnnnnnnnnnnnnnnnctgaggtttgaggatgaagagaagttggagagaaagagagtaactaataggtgatgaaatatagcggaagctagaagaaaactgttaggtgagagagatacatctgcatgttttcttcaacaannnnnnnnnnnnnnnnntattcctaattaccttttactattcatgtatataagataatttacttgcataatatataatcaatttgacatattcttaaaactagagggtgtgagaagcacagcaatgggaagtctctctacaaactgggggacacgagtggggtcatcacatgcctggactgtcactctggctgtcacgtgaagtgctcgtgttgatnnnnnnnnnnnnnnnnnnnnnnnnnnnnnnccggtgccagcacccagcgtgagcagccgtcggggagcctgggaagtctgcgaagtgactgcctgccgtcccttctgtgagggacacatctgattttctcgcgatctgttagtggactggagatcttccaaggaagtgctttgcacgctttctctttctgctcctttttacagtctttgtctttgcagcaagcaaatgaaattaagccactttgggataatgagcattcagtataattctactttgtctcattttggatctcactgttgtgtttataaaaatatagtcacattttacagagtagtttattcttttcatactttctggtggagagtgcctgaa

SEQ ID NO: 3905 - DNA, 727 bp, Macaca Fascicularis
  misc_feature (1)...(727): n = A,T,C or G
gtacccacaggtgtttttctgggctcagtcttgcctatgtttgttgccatgtagcatagaccggaatggattccagatgctannnnnnnnnnnnnnnnnnnnnnnnnnnnnnnnnaagattttaaaagtcattgcccattgtnnnnnnnnnnnnnnnnnctggttattcattatcagactgactacatgctagtccatgctagtgtcagcctatattaaaatagtctttccttgccatagtgctgcagaaaacnnnnnnnnnnnnnnnnnnnnnttgcttctcgggaagaagagctgaggaaagcaatgaagatcccagtgtcggcctttattgagctacgtatgagggtcagggtccctcgactcctagtgactatgaagcagcagagtgatggcttcgccctctnnnnnnnnnnnnnnnnnnnnnnnnnnnnnnnnnnnnnnnnnnnctctcagctttcttttcagaggtttcatatgtaacttacagnnnnnnnnnnnnnnnnnnnnnnnaacaaaaaattgtataaagtaggaatttgtgtaaannnnnnnnnttgtaaatccatcttcaaggtgtaaagaatcaatttgtaaagttatattttcacttcttccttcaaatttatgtgaacaagtttttatgtgaacaagtttttcatgtttcaatattgcttacataggaatgcacgttacgtttttatcagtataaatggaacattaaagc

SEQ ID NO: 3906 - DNA, 765 bp, Macaca Fascicularis
  misc_feature (1)...(765): n = A,T,C or G
ctgatgatgagannncnnncaccagatgacaagtcacaccctccccattagcattctgttaagggaaaatagtagcagagtcattgttgtactatggctgtatttttagggattaatttgtgtagattgtgtaaattactgttgtctgaccttggtggcgggagggggagattatgtgtcatgatttcaatgattgtttaattgtaggtcaatgaaatatttgcttatttatattcagagatgtaccatgttaaagaggtgtcttgtattttcttctcatttgtaatgtatcttatttatatattaatgaagtaagtnnnnnnnnnnnnnnnnntattttcgtgcatttgtgagccaaagagaaaagattaaaattagtgagacttgtatttatattagagtgcccttaaaataatgatttaagcattttactgtctgtaaaagaattctaagattgttcatagagtcatatatatggaaatcctgttacttaaatagcatctgctcttctcttaccctctctgtctggctgtacgtctggtgttctcaatgcttttctagtaattgttggataataactagatctcctgtaattttgtagtagctgatgaccaatctctgtgactcgcttagctgaaacctaagnnnnnnnntccgaagaccttctgaagatctcagataaagnnnnnnnnnnnnnnnnnnttttgaagaagggcaattcacactgtgcgttttagagtatgcaagaagaacataaataaataa

SEQ ID NO: 3907 - DNA, 758 bp, Macaca Fascicularis
  misc_feature (1)...(758): n = A,T,C or G
atggcatgaaactnnnnnnnnnnnnnnnnaaccnngaggaccagatcctgtatcaaannnnnnnnnnnnnnnnnnnnnnnnnnnnnnnnnnagtgcccatcaaagaggagggggactacgtgctagtctnnnnnnnnnnnnnggtctactttgcacagtcccagcaaaaggtatttgatgtacgattgaatggccatgtcgtggtgaaggacttggatatctttgatcgtgttgggcatagcacagnnnnnnnnnnnnnnnnaccnnnnnnnnnnnnaaaggggaagctgagtgtccagggggagnnnnnnnnnnnnncagggaagctctacattgagtttgtcaaggggtactatgacaatcccaaagtctgtgcactctacatcatggctgggacggtggatgatgtaccaaagcttcagccnnnnnnnnnnnnnnnnnnnnaagaagaggaagaagaagaagaagaatatgatgaagggtctaatctcaaaaaacagaccaataagaaccgggtgcagtcaggcccccgcacacccaacccctatgcctcggacaacagcagcctcatgtttcccatcctggtggccttcggagtcttcattccaaccctcttctgcctctgccggttgtgagaacaaannnnnnnnnnnnnnngggtggaggggtgtgggaaagaaaccagccatattggttttggtttctatatttttcnnnnatgattaatgaaaaagaaacaaagacaaaaaaaaaacacc

SEQ ID NO: 3908 - DNA, 717 bp, Macaca Fascicularis
  misc_feature (1)...(717): n = A,T,C or G
gtttttaaaaatttaaatnnnnnnnnnnnnnnngtctaagggaaaaatcaattctatttctatatttcaccccccaaaaataaattcatatttgtattcctttgatagataaaattattcaaacttacagcataattagatgaagaaagaatgaccaagaaaaaaatggatcctagagtgagacannnnnnnnnnnnnnnnnnnnnnnnnnnnttttgtcaagctacagtnnnnnnnnnnnnnnnggcacaaaatgagattgaccagtaggatataatacataacgaaggatcaaagtttaaaagactccaattggccttaagtgaggaaaaattaaatgaaaatacaaagtagatagtagtaaataagaagctacaaggtcagtacagacttgaaagccactagtcacatgtggcttgtgacccttgactaagcaactgaattttcatcctacttaattttaattaatttaaatataatttaaaaactgatattcagttcattcattggaacacttgtaagtgtggtcaccacaacttggatatatgaatctcttcaaatgttttataaaattgaaaaacatcaaatatttttaatgaaaatttagtgttcaaattaagatggcttagaagtataaaatacgaggttttgaaggcttagtagaaaataagagtgtaaaattactcaataatttgtatgttgatcacatgttgaaat

SEQ ID NO: 3909 - DNA, 743 bp, Macaca Fascicularis
  misc_feature (1)...(743): n = A,T,C or G
aaaatggagataaaaacatgtacagtttagtgaatgatgaaagaaaacccctgtaatcaagccaaggaacaggacnnnnnnnnnnnnnnnagaagtccctgnnnnnnnnnnnnnnntcatagcctctccctcccctcaaaagtgaccgtacgctgactttattgtgacctctttcttgtcttcgtagtctattcccccagcgatgtgttcctgggcgccacagcttagttgttttttacgtctcttgtacttcactggtttctcccccatcaaccttctttcccccttatgactaannnnnnnnnnnnnnnnnnnnnnnnnnnnnnnnnnnnnnnnnnnnnnnnnnnnnnnnnnnnctgcgtacacacggtgcggtgtaacacgtcctctgccctctgggcctccnnnnnnnnnnnnnntggaggcagagcctggatcagtctctggttcgatcttttcctttggaaaatctgtacggggtgttgtggactttcaccatgagacacataatttccagctgtttctttttgnnnnnnnnnnnnnnnnnnnnnnnaattgcttagtctgttaatttattggggattgctgaatggtgttattctgtcattttttcttcatttatatgctttattaatgctacaaagaggcagttcccttcatttactagtgggctactcagtggtacagtggaaaggcaagatcagtgttcgactctccttttatttaccaattttcaaattaac

SEQ ID NO: 3910 - DNA, 685 bp, Macaca Fascicularis
  misc_feature (1)...(685): n = A,T,C or G
gnnnnnnnnnnnnnnngtcaggacttgatagagctgaaccagagacccttccgcctctacctagtgtgtctgtcaggcaggcagcagccatcagtccaagaatgagccacggcggcaagcaccgtgaggagaagggaacccagctgagttatgagtttcagacagaaactggggagttgggacatctctgtgccgggcttcattgacaccatcactccccacagcagctccttggggcagggtggtcacctgtgcagccaccgttactcacagtagcattccattcttcacactgcaacccctcagcactgtggacccttccaggaaggtgacaggagccagcagacacatggcattcccagannnnnnnnnnnnatcatagacagcattccctccatacttgtttccacagttttaccctcnnnnnnnnnnnnnnnnnnccgggcgcggtggctcaagcctgtaatcccagcactttgggaggccgagacgggcagatcacgaggtcaggagatcgagaccatcctggctaccatggtgaaaccccgtctctcctaaaaaaaatacaaaaaactagccgggcgaggtggcaggcgcctgtagtcccagctacttgggaggctgaggcaggagaatggcgtaaacccgggaggaggagcctgcagtgagctgagatccggccagt

SEQ ID NO: 3911 - DNA, 2422 bp, Macaca Fascicularis
agttgatagtcgacactccagagaacaacatgttctcctgctgtgtcccaacatgctgccgacctcctcatcgcaggagaggccaaaatgagactgtttctcgagaatatagacattggtacaaccctcaccctcgacgcttctggccctttgccagaaggcacccacaggtaacacagggcccagggcaggcccgtccaggccaggcctcaactgtgcccattagggcagtgctgagcccctccccatgtgtttgggggaaacagaagaggggccctccctggacaggagcaggtaggttgtcgggggttgggagcctggtcagtatgtcaggttcacagcccagaccatgccttcaggatgggaaggtgagtgtcgaggacacagtttgtctgctcagatctgaatcccaggacctcaagctgtcatctgccagagatctcaagctcctctggctggaggtctacgcagatgctcctatatgccaaatcctgttggggaagggggcgccagggaggagttctaatgggggtgtcccactatggggtcagccaggcaggccactgacacctcttcgcctggctcactctctttgcagagctccctacagcagatcaagcaggagctgttggatggattccatttctccatcttcttcaaagaagggcaggggccccctgctaccaaccacggccagtgctggtctgggtatgaaaatgagatctgcaggatgccaactttccagcccagcacaagggagaagctgttggagtccctggttccagcctttctaactaaacccatctcctcctatgccacctgcctgggtccctcctgggactttatcaccgtgccacactttttggaactactggttagaagcaccaccggctccattttgttcacctggccccctgaaaacacttcagtttgcggccaggccctgcaacggtcatctttctggataaagctggccttcaggaccttcacctggcctggactgggcttggaggaccatcagggaattgtcctaggccagttggtgcttccggagcccaaggaggccaagccagatgatcctgctccacctcctgggcaacacgcattaacaatgctggccctggagccagcgccaccactgctggcggaactgccgcctgctctggagccagagtcacctgtagccctggatgcacaaggatatcgacattcaacaccagcaccagtaccaggggaagggccccctccaggaacagtgctggagccacagtcagccccagagtcaccctgtccatgtcccgggactgtcaagagccaacacactgaggagcggcctgacatcaccaccttccctcccaggctgctggcagagcagctgaccctcatagatgcggagctgttcaagaaggtggaactctacgaatgcatgggctccatctggggccaacgacatcagaaggggagtgagcatgtggcacccacagtttgtgccaccattgcacacttcaacaggctcaccaactgtgtcaccacctcctgcctcggggaccacagcatgagggcccaggacagggccagggtggtggagcactggatcaaggtggccagggagtgcctacgcctcaacaacttctcctcagtgcacgccatcgtctctgctctgcgcagcaacccaatacatcggctacacaagacgtgggcaggagtgtccagcaagagcacaaaatatctaaaagaactctgcaaaaaggacactgcagtgaagagggacctgctgatcaaggcggggagctttaaggtggccacccaggagaggaacccccagagagcccagatgaggctgcggaggcagaataagggcgtggtccccttcctgggggattttctgactgagttacacaggttggattcggccatcccggatgatctggatggcaacagcaacaagaggaggaaggaggtccgagttctgcaagaaatgcagctgctccaagtggctgccatgaattacaggcttcggcctctggagaaatttgtcacttgtttctcaagaatggagcagctcagtgaaaaggagagctacaagctgtcctgtcagctggagcccgaatcccagtaggctggaaacatcctgcagtggctggggccctattgggatgctggctagaacaccagctctgcatcatccttcacccagaccggagacaccaggaaatcacatctaggtggctggcagctcagctatatcatgaccccgctcctcaataccagctgctcctgctggccaggatcaggtcatgggacttttgcatgtcaggcgggaaaccattttatgtttattttctttagtgtataagtaacggtttttttcttaactttcgttaaaataaaagtttaaaacactaaaaaaaaaaaaaaaaaa

SEQ ID NO: 3912 - DNA, 631 bp, Macaca Fascicularis
cgcgattcactgccaagacggattcaagctgaaaggcgctacaaagagactgtgtatgaagtattttaatggaaccctaggctggatcccaagtgataagtccatctgtgtgcaagaagagtgccgtatccctcaaattgaagatgctgagattcataacaagacgtatagatatggagagaagctaatcatcacttgtcatgaaggattcaagatccggtaccccgatctatacaatatgttttcattatgtcgcgatgatggaacgtggaataatctgcccgtctgtcaaggctgcctgagacctctagcctctactaatggctatgtgaacatctccgagttccagatctccttcccagtggggactgtgatctcctatcgctgctttcccggatttaaactcgatggatctgcgtatcttgagtgcttacacaaccttatctggtcgtccagcccaccccggtgccttgctctggaaggaggaagacctgaacatcttttccctgtcctttatttcccacacatcaggtcggccgttggtatgttttatttgatccctggggaaaagtcctctcccaccccagcgacctacctgttcctcaactagcaccaccacatctctgttcta

SEQ ID NO: 3913 - DNA, 642 bp, Macaca Fascicularis
  misc_feature (1)...(642): n = A,T,C or G
ttcccagcagggnnngtttccggaaacagtatgaggaccagctaaattaaacaaactcagaccccaatcacctctcaaaaccaaaaccccacccctctctcaatttctctgctctcttggaaacattttgctgattttgtgaattgccagcgttgtgtgttttctgggagcatcgaaactctgtttcgggagacctgtttccccaccccccgccaccttctgtatttacgttgagactaaacacggaagaataatctaaattcatactcagacaaaaaaatgaattctggaaagaaaaccattctggacactgtcataacacacatagacagatattcttctgaggctcctggagtcttctcgagctacgggaccttcacagagacnnnnnnnnnnnnnnnnnnnnnnnnnnnnnnnnnncaccatcctggaaggaagctgtctaatggtcannnnnnnnnnnagcacttaacagactgccatggacaccagttgcgaagggaaatagtgccttactatatgtgggnnnnnnnnnnnnnnnnnnatgtgcatgaaaaaacatctttattttctttatgtcgacctttcttttcttagattgattttatgaggttttttttttccnnttagtcttttctttgg

SEQ ID NO: 3914 - DNA, 742 bp, Macaca Fascicularis
  misc_feature (1)...(742): n = A,T,C or G
gatggcttcaagtgcggttctgactggaccaaagctgtattcagcccggacagaagctatgcactggcaggctcctatgatggggccctttacatctgggatgtggacaccgggaaactggaaggcagacttcagggannnnnnnnnnnnnnnnnncctccacctgcctggccccagtcctgccaggctgattccaggttctgacatactgggactctggagtctccagcccttgtccctccaccctccacccgaccagagccctttgcagttcacaaggtactttccacacacactgggtctgtcctttccacagctctgtgagctcactttacagatgaggaaacaggctcaagagagggcctcaaactacccaggtccagcagtcggggcagagccaggnnnnnnnnnnngttcccaaagcccccctgaagcctgcccctccctttccccagcactgctgtcaatgctgtggcctggtgctactccgggagccacgtggtgagcgtggaccagggcaggaaggttgtgctctggcactagggccatgacttccctgcctgggctggagctcttgcccgaagcctgaagcttccctcggcgccgtgcgggggttggggttggtactggagatggccttgggatttaatggggaagaaggcctggtaggacctggcctgtttgtttaaaaatgaagctagtttttctttgtatttttatctctatctcctcacttttctcc

SEQ ID NO: 3915 - DNA, 785 bp, Macaca Fascicularis
  misc_feature (1)...(785): n = A,T,C or G
atcatgatgctgctnnnnnnnnnnnnnnnnnnnnagtctgtgntactacatgtggttnctcctgacaataatcagcctgtatgcaatcnnnnnnctcacatgtttaggcnnnnntctatctcaggttgatatcatagtccccctctcactttcccctaagttaaagatattatttattcttggtgatcatttgcaactacttgcacagatctcaggatagagtatttgtgacaggtttcttgttcttgtgaaccctctgcctcttaaaatggctcttttgaacagaatccaaaatgactacatgtaagctctttcttctatgttgtctgtacttcagccaaaagaaatatctnnnnnnnnnnnnnnncattcaaaactgaagagagtccattttaacatcatttataatagagatggtgatatggtttggctgtgtcctgaccaaaatctcatcttaaattgtagttcccgtactgcccatgcgtcgtgtgagggacccccgtgggagttaattgaatcatgggggtggctaccctcatgctgttctcataatagtgagtgagttctcacaagatctgatggttttatatgggacttttccccccttgctccacaatcctccttcctgccaccatgtgaagaagagatgtgtttgcttccctttctgccataattgtaagtttcctgaagcctccccagcactgtggaactgtgagtcaattaaatctctctcctttatacattacccactcttgggcagttctttatagcagcatgagaacgga

SEQ ID NO: 3916 - DNA, 710 bp, Macaca Fascicularis
  misc_feature (1)...(710): n = A,T,C or G
ctacacaccgctcactacggaccaatcagtggccagcgtgaggaagannnnnnnnnnngatgtgatgaggcggctgctgcagcccaagaacgtgatggtgtccacaggccgagaccgccagaccaaccactnnnnnnnnnnnatcnnnnnnnnnnnnnnnnnnnnggtggaccccacccaggtccacaagagccttcagaggattcgggaacggaagttggccaacttcatcccgtggggccccgccagcatccaagtggccctatcgaggaagtctcccnnnnnnnnnnnnnnnnnnnnnnnnnnnnnnnnnnnnnnnnnnaaccacaccannnnnncctcnnnnnttnnnnnnnnnnnnnnnnnnnnnnnnnnnnnnnnnnnnnnnnnnnnnnnnnnnnnnnnnnnccgtaaggaggacatgttcaagnnnnnnnnnnnnnnnnnngacaggtctagggaggttgttcaggannnnnnnnnnnnnnnnnnnnnnnnnnnnnnnnnnnnnnnnnnnnnnnngggcacccaggagcagtgatttccctccccactactcctggatgggaagcacagcctcaaccatgcctgctccctctgacccaacttcacctcatggacaacccttcttggttcnnnnnnnnnnnnnnngcttcctcctgcttcctcccttccatgccctaactcttnnnnnnnnngtcagcttaaaa

SEQ ID NO: 3917 - DNA, 678 bp, Macaca Fascicularis
  misc_feature (1)...(678): n = A,T,C or G
gttagaacatagatactgtaaaatccagatacacattaaatcttgttttcctgaaagatggcatctaaaatatttgtagaaaaaccttgtcgcaaatgatttgaatgttcctattttcttttcctttgactttgatattggcttgtaatgtctcttttcatcatatgtaatatcagtggaactgcacagcgctactcaagtcctaaggattcctcagtgatcggtggtccagagccgttccatgaaccgctggcctggatttggctgttgggtnnnnnnnnnnnnnnnnnnnnnnnnnnnnnnnnnnnnnntatgtcttcccaaaaaaagcaaatgctgaaatcctattggcaaagtaaactgaaattggctgctatattttatataatcatttctgcaaatcccgtttttggaatactaatatttgacatggttaattcttattaatttgttggaattgtttattgttaataatgcaaatagataatttttaattatccacaagtaacatttcactattaatggtttgaaataggtgataagcaaaccaatttgaaataaaatataaacatgtgccattgtattataacactatacactttcttgacagttaaattttaaaaaacngtgtttcgtagcatgtattgtatgtgtttatagtttacatagcaaataaac

SEQ ID NO: 3918 - DNA, 723 bp, Macaca Fascicularis
  misc_feature (1)...(723): n = A,T,C or G
atatattaatcaaaaaggacaaagaactaattgattatcagcctttttcacaccattgtagcaaaatataaaatatgccaatttcataatttttaaaannnnnnnnnnttgatggtacagtgtgagaaccaaaatattactaataaaataaaannnnnnnnnnnnnnnnnnnnnnnnctgtagtaactagaatactcatctgtcccccctcccttttagagacattacatttgtcacggtaacacccatggaaataaatttttttgtttgtatgtttctttctgtttgaagtttttctctttttgtttcagaaaaggggtttggaggtgatggagatttaattgtggatctatagctgnnnnnnnnnnnnnnnnnnnnnnccnnnnnnnnnnnnnnnnnnnnnnagaccgacagaatatttgagaaaattgaaaacatgtaaccacaggaagttgttattttcaaaaacttttatataggtggaaaacaaaataggtctcaggttgacagtggagtgtatttatagtgacactgttgtatatacggatctgggatctttcctctttattgtcttatgtttctaattagttggaaggatttcttttgctaaannnnnnnnnnnnnnnnnnnnnnnnnnnnnnnnnnnnnnnnacctttcaaatacagtgtttacattaaaatagaaaaataaagcctcatgacaagtacattatttgattctac

SEQ ID NO: 3919 - DNA, 749 bp, Macaca Fascicularis
  misc_feature (1)...(749): n = A,T,C or G
tcactgtagcctgaactcctgggcttaagagatnntcttnnncagcctccagggtaactaggactacagatgtgnnnnnnnnnnnnnnnnnnnnnnnnnnnnnnnnnnnnnnnnnnnnnnnnnnnnnnnnnnnnnnnnnnnnnnnnnnnnnnnnnnnnnnnnnnnnnnnnnnnnnnnnnnnnnnnnnnnnnnnnnnnnnnnnnnnnnnnnnnnnnnnnnnnnnnnnnntttttagggaaatgcatcctggaacacaaaagtgatgtggaatctagcatgactccattgttctctcctttgtatcagaggatgtgttgaagtgcggcccccgtacacaatcacttgannnnnnnnnnnnnnnnnnnnnnnnnnnnnnnnnnnnnnnnnnnnnnaatgtgnnnnnnnnnnnnnnnnnnngcatttgaaaacaaataannnnnnnnnnnnnnnnnnnnnnnncacccgcttcgcagtgaaaccaaaccctgtcggtcgcagtgatgccgtttcccaggtnnnnnnnnnnnnnnnnnnnnnnnnnnnnnatgggccttgagaacacacagatttttcctggtttagaaaaataacaaataacactgtattccagaaacaaaagcactcagaagaggaaagagactcttttgttaatgtaaagagtactggtgttgttttctttcttttttcttacatttctggtcctaattccaaaaccagctagcaaacattagtgcannnatgcagaagtg

SEQ ID NO: 3920 - DNA, 1111 bp, Macaca Fascicularis
gttgttgttattgataaatattgggtcatacacaagccacttgtcagagcctttggctccatctcgaagctgcagctcctagcgggacgtttgagtcttgtcctaggaactggaaggatttactgggaaaagaattacacattctctgctccttcagttttggagatggtcccttaaatcatatcatatcgtctgtctgcttgctgtcacatttatttcttgattattccgatatgtgaacaatgggaagatgtgtgcatcttttcccccatcttttaaaaacaattattgaaatggtttaaaaaggggggaggggagaaggtattgatcccagtcctttccgtatatttggaaccaaaagagcataggcaaatagataattgttttaattgtcggggtagggggtgggttggtaggtaggacctttgggttttgtgtaattggagtaataaatgcagtttatcttttagctcccgctgtatatattctttcccttgatacatattgcacatgagctgaacccatggtctacttgtcttagcatgtttgaagccccagacacccaacagtatcattacaggaaagagacaaagcccccaaagactccaggcagggaggtgactgcctttggggccaatggggaatttatcttgacgttgaactattctaggaagtgcacccactcgctcagactcccttgctgcgcagagttcaggtcttccccgtgctgaagtgcggggaggaggtgtgggaaaaaaacagctgatttttgacatttcaaagggactctttctatttatcagtgttaccgaagtgtacgttactggagaaacaacaaaacaagcatagagctgcaattttcaagaaaataggatccccaaatataaaaataaaaaagtagcagataagatgtataattcaatcaaattacacaaaattgcttgaaaatctagaacagtagcgatccattatgcctctgttttattagtgacaagtacaattactctaaaataaagaacactggtgaatatataattggctgtaatcatgttagtgtttgaataaaaatgacgggaacatttaacactttgaaaaaaaaaaaaaaaaaaaa

SEQ ID NO: 3921 - DNA, 96 bp, Macaca Fascicularis
ctggtcctgcgcctgaggggtggctgttaattcttaagtcttgcgtttgcagtgcccagtgatggcattactctgcactatagccatttgccccaa

SEQ ID NO: 3922 - DNA, 739 bp, Macaca Fascicularis
  misc_feature (1)...(739): n = A,T,C or G
gatggatcataaaaatctttttatcaggacaagggttatgggggaaggatagacagaattttggcactgctgctnnnntgagccaaatttagtagtttttctaaatcatgaaaaaagagcatgactatccatctggaactttctagattgattttcaaatgatagttcctctttgaagtatttacaggtctgtttttgccagacatcttttcatactaggaacttcgtttttttgtaatatccactaaagttaatctgcctttatatggacttgnnnnnnnnnnnnnnnnnnnnnnnnnnnnnnnnnnnnnatttatggtaactattttatgagtaaatagaagtttgaacatttttcttatggtttaatctgtttttttataattatatttattggtgatataaatgtatcagatgtgtcagtgcctgtgctcaccaagttcgtcttctaagaggcagtttgtgtggtacaacatatgcgtatgagtaaataacacataaacaatctgctggggctgccaggtatgtcccagccaggacagccactgggccagggggaagannnnnnnnnnagggaacgaagcagctcttcatgggcagctagccaggtgtaaccatcacaataagaacagccaaagagagaacaacaatagcannnnnnnnnnnnnnnnnnnnnnnnnnnnnnnnnnnnnnnaaatcataggtttgtcagtttctgctttgtgactactgtgagaag

SEQ ID NO: 3923 - DNA, 760 bp, Macaca Fascicularis
  misc_feature (1)...(760): n = A,T,C or G
ttagattcagannncnaaaaaggaattttggattgactttcaaagtactaatactaattatacttttcttttggtagcgtgactcttcttatacctaagaacatattacaaatnnnnnnnnnnnnnnnnnttgacattgcaaaacatgccttgaactcttgaactactgtgaaaannnnnnnnnnnnnnnagactttttgtaagctagctgatactcttaagtatgtaaaaagattgtctttcagccgacaggcccaaaggaatgtatataaggaaggaatatgaaaaaataaattaggttttaaaataagaattgggcaataaactgtatcgaaaatatgtagatggattttagtagttgtaatttnnnnnnnnnnnnnnnnnnnnnnnnnaaattccaaagagannnnnnnnnnnnnnnnatgtttcattaatttnnnnnnnnnnnnaatatgcattttatagtaaatgtatagacttattttatttagaaataatagtgttttagaatttattaaaaactcagtgatagcctttataccaaaatgtttaactttaccaacagcaagtcataaaagtatttattttaaagctttttaatattatcgcgtaactttcatctgtcttcagatgtaaataattatctgcctaaatgttatatttttatgtatgcattttctgaaaatgtattgttttgtaaagtgggaaagataataaatcaagcacttgcacttgtttctgtgannnnnnnnnnnntcta

SEQ ID NO: 3924 - DNA, 745 bp, Macaca Fascicularis
  misc_feature (1)...(745): n = A,T,C or G
acggagtgatggctttggagaagtaaggaaacatgacatgcctgccctggggtgggactaaacttggtgccactccatgtgaaaggggtagttacgcctgctccctgtcctcaagctcccccgcccccacccccgcccaatttctgccatccttnnnnnnnnnnnnnnnnnnnnnnnntgaccctagtttggtgccttacacagaacaggaaatgctgacattcccatcnnnnnnnnnnnctcacgccatcctggggagcaagaggcatccctgggtggggggcaaagcaggcccacccactgcgggccgtcctcgttctcggggctcccacagcttccccagcacagcccagagaagaaaggctcccagcccaggtggctggggtccagtaccctggggacaggaagtctgggcagggaatgtgtgggtgaccagctgagtttgctctttgtcattttgtttgtattctgaacttttaaaataccttccccacatgattcttagaaatccctggaaggcaaacannnnnnnnnnnnnnnnnnnnnnnnnnnnnnnnnnnnnnnnnnnnnnnnnnnnnnnnnnnnnnnnnnaatttcaggaaggatgggggtggggcggcgcggcctcagccctgggcctgttctgcatatctcattgctcttatctgccagggggtggtgagagggtggctgagctggacagatggagggcagggatgggctctgtggtctggcagctgacatg

SEQ ID NO: 3925 - DNA, 130 bp, Macaca Fascicularis
tctcatataaaaatagaggtgcacataacactgtgtattacacagatatctatatatatatagagatctcgcgccacatctctcgtgcccgagaaaggggaatctcaaagtgtgtgcgggggtatacccc

SEQ ID NO: 3926 - DNA, 1725 bp, Macaca Fascicularis
  misc_feature (1)...(1725): n = A,T,C or G
tttattgtgtactattacccactgagtttagcttcacctgtctcattcactaattccccgtctatacatgggtctgttcccctggggctccactgtgcttcaccggtctattggactatctctaccaatatcacactctgaaagtctttcaaattatgatctggcttcatgcatggggtcatatttccagctttaagcttttcatgggctcaagacctggtcttctgcctcatgtgggcattaaaacccaagctcttggatattgggtacctagctcccatttgtaacactatgtcaactcatgttccttcctttcatactcatttactgctttccttcctatgttttgacattttggaatgcatttttttaattgtgagcccaaatgtgaagtttttaatattatctatttgtttgtagtggaaggagttgaatttggtacagtctgtcttgcgagaaccaggactcacattcatagctatttttttttttttctatttttctctaagatcctttaggatacatatgggaaaggggaagagaatattgtgatatgttcatctttttttccttactacctagtatcctaacacagaataaataattagtaactatttattgaaggcatggttgataacattatatttagacagacaatattaacatgatgacaaattgataaagaagatgaaataaaaaagaaacacagagaaaagtaagttgttaaaagcaggaaaggagaaatggctaaaaaagagaaaaacaaagtttaagcagaaagaagcagtgaattagttcatatacagtgtaagaaaattgaagcaagtgttgagtaagggagttgactgtgtgggtgagggaagagacaaatgcatggaagaaaatctgtaggtagttggattttttttttctttttagtgtatgtaggctgtagaatatgcctagattgttctatgagtgaatatgaaaatggataaagatattgtgtgggttggagacaataaatatggagatgaagaacagggaaatcttctggataagaaagcagctgtgtagtactgcagggagtacaggaggctggcttcaaattaccgttttattaaaaccaagtcagaatgtgagagttataaaacttgtaaatgcagctagaagatcaggtgttatgctggcaaaccaaagctcatactggcacataaatgttcacagaaactgagaacagatacacgaatgtcttctgaactcatgaccctagagttgtttcagtaagtattctttgctagttccatgctgtatttggtaccaagaaaagaatgatactgaaaaaatgcattaaaacatgcctcgtgatctaaatattagctccagctcattactctatcccaaaaatgaagttcaccgtgaaaaatttcataaatgttgacagaatgcttagttacctgagacatagccattatggtgaaatggctgcatttttgtctttcccatatgtgtaaaacctgcctagtagcatacacacacacacacacacacacacacacacacacacatatttattttgtcttctttttatgtgactcttcgtttactatttgagaagaaaatgtttaactagccacttggtagtaatgttgctcataatcacagttgttaggagattatnnnnnnnnnnnnnnnnnnnnnnnnnnnnnnnnnnnnnnnnnncaaaaaaaaaaaaaaaaaaaaaaa

SEQ ID NO: 3927 - DNA, 727 bp, Macaca Fascicularis
  misc_feature (1)...(727): n = A,T,C or G
cttctatataagttattagcactattcttattattagttcatcttaaataatcatgtcagagttctcaccggcgcagtacaggggaaacgtgaaaaaacataggccctgccnnnnnnnnnnnnnnnnnctagacaagannnnnnnnnnnnnnnntaggagggaaatggaaggcagggagcagaggtgaagactagggtgggaaagggagggaaaagccatgcgttgggtggcaggtcgacatgccgcagtcccagcactccgtggcgatggcgggcagggttggggtggggggcccagccggccggtggcaggcaggagtgaggtgggcagggcgccggttccctgccgcacagcagcannnnnnnnnnnnnnnnttttacctgatctnnnnnnnnnnnnnnccgcaggcccctccgccgaccccgccgccgttgccgtagccgaaggcaccgcgggcgccgccagccccggagcccccgcagcagcagnnnnnnnnnnnnnnnnnncctacggccaggcagcccagcgcgagcagagagcccagnnnnnnnnnnnnnnnnntgcctatacgccgggagtctgagacctttacctccaccacacaaacactgtagcccacgttgttggccactgtgcactgatatagcccatcgtctgctctggagatatccttcaacaccaggtccccgtttgttcaggccnnnnnntatggaactgtggaaggac

SEQ ID NO: 3928 - DNA, 2950 bp, Macaca Fascicularis
ctttaagctagttgttgtaacagtggtggttgttgttttatatcttgagatacttctagaacattctagaaacagggtattctaaaggtttactttatatgccatcctttttgaactctcttattttagaaattattacacatgcacacttatgatttcaaccttgtaaaataatttcaaattcattccctatccacattttaccacagtttccctatcatctcagtagttatagaactggttgaaattaaactgttttgaactaagaagtagatacatacatatatatatttttaaagagtgttcatagataaactctggcataaagtttgtaaaaaagcaattttttaaaagcaaaatgtataacctcaggtcaaaaatattgcatgcattagtacttgcaaatttgcctactcaaatattaaccaaagcatgcaagataacttgactgaatgtaaatttacacagtgcatgattaagtctcataggttagcctattgttccttgcctctgtacaagggagcatttttatgaactttgtgttacagtttttctatttgcttttcttatcctatccttgagattgttttcatgctatcacactgaactttacagatattcacacatctggtttgtacagtattaccagtaccaaactaatcctctgaagaatctgggtacttagacatctaaacacttttttaaaaaccagttgaggcacaacagatccaaaacttaaacaaatccaagtgtctaaatgctactaaactaaatcatgttgactgcctcagcacataaaggtttggactctaaattcttaataatgtatttcaaaatttttcctaaaagtttgggaataaattagaaaaactgatattctaaataaggtgaggcggttggggtaatgtcaggcacatcaaaatcatcacacagccaagtagatatgaggccttaatttccataaatgtcacatagcgagtgtgtggggtatcacaacattgttctgatacagccctatttgtatggtagttgagctgcttgggctatatgtcccttgagaaactggacttgataaacagttctaaaaacactgatatttagggagtgatgaggtggtttcatggtcactcagaaccaactctgaaatcctctcactgtcttttcccataaccgctattttatgaggagaccagaaagggagagagcaaagctcagtgagaccatatggtcttacattagtaacagctttgttactcactccatatacccctgtacccctacacaataccatgagctcaaagacagaattctacacataacacacacagcaaaggccattgtggggaggcattaaacagttacgaggaaagaaaaaaaaaaattaaactgcgaggtttaacaacctctcatgtggtattttgccttgaacgaagtttccactacctgcaacctcagcagaaataccaaaataacacagtctagagacaagtgtcccaatctcagaactgttttctcaggaccttctccataagagaaaactaacttgcagtgctgcagaatgtcacagcaaaaaccctgatgagctccatgagatacttttagaagcctgcactcaaaataatattaagatggtaacaacaacagttaggcagttctttgctcaactataaaatgtgcatcattcgttgggggagggggaggaggagggatggtggtctttggatttcttggaaagggaaatggtataacacaaaaagactaagagatacacacactcagctcagtaatttgagcatttggcattttcactgagatatatagcatttctgcacggataccatacaagaattctaccatgtgagaaatgtgttcatgatggactacattaccagtagttaagggaaatatagcaaacctaagtttttaccaacttcctttcatttttccctatatatcatctaacccaaactttcttcaatttacattgtccaaatttgtttacattggttgaaaaaaatctgattaatttattaaactttttacaaactgtaacaaacatttaactatttagaaatgacatttctacatgttttatatatctatgaatattgcatatctaatctaatctgaaaatgttgttttgagataattcttctgtgatgcttcctcatcatgctcataaatgtttaaagtcttgggatttcattttcaggctgaaatagataacaagaaaaaaaaattgtttaaatgtttacattgacttactaaattaataccaattcaaattaagtgacctatagtaaatgaatggcaatggggggggaggggattttaaagttattggcatattatgtgatactgtatcagtgatttagtgaaataatatgtatcatagcacaactctgttgggtattaaggcttcatcttagtatttccctgcgttgctctttgaaataaaattactatcataaaaataacctcttatcatattgatgtgtttaatttactgagttggcttctaatttgcataccaagattaaggtagtatttttgtactattattggaagcatgccttccctttttcacattattaaaatcgtatttatatttgtgcagttttaaactatgttttcaaataaactttgcggcttcaaggtcttttcaggaatctttcaaaatgggatttgggaatcagaactgcttctgatcaaatggaatccaatttgtactactggctaaaggtcctttatgaaatactgaatattactacatatgattttgcatgagctatctggaaatcaggaatgcatttttggatatacaacaaaactttaaaaatcttcctcctctgttaattttttaagactaaaatattatttaatctgaaattgaattttgtgattctttttagaataaaaatattaaaataaaaaaaaaaaaaaaaaaaaa

SEQ ID NO: 3929 - DNA, 773 bp, Macaca Fascicularis
  misc_feature (1)...(773): n = A,T,C or G
aaacggcgcggaggtgnnnnnnnnnnnnnnnnngccacnnnngncgcagtacaacagcacgtatcgcgtggtcagcgtcctcaccgtcacacaccaggactggctgaacggcaaggagtacacgtgcaaggtctccaacaaagccctcccggccccaatccagaaaaccatctccaaaaacaaaggtgggacccgcggggcacgagggccacgtggacagaggccggctcagcccaccctctgccctgggagtgaccgctgtgccaacctctgtccctacagggcagccccgagagcctcaggtgtacaccctgcccccgtcccgggaggagctgaccaagaaccaggtcagcctgacctgcctggtcaaaggcttctaccccagcgacatcgtcgtggagtgggagagcagcgggcagccggagaacacctacaagaccacgccgcccgtgctggactccgacggctcctacttcctctacagcaagctcaccgtggacaagagcaggtggcagcaggggaacgtcttctcatgctccgtgatgcatgaggctctgcacaaccactacacccagaagagcctctccgtgtctccgggtaaatgagtgcgacacccggcaagcccccgccccccgggatctcggggtggcgcgaggatgcttgacccgcaccccgtgtacatacttcccaggcgcccggccatggaaataaagcacccagcgctgccctgggcccctgcgaaaaaaaaaaaaaaaaaaaaaaaaaaaaaaagg

SEQ ID NO: 3930 - DNA, 723 bp, Macaca Fascicularis
  misc_feature (1)...(723): n = A,T,C or G
tcccatctgctgctctttgtagaaaagnnntcctctagaactgagttcctctggaattgagtgatggacttcacagcaactggcnnnnnnnnnnnnnnnnnnnnnnnnnnnnnnnnnnnnnnnnnnnnnnnnnnaactgtagaagaccctgaggactccttgggtagtgtgagcagctattctgcatgggtgcagatggctggtatgtgaaagannnnnnnnnnnnnnnnnnnnnnnaatttgaagtgccatcgaatgttgtcaagaggtactgagattgttgctgtgagcaaggnnnnnnnnnnnnnnnnnnnnnnnnnnnnnnnnnnnnnnnnnnnnnnnnnnnnnnnnnnnnnagccttctactgtagctacggaaccagattctggtgaatttgtccacaaccagccattggcctgtctggggagtttttggaagacagcaaagagggnnnnnnnnnnnnttcagctttgtttgaggacagatgctatcctaagggcatggcagtacccatgttgnnnnnnnnnnnnnnnnnnnnnnnnnnnnnnnnnnnnnnnnnnnnnnnnnnnnnnnnnnnnnnnnnttgaacattgaacttaatagatgacttgacaaggtggagatctgatattttgagattttggagaccatttcctnnnnnnnnnnnnnnnctctaactattccatgccatnnnnnnnnngctgttnnnnnagtggtggata

SEQ ID NO: 3931 - DNA, 605 bp, Macaca Fascicularis
tagtcacagtgattttcatttaggagctaactaggagtttactttttgtgatgtgaaacttcaaagagtatagaaaacttttgtaccacaatcaaagaagaagaagaaatggtgtatggaatgaaaacaaaacaaaacaagaaatctcttgtaaaatattccaggtcaaagttgtctcctctccaaaccttgcagaagcacctttcttctcttcagcgcactgttttgggactgtttatgcatcagatgtaagtagacaacatggactccatgtgacatgcctctaatagtaaagataaagtattactgaggtgaaaaataaaaatgactagtattaattgaaagtgcaccatcaggacaacaaaccatttaagctgaaaaagcgctattttatttcttcagtttgccagttgcttcaccttgagttaaggacatgtctcatcttcacctactgtgcattttcccttctctaactgtgtaatatgtcaggtcaaggacattgaatgttatgaattgagaacctaaattgatgcgcatagttttcatctatgcaattttacttgcttctgtcactttatgatctgttcatattggcatcaattaaa

SEQ ID NO: 3932 - DNA, 708 bp, Macaca Fascicularis
  misc_feature (1)...(708): n = A,T,C or G
agggtgacagacgctaccttcaacttcctgctggtctggtactactgcaccctgaccatccgggaaagcatcctcatcaacaacggctcccggatcaaaggctggtgggtattccatcactacgtgtccaccttcctgtcgggagtcatgctgacgnnnnnnnnnnnnnncatgtaccagaaattccggaaccaattcctgtccttttccatgtaccagagctttgtgcagtttctccagtactactaccagagtggctgcctctaccgcctgcgggcactgggtgagcggcacaccatggacctcactgtggagggcttccagtcctggatgtggcggggcctcaccttcctgctgccttttcttttctttggacacttctggcagctttttaacgcactgacannnnnnnnnnnnnnncgggaccctcagtgcaaggagtggcaggtgcttatgtgcggcttccccttcctcctcctcttnnnnnnnnnnnnnnnnactaccctgagggttgtgcaccagaagtttcacagtcagtggcatggaagcaagaaggattgaggctgggccttccgctgccagcccagaggggattctgtgtcccacgtgttggaggggatgggaggcacccctcgagtgtatgtgtgtatcagggggtctctgctgttctcccttgggttttatgggctctgtgggccctgaaggaag

SEQ ID NO: 3933 - DNA, 750 bp, Macaca Fascicularis
  misc_feature (1)...(750): n = A,T,C or G
gcttaggtnnnnnnacatgtttactattaagactacgtattgtaacnnntctgtaattttcacatatgaatgacaggagaaagttaaanntaatcgaaggagttttggaataaaaagaaagtggtgctggggaaatttaccatgnnnnnnnnnnnnnnnctttgtaaaactgaatcaacttttagcaagaattaatttatgtagttctaaatgttaaattgtgtatatttaacagaaaatacttatctggcacctcagtagttttctttaaatgttaccttttaacaatatgatttatattgnnnnnnnnnnngttttcgtaagattttatcaaatttgataatgtaatgataaaatgttttttaaatgtgaactatttnnnnnnnnnnnnnnnnnnnnnnnnnnnnnnnnnnnnnnnnnnnnnnnnngataattagggttcaaattatgactcatcatttaattgattataaatgagtatatttctnnnnnnnnnnnnncctccatttttacaatcataatatagcaataatttctnnnnnnnnnnnnnnnnnnnnnnnnnnnnnnnnnnnnnnnnnnnnctttatctttgatttctgagggaaaggggtgtgtatttcgtagttaagataaatgagaaaattcctaatagtacaaatgccctttaccaggtttatctttgctaatttgttgccatttttcttaaatatttgctttatttgtacctgatttctggaggcaaatagtgct

SEQ ID NO: 3934 - DNA, 106 bp, Macaca Fascicularis
aacacacccccaccccacgccccaaagttcgaagttgagaataagccatttgctggtggattcggttcccacaggagggaagaggatggatgccatgtgcacatca

SEQ ID NO: 3935 - DNA, 752 bp, Macaca Fascicularis
  misc_feature (1)...(752): n = A,T,C or G
aatcaactgcaaatcaanttcttcacattccagctacagtctttttttccccattgaatctcagtccctggccatgtggtcaaggtggctttctgttaagctatcctaattttggnnnnnnnnggggagagaggagggccattacaacnnngcctgaanngctcatctcttcaaaacaaaacaaaactacaaccaccatcaaaaccacatgaaaaaaaaaaaaaaagattaactgaagggagggtttggttccattcaactccacattcattgtgcctttacttgtgttagatttctgtgctttcttcctctccctctttgaagcaattaaaatcttccttgataactgctgtttctttctactcttgtttctggcaacttggtgggttccttccctagttgtcttaaatctcattccactggtggcaagagggggcctagccttcttttctcatgtctaatctttgtcctttctcatggtgccctgcatggaggtcacagtcaacactgaataaatgactagaatgacatgtgtgcgtgcgtgtgtgtgtgtgtgtgtgcgcgcatctgtctgtatgtggatcaatttcttttggaaaataatttattgtatgatttattttggagttatattctgattacagtgctccctctcccaaatagcattgatttgtttcccccctctaaaatgtataatctggtctcaggttggattctttggtacatttctttcttctggatgccgtgcagtg

SEQ ID NO: 3936 - DNA, 667 bp, Macaca Fascicularis
  misc_feature (1)...(667): n = A,T,C or G
aaaaacgcagtgggccacgcctcactgagtaatccgtgcttcttcnnnnnnnnnnnnnnnnnnnnnnnnnnnnnnnnnnnnnnnnnctccaaccntnnnnnnnnnnnnnnnnnnnnnnnnnnnnncacaaagctagatgtgaaaactggtatgannnnnnnnnnnnnnnnnnnnnnnnnnnnnnnnnnnnnntaaatacatttgtatgtgttgcannnnnnnnnnnnnnttatacaaatatgcttactgagtagaaaggaannnnnnnntgcgaaggccaannnnnnnnnnnnnnnnnggtattattgtctatcttaattttttaagcaaaatacattcacctgcagctaaaattttcattttaaaaaagtagataccatcaataagaggattataaagctcttttgactcattagtaatgaaaagcaacctcgccatgtaaaaggaattttcgccattgtgaaatannnnnnnnnnnnnnnnnnnnnnnnnnnnnntaaccaactttcctacaatagcatatttgatgtgtcaatgatagatatttaaggtagcagaattaaaatattaggtaatatggacaaaatcatacttaaaaatcttaatgttttaagacatttttcatcaaaataggtaaccnnnnnnctnnnnnnntgtaaacaatgag

SEQ ID NO: 3937 - DNA, 647 bp, Macaca Fascicularis
  misc_feature (1)...(647): n = A,T,C or G
caaagtgctgggattataggcttgagccccgtgccgagctgtcaaaatgctttttatatctgcatatgttgaatactttttacaatttaaaaaaatgatctgttttgaaggcaaaattgcaaatcttgaaattaaaaaggcaaaaatgtaaaggaatcaaaaccgtaaatcaagtatttgggaagtgaagactggaagctaatttgcattaaattcacaaaaacttttatactctttctgtatatacttttttttctttaaacagttatggatcagaatagccacatttggaacactttttgttatcagtcaatatttttagatagttagaacctggtcctaagcctaaaagtgggcttgattctgcagtaaatattttacaattgcctcgacacacagaaacctttttaaaaatagacactccccgaagtcttttgttcgcatggtcacacactgatgcttagatgttccaggaatctaatatggccacagtagtcttgatgaccaaagtcatttttttccatctttagaaaactacatggaaacaaacagattgaacacatctgaagctactgtgtgtgtgaatgaacactcttnnnctttattccagaatgctgtacatctcttttggatctgtatattgctgt

SEQ ID NO: 3938 - DNA, 431 bp, Macaca Fascicularis
  misc_feature (1)...(431): n = A,T,C or G
aataaaaaatccctttgnattatttaggatattttgtcttgtattggggcctctggtctgaggtgtgttgcatgctcttggagtcagctcatgacccagtaggcttggtagagtcctctgcctctcaagacgtgtcccagtttcttagcctgagctgtgtgaccttagatactggacatcaaagttgcctgtgcagcacccaggagagctgttcaacaggcagttggatatagaggtcagactcttggaagatgtagctcaattagagataatacatttgggaatcacttgcatatactaaaaattctgaaatataaggtgaattttcctcccaaaccacatcttaagaggagagacagtctcatattgcagagtatacactcagatattttctcagcaaccacagatacagtgataagcacacacatcag

SEQ ID NO: 3939 - DNA, 694 bp, Macaca Fascicularis
  misc_feature (1)...(694): n = A,T,C or G
tccaatgattgtagggacaagtggggggcgggtgnngagcgggcgcgaggnnnnnnnnnnncccaggagaaggaaggcactgaaggccgtggccgtgctggccgtgaaaatgggaggccgttgcagggagtctgtggggcccggttctggatactgggcaggaagccgtgggctccagagggtcctccctgcctcannnnnnnnnnnnnnnnnnnnnnnnnncccatctcccgccaccgcctgtcggtgggggtttaaagtcggggtggctttctggggtgcagctcagcaacccccttatgcagaccgggagggggccaggcagccccctcagccacaaggannnnnnnnnnnnnnnnnnnnacttgggaccgtggggcctagctgtgtactgagtgggcaccccgcactcaaggccaaggggggctccccctgctctgagatgttggggggacaggcgggagggtgggcacggggcnnnnnnnnnnnnnnnnnnnnnnttaagagtcatgcatctgtacagtcgaatttccttccttttatcattttttaactcactttgtccctttattccctaactgtgcttttgtattttttttcttggcaaacgtaacgtaaactcagcctctcattcatccatgatatgtgaaatttcaccttctctggcgtttcacacatggcgtggggaccacgc

SEQ ID NO: 3940 - DNA, 727 bp, Macaca Fascicularis
  misc_feature (1)...(727): n = A,T,C or G
aagcagccagggagaggtgagtaccaaggacctccccacgggcgtcatctcctgccaannnaggccaagcctaggggcggtgtctgtgacgtggagtcaacactttcactggtggcagtaaatgctgtccctaaccctgcagaatagatgtgggtttctgtgccctgtacaggagggtgctatctgacaccagacacccagactacagatcgcagccccattcctggtnnnnnnnnnnnnnnnccccagaccccagcctcattctaggccctcatcccctagatccagggaccccagccccatttcagcccttgggcccttgtaggatgctaggccctggctcccctgggtcccagcccccagtccatcccaggcccaggcaccaggggggctgaggtcctctgagaagggacacggggtctgggggggctctctcagcccatcagcaggagaggactgactccagaaaaatcagcctttgtgcccacttaggctgccaagacctgtgtccgtccttccacactcaaccttcagatttcatgaggctccttgcccggaatgtccacgtttgaaacctcccaacaccaagccccatttcaaatataaccgggagggaaaatggtgcttgaaataagcatgccgcaaaggaaaacccgctttctcaaaatgggctctggctgctcaggtcctgaccnnnnnnnnnnnnnnnnnnnnnnncagagaccca

SEQ ID NO: 3941 - DNA, 761 bp, Macaca Fascicularis
  misc_feature (1)...(761): n = A,T,C or G
gcatcggactagccgnnnnngccaggccgccgggatggtcttctccagatagaatgcaccatggagacgtggtggtactctagcttgtgtgtcctcatagagaacccaggggacagccggtgcaaattcagaactgaaggctctgtttgtgggactgggttagaggagtctgtggctttttgctcagaattaagcagaacannnnnnnnnnnnnnnnnnacttgctttcagtggaccaaaatctgcattctgtttgcatacttttaatatgtatattaagaagcaataactatttttcctcattaatagctgccttcnnnnnnnnnnnnnnnnnnngtcagaatgtgaaaaaggaataaaaaatactgttggactcaaattaaattcaaagaagtactttattgcaactctctaaagtgccttggatgagaagtgtcttaaattttcttcctttgaagctttaggcagagccataatggactaaaacattttgactaagtttttataccatcttaatagctgtagctttccctgcactgtgtcatcttttcaaggcatttgtctttgtaatattttccctaaattcagactgtatatatcatagctatacttgatagtttggctataagtgctcaatagcttggagaccaagaagttggtgtcgaaattttttgtttgtttaaaaccaagtgctgcacaaaagcagatacttgaggaaaacactatttccaaaagcacgtgtatgacaacagttttataat

SEQ ID NO: 3942 - DNA, 744 bp, Macaca Fascicularis
  misc_feature (1)...(744): n = A,T,C or G
accaggtnnnnnnnnnnnnntagataagtgatactcagccagcataacttactgacttaccatttacgtatagtcatcagtctcttacnnnnnnnnnnnnnatgcctaccagagttaccttgttctatcataatatgataaacatctcaacagttttgggtttccccactttggttcagaaggttatttaatttctatctgggcattaatggagaaaataagtagccttgtgtgctgctttagattgaaacatggaggatatatcaagatactattttgcaattcatgtttctcatttctcaaagtgagcacattgttctataaannnnnnnnnnnnnnnncttaaacttttgatcaatctgagtgaggtgtgcttttcctcttgggacctactctcacgtttgnnnnnnnnnnnnnnnnnnnnnnntgaggtaatatctcttgaacatcttctaaagggttttttaaaaccttattgcacacatacttcatttgttttgagtatttaagtgactcttaaatgttttgggtctacatgcaaatgtggtacttgataaggtaggaatccatcttcgcagctgtgattgagggtgccagccatgggtcaggtcatttttatatcaagaggcagacggcagttatgtcaagaattgtgctcagggcaggatttcctttccacagaggagagacacttgcagagtgccagctaggnnnnnnnnnnnnnnncttctttcatttgattaa

SEQ ID NO: 3943 - DNA, 1333 bp, Macaca Fascicularis
  misc_feature (1)...(1333): n = A,T,C or G
gctgcccgtnnnnnnngnnnnnnngntgacttttgaaactgattattacatggtggatgatgatttcatctcatgtgctggacgctgttctgttcagtgtgctcttcgactacattagtccgccgtggagcagcagggccggaggtctctgcagtcccttccccgctgccctaccagaaggccaaggaggcacgtggagggctcatcctttctgcaattcttccctctagagtcagggaggtccgcccagccctggcctcacagccgtcccagatgttaggtgagccaccgagctgtgcgttgaccttgaggggcccggctcggggcccccaggctccacgccttcttgggagggtggactccggcacctttcctgtgttacggctgcggggagcgagcatctcgtctgcctgtggtcagctctcagacggcagggagcggagctgaccttggccgtgcttggtcaccgttgccatgccgcagaggatgggcctagctaggctggggccacaggactattctgccggccttgaatggggactgcagaaccctcagtttgtctcccttgttcttctgtggccgaggtgggaggggtaggtcccccagcaagagagacaggagcaccccagacaggaccaaggagtcgggaggcccctgcccttccgtcctccatggtgagggcccggacgtctccccagagcccagcgctcgcaggatggattccgctcctggctttgcttctgcggctttggtggagacagttatggaataaaatgttccttgcacccagattattttgtggaatacgcttggggaaggacacccaggtggcgagtgtgctgtcgtgggacgcggcctggtggccgacctgccttcccagtactgccatctgctctagggaggcctctcctcgctgggtttacttacctccctggctgctctcgaagcccgagcagctccctctccccacctgccccatagccaagatggcagcccggcccttctcgctccaggttcctccccaggagcccaaggcagggccgtgagccagggccctgcagacacgtttgcttaacccgcccagtgattgaggaagacctgaattcctcactaacatgtagaattgagctgtttcccactcaaaagtactgacctccagctttcctgaaatcccactgcacatgggctggcaattctgagatgaaagcggaagccatcattcccgccgctgtctcaggtgccggggcagcctccttagggacgtccctgcctcctcatcgcactccacagccaagcgtccacagttgtaattaggtgatgcttttaaaaaatg

SEQ ID NO: 3944 - DNA, 708 bp, Macaca Fascicularis
tgcataagaatagacagaccccctcccccatacagaagaattccaagcaacttttgtagatactccacctcaaggaggtggaggataaatccccattctataagtgtggccaatgcatactgatttccttctaaagagtacaggatagaaagtagggggagtatcttgatagtggagaaatccgacaaacactgcctcggccaggtgatcaaggttaacatcatcagtgataagtcatgttgacagcatgtatccttgatatgatgtgatgaggatggcatgttacctctgtggccttcctcccaagaacgcgtaacttcagtctgaaagtttctgaaacttcagccttaacaaatagcctgcagtcttctaggaggctgcttatcgagtgaagaggagcaccagctcacagtgtggggtgtgggggaacaaatccacagggacagcttgctgtaggacaaagggctcgcctaagagcttcttagcagagtctggaggacagcacagctcaatgatattcctagtggattcaccatggagcttgcaggaaacaaaaactagcgtgcggatggccctgcagtttcgaatggcttgaatcaccttgtaatgcagtccggcacgggctgggttcaccacagcacaactgactgtccatcttcctttgactttagtagccctggcaaaatcttctctgctcgacccgtgtga

SEQ ID NO: 3945 - DNA, 738 bp, Macaca Fascicularis
  misc_feature (1)...(738): n = A,T,C or G
gcctcaatttgtcnttcaccggtaagtttttaaagggtgcagattttgagtcaggtcttaaaactaagctcacaaatctggatgcatttctaaaatctgcaaatgtttcctggggtgacaacaacaatgaataatcccacaatatacctcannnnnnnnnacatggaactggggctcaacccactgtttttaagaatttgcgcttacttgtggctgaggaaaaataagtagtctgaggaagcagtttttaaattcgagcttatagatagaaacagaatatcaacttaattatgaaactgttagaacctgttctcttgtatctgaatctgattgcaattgctattgtaatgataaaccccagccattgcaagtctcaaatatcttagctgtgtagtgattcttgaaattctttttaagaaaaattgagtagaaggaaataaacactttgtaaatcaggcttggcttttatgaaagatcatttacaggnnnnnnnnnnnnnnnnnnnnnnnnnnaaaagtgtaataatggaaatgtggaaaatatcgtaggtaaaggaaactacctcattctctgaaggttttgtcgaagcacaattaaacattcaaaatggctttgttacaccagagccatctggtgtgaagaactctatatttgtatgttgagagggcatggaataattgtnnnnnnnnnnnnnnnnnnnnnnnntttattatttgcaggttcctcatcaaatctgta

SEQ ID NO: 3946 - DNA, 740 bp, Macaca Fascicularis
  misc_feature (1)...(740): n = A,T,C or G
atgctggataaaataggacaatcatccttttaaatnnnnnncctagccgtcaagagagtaaggaagtccctagttcattttcccattgctgtggtgaccttggaggctggggcgattggtttgggtgacataaaagagcaaggaagaagaaaattgaaattagaaggggaaggtatgatatacaagaaggattggtgagaaaaaattatccccttgtattccaaaacatctatttgatggggcagtaatcatcatatcaatggctgatggacattattaaaataaaatggaaccaaatctggataacaataatatgaaagaagaaaggggataattaaaccattctaataagatccaattattgttcagaagaaacatagagtaaagtttacttgttgatattttaaggaaactataattagaatgtataacttcagaagagctagagggaaaagtgagtaacaaaatgatcatgacaatgaaaggcaggaaggaaaataaactccaaaaagtacaagtagcgcaaaataataaaatagaaacaaatccaaatcaaagtaagtaaaagtgatctagacttcctggttaaaagacagagattatcagtatgcctnnnnnnnnnnnnnnnnnnntatacctgttgttaagagattcttcaaggccaagagtggtggctcacacctgttttcccaacactttgggtgactaagatgggaggatcgcttgaggccaggagttca

SEQ ID NO: 3947 - DNA, 2512 bp, Macaca Fascicularis
accgcagctggtgggggcctggcttccccaaggacagtcctttcctttcccattctctttggatgactatccctgggctggggcatgaggtcagcagaggcgccagtcacccttagggcccccgtcttgctgctggggctctgggcactcctggctccagtctggtgttctcaaggccgtcccttgtggcactacgcatcctctgaggtggtgattcccaggaaggagacacaccatggcaaaggcgttcagtttcccggctggctgtcctacagcctgcgttttgggggtcaaagacacgtcgttcacatgcggagaaaacaccttctttggcccagacatctgctgatgacaactcaggatgaccaaggggccttgcaggtggatgacccctacatccctccagactgctactacctcggctacctggaggaggtgcctctgtccatggtcaccgtcgacacgtgctatgggggcctcagaggcatcatgaagctggacgaccttgcctacgaaatcaaacccctccaggattcccgcaggtttgaacatgttgtttctcagatagtggccgagcccaacgcaacggggcccacatttagagatggtgacaatgaggagacagaccccctgttctctgaagcaaatgacagcatgaatcccaggttatctccttcgctgtatagttctcatagaggcaatataaaaggccacgttcaatgttccaattcatattatcgtatatatgacaatattacaacttgttccaaagaggtggtccagatgttcagtgtcattgacagcattgttcaaaatattgatctgcggtactatatttatcttttgaccatatataatattcgtgacccagctcctgtgaatcagtatcgagttcgtagtgcgatgtttacctattttaaaagaaccttttttgatacttttcgtgttcattcatccacactacttattaaagaggcgccacatgaatctaactatgaaccaagaagatatagcttctgttcacatttaagccttatacacattggtactctagacagacattatttattggtagccgtcataacaacccatatactgatgagaagtttgggtgtggcttatgattataaatactgcacatgtcagagaaggacctcctgcattatgcagcgatatcctgggatgacagatgcgttcagtaactgttcttatggacatatacaaaattgttttgtaaattcagcccggtgcattttcgaagcactcgctccagtgtataacgaaaccatgacaacggttctctgtggaaacctaatcgtggaagggaaggaggaatgtgactgtggctccttcaagcagtgttatgccagtcattgctgccaaagtgactgtcacttcacaccggggagcatctgtcatctaggagactgctgtacaaactgcagcttctccgcacaagggactctctgcagacctatccaaaatatatgtgaccttccagagtactgtcatgggaccaccttgacatgccccccagacttttatttgcaagatggaaccccgtgcactgaagaaggctactgctatcatgggaactgcactgaccgcaatgtgctctgcaaggcgatctttggtgtcagtgctgaggatgctcctgaggactgctatgacatcaatcttgaaaatcaccgattcggacattgtactcgagaacaaacagctatcagctaccaggcttgtgtaggaatagataagttttgtggaagactgcagtgtaccaacgtgacccatcttccccggctgcaggaacatgtttcattccatcactcaatgagaagagggtttcagtgttttggattggatgaacaccgtgcaacagacacaactgatgttgggcgtgtgatagacggcactccttgttctggtggaatgttctgtaataacagccagtgcaatgtggctatcacttcactgggctatgactgttaccctgagaagtgcagttatagaggggtctgcaacaacagaaggaactgccattgccatataggctgggatcctccactgtgcctaagaagaggtgttggtgggagtgttgacagcgggccacctccaagaagaacacgttcggtcaaacaaagccatcagtcagtgctgtatctgagagtggtctttggtcgtatttacaccttcgtaattgcactgctctttgggatggccacaaatgtgcgaattatcaggaccaccgcagttgaggaagtgacagttactgacccagaataagactaattcagcctcccgaccccggtaaagatacagagaatataacagcaaaatctatggaacaggatcagtgggggggatggcaaagctcaagtccacatttcttgaagtctgcaggaggcacagggtcctgtctcacatcatggggaaacgggaggtgttggcttctgtctcaggttcttgtagttcactgatgctcactctggaataaatcttcaagaacacgtaa

SEQ ID NO: 3948 - DNA, 766 bp, Macaca Fascicularis
  misc_feature (1)...(766): n = A,T,C or G
gtaaccatcannngctcactnntttcaaaaaaaaatgttaaaatgcattannnnnnnnnnnnnnnaaatannnnnnnnnnnnnnnnnnnngcagatacatatacacacacagtgaaatgaaaactgccagtacacttgaggttttattactttctactaaaagnnnnnnnnnntcaaagctgcttgttaatcacacgtcaacattattagagtggtaggaataacaaattttatcatcatctcattttctgataaaatatagannnnnnnnnnnnnnnnnnnntaaggctgatgctgcacaagaaaaaaacaaaatctgtcccattttttagtttggaatctttatttttattcactggcatggnnnnnnnnnnnnnnnnnnnnnnnnnnnnnnnncagggaaggtcagacagtagactgccgaaatgaacacccccaaatctgagaggccaaatgcagtaatggtttagtctcttcttnnnnnnnnnnnccaatgacacttggcaacggaggatctgctccacaaggtctcttaggaacccaggttccttctgtcatatcctaggacttcagacttctcccctggnnnnnnnnnnnnnnnnnnnnnnngtctgttcctttgcttgttcgagcctccattcattcatccaaactcctgaatctgtcaccgagtctctttcaccccctnnnnnnnnnnnnnnnnnnnnngaaatggtacgcgnnnnngaggcaagaggctgnnaggcnnnaancacaattgnnnctg

SEQ ID NO: 3949 - DNA, 730 bp, Macaca Fascicularis
  misc_feature (1)...(730): n = A,T,C or G
ttcannnnnnnnnnnnnnnnnnnnnnnnnnnnnnnnnnnnnnnnnnnnnnnnnnnnnnnnnnnnnnnnnnnnnnnnnnnnnnnnnnnnnnnnnnnnnnnnnnnnnnnnnnnnnnnnnnnnnnnnnnnnnnnnnnnnnnnnnnnnnnnnnnnnnnnnnnnnnnnnnnnnnnnnnnnnnnnnnnnnnnnnnnnnnnnnnntcgcctcaaaataaaataaaattaaataaataaataaataagggcactaacccattcctgagggttccaccctcactatacccacctaagcacatgccaaagccccacctcataatgtcatcgcattcgggattcggtttcagcatatgaactgggggagggcacacaaacgggggaaattggctccactgtgtgaaaattgtcaataccaaggcagagtcacttacgtcaggacccaagcaaaacgcagctgggaagcctcaagcaaaggttcctcatgcccaggtgcctacgatgagaactgttgcagggactccgacagcacacaacattccagatcagctcctcctatgaagacgcctccccagcaacaattgtgttacccgtgagtgatcactaaccctgcaataagctcctgtacccagtgaagtctattccaaaacaatctgtgtagacttcctcatctcacccataaaagaaagacacacgtacggtcccctacagcatgcatatcccagattgcaatcccccg

SEQ ID NO: 3950 - DNA, 525 bp, Macaca Fascicularis
ggactacgggtgcgggccaccacggccggctaatttttgagtttttagtagagacgaggtttcatcatgttgaccaggctggtcttgaactccttgacctcaggtaatctgcccacctcggcctcccaacgtactggggatcacagagcgtgagctaccacgactggccccagaagtatttcaacatgaaaaatttccttagcccttctccagttgtcatggcttaatgtgcgtctttccagaactttgaatgtttacatacttgtggatgtatctttcaaatatgtttgtcttgtgatttatatataaatggtgttgtgttcattgttaaaaaaaaaaaaaaaaaaaaaaaaaaaaaggggcggccgccctttttttttttttttttttttttttttaaaccttgttgcggcttaatgaaaactccccccttgccccccacaagacatttaaacaagggggtttggcaagaaaccttttgaaaacccttctcccttggtaccccccgagagtccccaaaaaccc

SEQ ID NO: 3951 - DNA, 801 bp, Macaca Fascicularis
  misc_feature (1)...(801): n = A,T,C or G
ttcactgcagtatcccaactacaggcacagtgctggcaataaatgtgtgacggacaaaccatagcnnnnnnnnnnnnnnnnnnnnnnnnnnnnnnnnnnnnnnnnnnnnnnggaattctctatccctcagtgcagggtgggggctggtcctcagctgtccaccctcagcccctggccccccaggaagcctctttaatgggctgttaggttgacttcagttttgcctcttggacgacggggggtcttgtacatccttgggtggccgggaannnnnnnnnnnnnnnnnnnncaaagggaggctgccctttccccaccagtgaccactttattccacttcctccattacccagttttggcccacagagtttggtccccgccaaacctcagaccaatatccatctaaacatcaatctatcctcctgttaaagagaaaaaaaaggggctgtgagccactgcgcctggcccagaactagattttacaaggaagtgcacagatgggcttaggagaggactgggggtcctgactgattacagcttggccaagcacagaatccttcccactctccagaagctcaccctgacctctccttttcactcaggccctgtctcccattaacagccagtagcttattggtaagcctagatgcagcctgcaaccttttgtacaactcacagaatcactgacttgctgtcaaatggaaaagttcaagctgacaaactttttcttaaagnnnnnnnnnnnnnnnattgtaggctttnnnnnnnnnnnnnnnnnnnnnnnnnnnnnnnnaactcaactct

SEQ ID NO: 3952 - DNA, 667 bp, Macaca Fascicularis
  misc_feature (1)...(667): n = A,T,C or G
gacccagaaggacaacgtgctcacccagattatcttgaaaacgatcttccagtagttctgacgacacctggagcctggtccaagtgcaccccaccttgggaagcctctccaaagnnnnnnnnnnnnnnnnnnnnnnagcttcaattttccccagcacccaggagagccttgctgtgtctgcctgcccggcaagagtccattctcactgctgggatacttgtgaaaatctccaggtcctccctcttcccagcccggatggagcttcagggaagcnnnnnnnnnnnnnnnnnnnnnnnnnntcagagatgccgggagccnnnnnnnnnnnnnnnnnnncccctctatnnnnnnnnnnaacatgacaaagatgacnnnnnnnnnnnnnnnnnnnnnnnnnnnnnnnnnnnnnnnnnnnnnnctttttttttttttttggagcaggagtaccattttgttaaacagnnnnnagtgaggtggagggaatttggacaagtgaaacnnncncattnnnnnnnnnnnnnnnnnnnnnnnnntaagatttaaaaacatgtctggnnnnnnnnnnnnnnnnnnnnnnnagccagaatggcattatatttttagatggttcataaagaagcacaaaaaatattatttcataacatgtagaaattacataaaacttaaa

SEQ ID NO: 3953 - DNA, 876 bp, Macaca Fascicularis
  misc_feature (1)...(876): n = A,T,C or G
cccagtacccgactcttggccgtttcgccagtgcgcnnnnnnnnnnnnnnnnnnnnnnnnnnnnnnnnnnnnnnnnnnnngaagaagagcggaggagccggcaaggtcaccaagtgggcgcagaaggagcagaaggagggcaagcgaagcgcgggcgcccgaggcgcgaccctccccgtcggagccgcgccccgaaccccggcccggcccccgccccgcccccgccccgcgcgccgccccggcgccccgcacccccgccaggcgcatgtttgcacctccgcttgccagaggccctcggtcagagannnnnnnnnnnnnnncaaggtccagtggaagttcttcaagaggaaaggcgcccccgccccaggcttccgcgcccagcgctcgccacgctcagtgcccgttttnnnnnnnnnnnnagcgaccccggagccgtgtgcgcctcctgctggggggtcctgctgggggggtgggccccgcccgcactccccggagcccctccctgcccgggtggccagcccagcatcttttactccctgcctggggaccccagggtgagcgctgagcgctgggtgaggagtgcctggtgccccccagagctgtggcccagcaccaagctggcctgggtggctgtgaggggcttcgccatggctacccagcgcagagaatggtcccttcagatccacagaacggggctgcgggtttcgggatctctgggggccgcatgagagttgagggcttctccgcccagagtgactgtcacacacactcattcttcctgtggtcccgcacttctggtctcactctcctaagctggtcacctgtggccggagtccgtatctgcccatcctcctcctgggtccaagccttctgtac

SEQ ID NO: 3954 - DNA, 2166 bp, Macaca Fascicularis
gaataatgaaatagaggaactgaaaactttatacaggagtaaacaacatgaaactgaagagactattagaaagcttgaaaagaaagttcagacactgatacgtgactgtcaagttatcagagagactaaaaaagaccagattgcagaactaaaaaagatatgtgaacaaagcacagaatctctaaataatgactgggaaaaaaagcttcacaatgctgtagcagaaatggaacaggaaaagtttgatcttcaaaagcgacacactgaaaacattcaagaattgcttgaggatacaaatgtgcgtctgaataaaatggagagtgaatatatggcgcaaacacagtccacaaaccacatgatcaaagaactggaggcccgtgtccagcagctgactggagaagcagagaacagtaatttacagaggcagaaattaattcaagaaaaagcggaacttgaaagatgttaccagataacgtgtagtgaattacaagaagtaaaggcaaggcgtaacacactgcataaagagaaggaccatcttgtaaatgattatgagcaaaacatgaaactgttacaaaccaaatacgatgctgatataaaccttctaaaacaagaacatgctctttcagcttctaaggcatctagtatgattgaagaattagaacagaatgtctgtcaattaaaacagcagttacaggaatcagaacttcaaagaaagcaacaactaagggatcaagaaaataagtttcaaatggagaaaagtcatttaaaacacacctatgaaaaaaaggctcatgacttacagagcgaacttgataaaggaaaagaagatactcaaaagaaaattcataaatttgaggaagctttgaaggaaaaagaggagcagcttactcgtgtgactgaagttcagaggttgcaggcccagcaggcagatgccgctctggaagagtttaagcggcaggtggaactgaactcagagaaagtctatgctgaaatgaaagagcagatggaaaaagtggaggcagatctaactagatccaaatctcttcgtgagaaacaatcaaaggagtttttatggcaactggaggacatcagacagcggtatgaacaacagatagtagagctgaagctggagcatgaacaggagaagacgcacctattacagcagcataacgcagagaaggatagcctagtccgagaccatgaacgggaaattgaaaacctggaaaaacagcttcgcgctgccaatatggagcacgaagatcaaattcaggagttcaagaaacgagatgcacaggttattgccgacatggaggcccaggttcagaagttgagagaagaactgatcaatgtgaactcacagcggaaacagcagctggtagagcttggtcttcttcgtgaagaggaaaagcaaagggctacaagggaacacgagattgttgtcaacaaactgaaggctgaatcagaaaagatgaaaatagagctgaaaaagactcatgccgctgagacagagatgacactggaaaaggccaacagcaggctgaagcagatcgagaaggaatacactcagaagcttgccaaatcttcacagatcatagcagaacttcagacaaccatttcctctctgaaagaggagaacagccagcagcagcttgctgcagaaaggcggctccaggatgttagacaaaagtttgaagatgagaagaagcagctgattagagataatgaccaagcaatcaagattttacaagatggattagaaaaccgttctaatcaggtgcgatgtgcagagaaaaagttacaacacaaagaattggagtcacaggaacagataacttacatacgacaagaatatgaaacaaaattgaaagggttgatgccagcatccctaagacaagaacttgaagacaccatttcctccctaaaatcgcaggttaattttctgcaaaagagagcctccatccttcaagaagaactgactacataccaaggcagaaggtaactgcacaagagaatgcaatggatacaatttccaggctgcgctgtggacttcttccagcaggtttgaagatttggatattgtaaactgtgagatcagtggcatttttaaaatccttaaatgtaattaagatcataaaaacatgcatcattcaaaaaaaaaaaaaaaaa

SEQ ID NO: 3955 - DNA, 708 bp, Macaca Fascicularis
  misc_feature (1)...(708): n = A,T,C or G
gagannnnntggacacaggaaggggaacatcacacaccatcagacaccaggaagagggagggcggagggatagcattaggagatatacctaatgtaaatgacgagttaaatgggnnnnnnnnnnnnnnnnagtnnnnnnnnnnatacntaacaaacctgtacattgtacacatgtaccctagaacttaaagtatattaataataataaaaaacttataggtcatttgcgaaaagtgatagattttagaaaataaagtatttataattttagaagtcagataagtttttagtaatatttgtgtacaacagaagttggtagccacttttcagacaccatgacctcttgtttcacccagaaatagtgaaaacatcaaaagttcaatatttctactagataccttttacaaggcggtattattaaatgacaaataatttatatggaagctatttatattactagtagattgctaaccccttccgtgtttaaaataaatgagaaacaagaaaatagaaataaatgaacatctgcacaaatagcttttgaatgcataacaaggcaaatgaaataaaaatgcaaagtcattaaagatgtagtccttttattttgaagaattagaaattattactttttgcttatagtataaaataacattttatgaaaaattacttttattaatggaatgataagaaattcataagccttaaggt

SEQ ID NO: 3956 - DNA, 606 bp, Macaca Fascicularis
  misc_feature (1)...(606): n = A,T,C or G
caagtgactctaaacttctcttgactcaggctctaaggcccaaaggatagggttagagaccctgtccccttctcttacctgcccttccagagacaaaagaactccgggctgccagaggatgagggaggagcatattcggattgaaaatggtgtggcaggaacacagggatggtccgctgtgcacaggctgtcggggtctccgtggggtctgagccacagggtggcgaacacaaggacactgaaaatgaccagctcaggacaaggggctctctagtaatcacaaagtggccttcctgtggcaggcgctgtgtggggaaggggacaggctcctgtgtagggtgacgctggaactcactgactttaagatcaccaagtcaggccaggcgcgnnnnnnnnnnnnnnnnnnnnnnnnnnnnnnnnnnnnnnnnnnnnnnnnnnnnnnnnnnnnnnnnnnnnnnnnnnnnnnnnnnnnnnnnnnnnnnnnnnnnnnnnnnnnnnnnnnnnnnnnnnnnnnnnnnnnnnnnnnnnnnnnnnnnnnnnnnnnnnnnnnnnnnnnnnnnnnnnnnnnnnnnnnnnnnnnnnnnnnnnnnnnnnnnnnnnnnnnnn

SEQ ID NO: 3957 - DNA, 598 bp, Macaca Fascicularis
  misc_feature (1)...(598): n = A,T,C or G
atggtagcagaaactgaagtggtagagacaaacccctcgcaaagccagaagcagatgcnnncagaaatgggnnnaaggaatctccccagaagagaactgaggagcagcttttggggctcagaggccagtccgaggggaggcaggcggtgtggccgaaggccggcgcaggcctgtttcggactagggtgtagcatatgtagtaggatgctcgcatgttgtagggatgggtgagggctaaggggcttggctctggtacgagatggatgatgtgagcacagtttgtggggtcaggcattttgcagtaggaaaggggcagggtcggagacctctggggtgtggcctgttctttcttgcctaactccccaagctcctttaaccaggggcttccctcccagagtgagctacgtctccggaggatcgaagcagggaggtggcagtggctagagttgctcagattggctcagatgaaggcccagaggtcaaagcatttgcccaccagaactgagtctggaggccnnnnnnnnnnnnnnnnnnnnnnnnnnnnnnnnnnnnnnnnnnnnnnnnnnnnnnnnncacaaggtcaggagatcgagaccac

SEQ ID NO: 3958 - DNA, 710 bp, Macaca Fascicularis
  misc_feature (1)...(710): n = A,T,C or G
tatggcggtgccagcggtgtcggcagtggcttaggcctgggtggaggaagcagctactcctatggcagtggtcttggcgttggannnnnnnnnnnnnnnnnnnnnnnnnnnnnnnnnnnnggtggcctcagctctgttggtggcggcagttccaccatcaagtacaccaccacctcctcctccagcaggaagagctacaagcnnnnnnnnnctgccaccagctctnnnnnnnnnnnnnntcaggcccctctctggnnnnnnnnnnnnnnnnnnnnnnnncttgtcctcccctggcctccagtctcccctgccctcccaggnnnnnnnnnnnnnnnnnnncttttcttctcatcaatacctgttcctctgagttcctgttgctcnnnnnnnnnnnnnnnnnnnnnnnnnnnnnnnnnnncaagtgttctttttannnnnnnntattattacaggtatctgagtnnnnnnnnnnnnnnnnnnnnnnnnnnnnnnnnnnnnnnnnnnnnnnnnnnnnnnnnnnnnnnnnnnnnnnnnnnnnggagtcctctctttaattgctaactgttctgcccattatagctacactcaggaattcccannnnnnnnnnnnnnnnnnnnnnnnnnnnnnnnnnnnnnnnnnnnnnnnnnnnnnnnnnnnnnnnnnnnnnnnnnnnnnnnnnnncaccgctttctctgctctctttgccttc

SEQ ID NO: 3959 - DNA, 2165 bp, Macaca Fascicularis
aaaaatggctgaagtcccggaggattacgattccggcccagatgaagatggagagccggagtctgaggggcctgaacttcataaatcatatgaaaatgccgaacgagacaccatggcagaggcagactcgaagttaccagcagagatttatcacgggccacagccagagaccgaggaagaggacttcagagagggggagccaaagagtgctaagaacgtgcagctgaaacctggcgggacggccctggaaggcattgccaaggagtccaagagagacgtaccaagcgaaactgaaccagggattccccaagaggtaaagtcggaaagagagatgggagagtttttcaaagatttggaggcccctatggatgaaacgcatgagtcagacctagaaccaccagaggaggccaaactaaatgttacagaggatgtgttcctagagtcagctatggaaacagatccagtgccaccaacggaaaccatgtctgaggtgtcaggggccacagtaagagagagaaatttagaattactagaggaggggacggaactgggggttccagaggaatcacttagagtgcaacatgaagagacaggtgtagagcctccagagcagacccaactagattttccaagtgagaaaccaggagaatcacttgaagagacagatcttcagccaccaaagatgaccaaaccagatattccagaggagacacaaagagagtcaactgagaagaaaaggacagagccacctgagcaagcgagaccagaatttccagagaaggaaccaagaaagtctagtgaggaggcaggtctagagcctccagaagagactcaaccagaggttccaggggagatgcaaagaaaggcaactgaggagaaagggacagaactacctgagcggactaaaccagaccttccagaccacaagtcaagaaagtctactgatgagaacgtccctgagccactagaagagatcaaattagagtttcccgaggaagaatcaagaaaaccaaatgaggaaacaattctagaacaatcagaaatgatgaaaccagaaagtccagaagagataagaaaatcaaatgaggaaaaaaatccacaaccaccagaggagactggtctagtgctaccacaggaaatcaacccacaagttgaagagaaaacacaaacaaagccaactgaggagaaaaatctagagttaccagatgaaaccaaaccaagagagacacatgtagaatttcccaaggaagacaggccggaaccaatcaagtctaagtattctgtaggaaagaatgagctagagttccgtgagcctaaaaaaggaaagtggtcactaagtgacgaatttaaaaaagaatactatgcattaggatctatcagagaaagtgaagaatcaattggtacacattacgagttttcacaaccactccaaaaatcgtttgatgtcagtgaagtatgctcatacttagatccctcagagtctctgacagaattaaacgagtttgttcatgaaaaggaagctgtagatttgtcccaagacttgaaggaactggtctctgaagatgatgaaacccagtcaaaacaagggactgagttacaatttgagcatcttaattgggatccagagaaagttgcagagtggattagccagctaggcttccctcaatacaaggaatgttttatcacaaacttcatcagtggccgaaaactcattcacgtcaactgctcaaacctccctcagatggggataacaaacttcgaggacatgaagactgaagttatggatttgggggaaaccagtcacagaggtgatgagcccctcccatctcatcatatcaggaagcaatttctcgacatacgcgggagctcctggaaattgaagaaccattattcaaacgctccatcagccttccccatagggatattattggcttgtatttagagcaaaaaggtcatacggggataaaatctgatgccttgactttatctgaatttgtcaaagcagcaggattacaggattatgcaccagaaataactgcccctgaagagaatgaggaattaccttgcactgaaccataggagaaagccgcttcacagagcttgaaagatcaaactaaattacttgcgggaagaaaaaaaaaaaaaaaaaaaaaaaaaaaaaaaaa

SEQ ID NO: 3960 - DNA, 634 bp, Macaca Fascicularis
  misc_feature (1)...(634): n = A,T,C or G
tcaccnnnnnnnnnnnnnnnattagggaagccttgtgaccacaagggcagggcttatggcctgagtagcaaggtggtgacctggggccagtgtgacatggttggannnnnnnnnnnnnnnnnnnnnnnnnnnnnnnnnnnnnnnnnnngataagagaatggtccaatttgacgatcttatgtnnnnnnnnnnnnnnnnnnnactttctgtagatgaaaactaccagggaaaaggggaagcaggtacccagtaaagtttagannnnnnnnnnnnnnnnaacccttagagatgggctgaaagttaannnnnnnnnnnnnnnnnnnnntcaggacagaagaggagggggcgtagggggcagannnnnnnnnnnnnnnnngccctgctcccggccccccagcccagtcttcccnnnnnnnnnnnnnnnnnnnnnctgtgctcctcaccacgctggtcaggggagtagaaggaaatgcaatttctgcctgtctgcccgacttccaaacacttccccctcctgcccaggcctctcccaccaccacctctcctccaaagataaccgtgtccatgccgtccgtggcatcatctcgagttttcatttttggatgaagtgacatttagctttaacaagacattt

SEQ ID NO: 3961 - DNA, 728 bp, Macaca Fascicularis
  misc_feature (1)...(728): n = A,T,C or G
ccctgccnnnaagagagctcaggacactagaaaaacagnnnagtgaagggggaaggtgcacagcggagggcccagcccatgggagggtggaaatacacaggaacctcccacccaggggaaggtctagccaggggagtgtggaaatagatggggacttcccacccggggctcccagccctgaagtctcagtagggtaaagagtggagaggactggaaggaggtgggggtgagcctcggaggagatgagattagactgagggtggaagacggaggccccacacgctctgctcctgatgtctccatctcagaatcaacgtctggnnnnnnnnnnnnnnnnnnnnnnnccccatgggagnnnnnnnnnnnnnnnnnnnnnnnnnnnntaatattctagactcgtctcaaccttatctccaatattcaggaaagggagcagaggggagagtggacaaaaggggcatggtccacgtggcttcctggggccccgaggatggggcaggtgttccctctgtggtggtcagaggggagggaggtgccctaggaccaggcaggaaggagggagcannnnnnnnnnnnnnnnnagctaggtctgtcctcctctatctgannnnnnnnnnnnnnnnnnnnnnnnnnnnnnnnnnnggacaaaaggaagacgctgaggctgtttatatcaaccataaaaaactggaaatttcacttttatatttccaaattgtaagcccctc

SEQ ID NO: 3962 - DNA, 751 bp, Macaca Fascicularis
  misc_feature (1)...(751): n = A,T,C or G
gcagcggacaatgannnnnnnnnnnnnnnnnaatccannnnnnnnnnnnnnngttctccaatnnnnnnnnnnnnnnnnnnnnnnnnnnnnnnnnnnnnnnnnnnnncaaatatgtacnnnnngtgnnnnnnnnnnnnnnnnnnnnnnnnnnnnnnnnnnnnnnnnnnnnnnnnnnnnnnnnnnnnnnnnnnnnnnnnnatttccaattttgtcagttacgtgggtnnnnnnnnnnnnnnnnnnnacggaccatcactcggtgcatnnnnnnnnnnnnnnnnnnnnnnnnnnnnnnnnnnnnnnnnnnnnnnnnnnnnnnnnnnnnnnnnnnnnnnnnnnnnnnnnnnnacgtnnnnnnnnnngaatgccctgnnnnnnnnnnnnnnnnnnnatacagcaggaatgatcctgggatggaaatttttnnnnnnnnnnnnnnnnnnnnnnnnnnnnnnnnnnngaatatggtatgttacttatggtcatgaactgatttggaagaacagggagcctctagtgaaannnnnnnnnnnnnnnnnnnnnaatggccccaaaaaaggaggtggctctaagtaaaactggggttgnnnnnnnnnnnnnnnnnnnnnnnatgacgcctgagagccccagagcaccggccccagagtgaccacggctatgctcccgnnnnnnnnnnnnnnnnnnntggcctcccagtgttttcagctgcgcccccccagtctgtctttttagaaagtgaatgatgataaag

SEQ ID NO: 3963 - DNA, 745 bp, Macaca Fascicularis
  misc_feature (1)...(745): n = A,T,C or G
gcatgaccagttctggagctactgnnntagattgggccaggcttagtcatctattggtatggatttatccaggagctggactgcaaccgggaaaggnnnnnnnnnnnnnnnnnntgtttccctaccaacattgtcaccttatgccacagcctagcttgacccnnnnnnnnnnnnnnnnnnagctgggaggaaaagagacccagcgttgcattacnnnnnnnnnnnnnnntagcacaaacctaggaaagctgaagccacaaagtccaagccaccnnnnnnnnnncctgcagagctccagaagaccttgagggcagcccgcctatgccgtgtgtttgctgtattcaatctttacggcttcctgacttctgtgacagtaagccaagctgcaaaaatacacttgatgagaatttcctcttttaataatgttattggaacaccaaatattttcgatttatcttatttgaaagtattagttccattgtgcctggaaaccacactcctttagattgggggctgagaggagacgacccaacattgaggagagtttatttttaaacatggctagttgtcagtatgtacgtgagctagtatttttatgagtaaagttttttaaaggcacattctgtatactgcttagtatatgcattttataccatgtaattatataacactcaaataagttcagcattagaaatgtttagctttgtatgaactaagtgtgccagaaataaacctggagcaattt

SEQ ID NO: 3964 - DNA, 670 bp, Macaca Fascicularis
  misc_feature (1)...(670): n = A,T,C or G
gcccggggcatnnnnntgcccggcgnnnncggcgcggggcggacggaccgacagggaccgatagggacccgccaggaacgtgcctgccccacccgccacgaaaacgtcccagacctgggggcgtggggcaggacacgaacccggcaggaggagggcacggagcaggcaaggagagacggaggtcttcagagacacagaggaagtcccgacagagggccaggtgcagatggacagggactgtcgtcaggggtcacagacttagggctatgaagaaagaggaaggccaccgtggagaagagatgtaaaggaggggcggggagagccggagcgggcagagactggtacaagggcccgcccttaggggtggtgtgcccgggagagcagcctggggcacacagccctgagctctacctttggagagaggccggagctcccagccctgcagctttctgtcccagccgccagcgctctgccctattgcacgttctcccagagaggccctcctgggccagggtctctgtacatctgtgcagcctcctcctcacttctgggcccagtggactagcacacaggggccaggatgtctgtaagatccagtctcttctggtgtggtggctgnnnnnnnnnnnnnnnnnnnnnnnnnnnnnnnnnnnnnnnnnnnngaacccag

SEQ ID NO: 3965 - DNA, 751 bp, Macaca Fascicularis
  misc_feature (1)...(751): n = A,T,C or G
annnnnnnnnnnnnnnnnnnnnnnnnnnnnnnnnaaagaaannnnctnngcccaagggaggtccaaagaaaggaatgctaaatttgctaattctgaaaagaatgactaagctttnnnnnnnnnnnnnnnnnnnnnnnnnnnnnnnnnnnnnnnnnnnnnnnnnnnnnnnnnnnnctgacacactacacaaataatttaattaaataagaaaggaaaaaagggaagaaagtgcctatagagtttttcaagaacttgaagtgtgacacacccatgcaggagttaaaagttgtnnnnnnnnnnnnnnnnnnnnnnnnnnnnnatggagaacccaactaatcattaataagtggttttgttagaatttctttttaactaaagataaatatggtatgtttagctactggggtaataacctaaactagactgtgaaagaaaagattannnnnnnnnnnnnngcctgcaaatcatgtagaattttagtggatcttacttgttaaaaacatcatcacagatttatgtgtagagggaagtggtaagtgaaacagaaaatcagtaattaagatagcagagtttccagaggttaaaaaatactttccaagttatacacagaacaatcttctgcaattnnnnnnnnnnnnnnnnnnnnnnnnnnnnnnnnnnnnnnnnnnnngcaannnnnnnnnnnnnnnnnnnnnnnnnnnnnnnnnnnnnnnnnngnnnnnnnnnnnnnnnnnnnngactagaaatctag

SEQ ID NO: 3966 - DNA, 163 bp, Macaca Fascicularis
tttattaagatgatgttgctccgtccagccccgcaggagtagcagctagggcgcagcttttttggcggttggtatgatgtggttcagcgcaacgtgtggtggatgatttaccagcaaacatctatgtcatcttttgaaggaagaaaaagcagagtagttcaat

SEQ ID NO: 3967 - DNA, 748 bp, Macaca Fascicularis
  misc_feature (1)...(748): n = A,T,C or G
ctcaaaatgtgaactttttttaatctgtgagttctgcctctttcttttnnnnnnnnnnnnnnnnnnnnnnnnnnnnnnnnnnntctacgatttcccagtctgagtcgtactgtgtccccatggtgctgttgaacatgagcctctgtccttgtatttgctttaagttgtcatttagatctagaggttnnnnnnnnnnnnnnnnnnnnnnnnnnnnnnnnnnnntaagtgctgctgtgtgtggtcttggattagaagggacagaggctgtcttttgtgatgttagcagccactacatcagggctaaggttagggactgcaaaatggtgactttcaagtctagcattccttcnnnnnnnnnnnnnnnnnnnnnncctatctaaagagagccttcttgaactatgggttactgggcagtcctctttcatgggaaaggcagaataccgccttgatcctttgactttgcctttttgcagaataagaagttgacttcctagcgtccccctaaggtggctttatgccaccatgaacttatgtattgaaacacagtggtatgtttaatcctttgcagttattcttttcagtagcaatttgtagaactgagaatttctttgtgacagaatgttgaagcagtggtgaatgatgaaggctaggaaagaagttatattcggtaaagtaggaaatctaactccggcatacccattaggtnnnnnnnnnnnnnnnnnnnnnnnnnnnnnngnncactcttgat

SEQ ID NO: 3968 - DNA, 777 bp, Macaca Fascicularis
  misc_feature (1)...(777): n = A,T,C or G
tgtattgatacatatttgtacatatttatggggtgtggtagtttgatatatgcatacaatgtgtaataatcaaatcagggtgtttagggtatctatcacctcgaacatttatcatttctttgtgttgggnnnnnnnnnnnnnnnnnnnnnnnnnnnnnnnnnnnnnnnnnnnnnnnnnnactatagtcaccctactgtgctatcaaacacttgaacttattccttatatgtttgtactcattaaccaatctcttccctgcctcccccaactccaccttcccaggctctggtacnnnnnnnnnnnnnnnnagatcaactttttaagctcccacatgagtgagactatgggatatttgtctttctgtgccaaacttatttcacttagcataatgacctccagttctgtaagatgggcagccaggaaaggccttactgagctgatgtttgaattgcgaagttatgtaatcattgagatgagtatacatacaatgggccagctgagtgcacggtaagattcaataaattcaaactaacattattcttatggcctagagagtgcctaaaatgacaggtcactgggagttggctactttccctccctttccttggggtttaaggagagcatgcgtgatttcagtcttttgctggagcgcttcactgacacccattgcagagcctgagccctcaactctcaatctttgcttnnntcctggctcnnncnccactttgtannnnncacctttctagtactcactactctctctctcacatcatgtc

SEQ ID NO: 3969 - DNA, 363 bp, Macaca Fascicularis
atggattactacagaaaatatgcagctgtcattctggtcacattgtcggtgtttctgcatattctccattcctttcctgatggagagtttacaatgcaggattgcccagaatgcaagccaagggaaaacaaattcttctccaagccgggtgccccaatatatcagtgtatgggctgctgcttctctagagcatatcccactccattaaggtccaagaagacgatgttggtccaaaaaaacgtcacctcagagtccacttgctgtgtagctaaatcattgaccagggtcatggtaatggggaatgtcagagtggagaaccacacgcagtgccactgcagtacttgttattatcacaaattttaa

SEQ ID NO: 3970 - DNA, 2407 bp, Macaca Fascicularis
tactgaggcaacattgagaagataaagtcattctcttgcttttgggtatgttgggtaacattttctgtatcacacaagcgtacctaaataatatcagtggttaacaggtgtaagaacatttaaagcaggtggctttgcctgaagggttgagattccaacagcatgctcctgtcttcatcattcatctatcttctttcccacaaattcctggtctcctagtttgtgattagagagaaagaaaagggtgaagggactcaagccccctctgggctcacagccctgtgcttagtaccgataatgtctcttgtcccccccggaaatggtgcacttccctgaatctccagtgcctaacacatttcttggcacatgacaagtgattcgtaaatattgattaagtgggtgggaaggagtaagcactcaaagcagataaaaatgtctgcatgaatgtctgagctgctctccatcatacctcccggccctgtcatgaaatgctattgtgtataaacagagaggcagcacatcctctgctcctggtcatcctgagctaagtttggggtgggtcccagaggcagataggacctgaactctgcctgtacaaaccctgcaatctagttaagggcactgaaaaagttaagtgatggtgccaggtacaggcactaatcaaaaccaactacacttggacaaacagagaagatctcaggtttcagacaagagatgctgtggtcctctggggatgacctgtggtttcagactgagctcttcaagagtgcctgtaggaagacgaggctatccgagctggtctggtgatctggggattgtaggggcaagccgagggtagggtctatggaatggttggaagcctggaggtcagaaagttccacatttgtctggggaatggggaagtatggtttggctagagcaggagatgggcacaggaaaggagatagatgggcctgaggtctgggtcatgactggagggcctgcaagtccagctgaggggtttggacttgatcccataggtaaaaagaacttttaatgagaaagcgatcgttttatccactggggtctgtcaggtgtcttaggtcagattccccagaagcagagcctgaggcggggattcttgtcacggaggtttgttgggaaagtacctcagaacagaagggatgtgggaagcttggtggtgggacaccaaggaagggtgtcccacctttctgcaaggagcttccttctgacccggagggaagctccatggctcagattgcaggacagatttgtctcaccttggagcaagggagctggcaagcctttgtaccccacgccggtcattggccaaagctggacagggggtgtatgaattcactagggcttctgtcacaaagtaccatggactgggtggcttcaacaacagaaacctattgtctcacagaccttgcagccagaagaccaaaagcaagatgttggtagtgttggttccttctgagggccataagagaagaatctgttcgaagcctctctctttggcttgtagatggctgtcttcatcctgtgtcttcacatcatcgtttctccatgcatgtctctatgttcaaatttcctcttctttttttgatacccatgacagacaaccattcctcttcttacttaaggacaccagcatattggattagagcccatattaatcacctcatttaaaattggttacctctgttaagaccttatctccaaatagtcacaatctaagtctaaggcactgggggttgggaagtcaacataccaattttggggggatacaattcaaccttaacagaaggtgtctcccattcagctaaggacagttctccagggaaggggctgactgtgaacttcagcaactgggggaagcggacatcaacttgtgaaggggactttgtcaagtcccccaaaaatacacatacatactctttgttggatgcttccaagaggtgcagtaccttttagtggcatctctgcaggcctccccagagtgcaagtatccaacatcaactcctgtcttctctgccgtgccagtaaaggttgtgaaaaatctgtgtatccaggatatgcacttcctgagtgcacacccaacctttggttgtgataacttcagcatcacgttttttttcttttttctcaactttttctccttgcagagaagtgtttctgtgtgtttatttatttttaactcaagaaacttaaatgtcggagcgaattggggaagcactgtgggagggggaacctgcacatggaatttgaaaagctatttctagaaaccgtaacacaccacccacccacagagcctcttcccctgccactgaggacaggactgaagaaattgaaaaaaaaaaaaaaaaaaaaaaaaaaaaaaaaaaaaaaaaaaaaaaaggccaca

SEQ ID NO: 3971 - DNA, 731 bp, Macaca Fascicularis
  misc_feature (1)...(731): n = A,T,C or G
gatgtatagatggaaggcgctctggtaaagacaaacccacaaacanntgatcttgattggaaagcnnnnnnnnnnnnnnnnnnnnnnnnnnnnnnnnnnnnnttgatccagctgtgttggcaattcaagatgaccttgttactaactgaaagttgctgtcaaccttagcaaacaaactagctaacaccattacagcactggttaagtagatttttactggcactggctggcgttcagctgaggaaggctaggatacagactttaatgaccaagagccagactagctcaagctagaaatcagcaacaaatacctccttgtgctatttgaatgctaaggtattagttgcaaaaggcttacgccttcgctcctctagtgaggggaatgnnnnnnnnnnnnnnnnnnnnnnnnnnnnnnnnnnnnnnnnnnnnnnnnnngagggatgcaagtacagtatgtctcattaagcagtctctgttgctgattatatgaagatgaaattgttgtatatgctgatctgtatgttatgtacattttcacagtgattgaatcgttgtaaaaagaaaaaagacaaaaaagaatcaccactgtctattttatgaagatgataaagcagctttattaaattattacagttatgtttcaaaaggtgttatctgccacattgtttccttttatctggtggttctnnnnntccccctttaaatgtgttttctctgcttcaaaaatttaa

SEQ ID NO: 3972 - DNA, 1220 bp, Macaca Fascicularis
  misc_feature (1)...(1220): n = A,T,C or G
gccaagccggcgccctcgcagaacaggccgaagaccccgccgccggcccccgcgcccacccccggccccatgctcgtgagccctgcgcccgtgccgctgccgctgctcgnnnaggccgccgcgggccctgccctgctgccctccccgggtcctgccgcctccggggccagtgccaaagctcccgtgcgcagcgtggtgactgagacggtcagcacctacgtgatccgagatgagtggggcaatcagatctggatctgccctgggtgtaacaagcctgatgatgggagtcccatgattggctgtgacgactgcgatgactggtaccactggccctgtgnnnnnnnnnnnnnnncacccccagaagagatgcagtggttctgccccaagtgtgcgaacaagaagaaggacaaaaagcacaagaagaggaagcatcgagcgcactgacggctgccgaggggctggaccaagcggggtcagcccaggcttcctccctggcgcccctggaagggagctggtgcagttctgccatcacctccagcccagatgcctgtggataaagaacccgggaggactgcggctggaacacaccgcgcacctgcattgttcactccccagccgcgctggcctgtggctccgtggcagtgcgacagaaggaaaccggagcagaggcgtggcctgggggctgcccctcctccacttctctaataccagtgacaagtattgttaataaagagcgtacatcttccctttggatttcctttattctctccaggggcttttcattgaggtgttagatgagaagataatgtacaaactgcctcaactgtaatttaaggatgatagagtctgtatacagttttcagcccctttccctctatagtaagataatcagaataacataaagaaacctccagtgggagtgccggtaaatatttttgtgataagaatatacgaagcttccctccttcccccgtttttagtactaacatgtaaaatgttcaggcttttgtgaaataccttatattttttaagaaaaaggtttctatcatgtcctgtttgcttttgtgcaaattatttttgtttcatgtattttatatcttcgttgcattctaattttgcccttctttaaactgctggagtctcttctcactgcttgtacatttcatcaacttgtataaaaactcttcagactaaaagattgcccctaatgtaaataataa

SEQ ID NO: 3973 - DNA, 2331 bp, Macaca Fascicularis
  misc_feature (1)...(2331): n = A,T,C or G
cataattaaatcatattcccactggaaacctggaatttaactcccactagtgcccttcatataaaatggtgagggaaagggggaaaaggcataattaacataaagcatgatggctactgtttttgctattcacaaagcctaaattgataatcctaattatcttcttccattactcattttatatctcccttactctctgtcagcacctcggtggcataaatttctttacctagttaagtaacataaagctgctttcctggatgatctgagtcctcagtaatcctgcttctttcaggatgcttcagtgtaccattgactaggcctactagacatgagaggactaagacgcatcccattgaatcctcttgagttccagacatactctttctataaatgcccttcctgtgttgcagcaaccagttcccctttggtaattgagatcagtcatcctggacagtaaagtgatcccttctatgttggttcagcagcatgaggatcccagaatgaccaggagacagtttcatctttgaaattaacaaaatcatgactttgttccatggtggaaacatttctcctttgagcatgagcatgagaacttcaaactcaccatgcccacaattcgggggatagaaagcaaaaataatacaagcaaattattaggtctctaataagaggaaccattctcactcttcctctacccttggttcctgtacctgtgtatgtattctggccatggtgaaaaaaacaatatttattgtcctttgatttaaggcatatattgcatctatatgacagcaccccagacttacagggtgttgtgttgttgacataactcagcctttagcagataattccacatactttttgattaatgggcatatggcaagacctatgaattacgtgtatgtgaactcactgctatactttttttcctgaaaaatgagttacttggaggcaacagtatcgaatactgtggtaataaacataaccttaagtcaatgcaaatttatatctggactatgtatttaatactttgtaaacaaatcactgccctctttttgatagaagtggttcagtgtagtatctgccccatttctggggaatggtacctttttaggggcttggttttggtcttggctgttagctgttgggcacatagaagttgtgataggcgtatcagccttaatgaggggaggtccatgttgttgagcccatatatagttctcattcccactgccatgactactttatacatgagcctgttggataagcattggaaaagagactggttgacagtcataaagtagatcatcatatctgtctgacggaaaggcttctccacagtagatgccctttggtgaggattcacatgcgacacaaatatattcacattcattgcccattctgggaattccatcctcactcatacttttcccctagaatctttgcttccagtcctccaatcttgttctttctaggtacctccataatcaaataacccattagtcactacccattaatcaatataaacatatcttaggctatgttacctttcgtgaaaactggacaactagatacatacgtgaaattctgcccactgggaggatttgcctgcaccagcgtgtttgaggccacttgtgagtagaggtgtaagtgaaagctgtttacttttggctggtgccactccccaccatctgtaaaccagttctataatttttcctcagctgttaactggtaataaggaattcccatgagaccataaacacaaattgagggggagaggtagtgaagcaataagaccaggtactgtggaattctagtcacttgcatatggaatttacttttcttctagacttccttttgcaatggaacgttactttgtgtgtgatttggtggaataacaaccagtacacaatgagcagtctgtaatgtgtagtcacttggtgctctgtgttcaaaagtgaaatctctattagtacccaatagtaagccaggatctgcttttcatatagaaaattgttgctgaggccgggcgcggtggctcaagcctgtaatcccagcactttgggaggccgagatgggcggatcacgaggtcaggagatggagaccatcctggtaacacagtgaaaccccgtctctactgaaaaannnnnnnnnnnnnnnnnnnnnnnnnnnnnnnnnnnnnnnnnnnnnnnnnnnnnnnnnnnnnnnnnnnnnnnnnnnnnnnnnnnnnnnnnnnnnnnnnnnnnnnnnnnnnnnnnnnnnnnnnnnnnnnnnnnnnnnnnnnnnnnnnnnnnnnnnnnnnnnnnncaacaaaaaaaaaaaaaaaa

SEQ ID NO: 3974 - DNA, 2804 bp, Macaca Fascicularis
agactagatttaagacaggtgaaactgagatgctttcttagtttgtcttagacagatttaagtagctaattgaccgattgtgaagttttccggttgctgataaaactattgagcgggtgcagtcgagtagcaacctgtcatccgtgggattggtgcaccatttttctcaccgtggaagggcagcaaaggtgtttgctaagtaaaactgagtggatgagattggtatggaaatcatggttgatctctgagcgggatgttggtgtttaagatccacggagtcaggagctaaatgagcacatttctctcagtattcagaaatgagtagataattttttcgtttttgatttttcgtcacaatggtgaatgggcagaaaggggaaagatgctctaccgcactgtcgattttgaacggagtcacagattcggtcgctgaatggggactgtcagacccaaactagttacctgcctttgcattccgcgttcgccatccggaatctggggttaaaaaatgtaaatcaaggcaggatggggaagcagaatagcaaactggcccccgaagtgatggaggacctggtgaaaagcacagaatttaatgagcatgaactcaagcagtggtacaaaggatttctcaaggactgtccaagcgggaggctgaatcttgaggaatttcagcagctctatgtgaagttcttcccttatggagacgcctcgaagtttgcccagcatgccttccgaaccttcaacaagaatggcgatggcaccatcgacttccgagagttcatctgcgctctgtccatcacctccaggggcagctttgagcagaagctgaactgggccttcaatatgtatgacctggatggtgatggcaagatcacccgagtggagatgctggagatcatcgaggctatctacaaaatggtaggcactgtgatcatgatgaaaatgaacgaggatggcctgacgcctgagcagcgagtagacaaggttttcaacaagatggataagaacaaagatgaccagattacactggatgaattcaaagaagctgcaaagagcgacccttccattgtattacttctgcagtgcgacatccagaaatgagctgatgtcagtgctatggactgcacaaaagtctcaatgttccattcagtctgcagctattcacacacacacacccacacccacacacacacacacacacacacacaaatattgcttggactacctataaatggacttgcttcttgtgtttgaaacacttgtgtgcatgagaatgtcatttgctaatgaattttaaaagcatatataaaacaaaacaaaacaacctgccacaatgtgatatgtgtaatatcatttcataaaaatccctcttcctccaaagcctgggcagaaatgtactgcaaagagttatatgatttcttgttcatgttttgctaatgcttgtatctccttgattacataatgttagtagcactgagacccccacggtaatgtaacttaattataagctatgtcactaccctcctgtaaaatagtattggacagacacagagggacccttggctcctgtgtctggtccacacaccacaagagcttgtattatcagtgaatataaatgtactacatttgcatgccttttgggtttgccttaattcttacctcatttgcatcctatcgatctggaaagagctgttttggatgaatgcagtataaaatgtaaaatccctgctaaatgacttattaagtatatctatctatatatacatatacacaaagatattatttatcagaagtaaaaaagatggaagtgtattggtttctgtttgaattttcaaaggcttccaatgtggtggcaataaatgtcccaaataaatttataacaattgattttccccctaattcttattttataattttaaaatagcagcagatgctagcaacaacttactaaatctactcttaaatacacaactttggaatttgaagaattaatgacaacaaaagggaaaaaagcaactttccagcttttcatccaggctcccaaaagagggacaatgaacacggcatgtgaaaagtagaacagattgttcatccgaaaaaaaatgttcattctctgacaataaattctatctcagtgtgactttggtgctaatgttcaatgcaacgatgtggagctgtacacacacagtaggtatgttcaatgcaactatgtggagctgtacacacacagtaggtatgttcaatgcaactatgtggagctgtacacacacagtaggtaggctgcgggcgggtgtcccccaacataagtcagtaggaaagaagacgtctgtcttcccaaatctaaagtaggcaaaaacacagaagtagttatttttaataacagaatagaactctgactcttttgatcttgaaagaggcaaaagagattccatcaaaacctctaaaagcaggtttgcattttcagaacatgcgcccctagagagctgagttttttacactgcactgcccaatagtactttctctgatgatgggaaggtctacatctgcacagcacactggctataactgcacgtatggctactgagcacttcaagtatggctagcgtgactggggaactgaattttatactgtaattaaatgtaattcgccacatacagctaatggctttagtaacagacagtttagtgctatattatttattcaagtactttttattgaatgcattttttaccattctttgtcttaggatcattaaataacactaaactagggactaaaaaaaaaaaaaaaaaaaaaaaaaaaa

SEQ ID NO: 3975 - DNA, 735 bp, Macaca Fascicularis
  misc_feature (1)...(735): n = A,T,C or G
gctgtcgactcctnnnnncagctccactagctcttcatcatgccactccnnncagaacttcaacaaaccagggcagtcaggatctgaagtctttctggtctccccaagcaaactaagcacttgagggacagcccttggcaatgctttcctgtctgctgagcatggtgaccttccttaggacttccagagttcagttccttctggcagatatgttttctttctccatgccacatggatgtgactcaaatgtggggtcccacagcttttcctggctaccacttgctgtgaccttatacatatgttgggttttgctcttgaagaggagagcaggaagaaaggttggtttcagaaaccaagagggatggcagtggacgagtacattttgtcacggagtccacagagctgagcagactctgagaagtatcattgcttgtgttgaaagaatacaacaggatttaagtttctctttagaaattgcactgaagaaaggcannnnnnnnnnnnnnnnnnnnnnnnnnnnnnnnnnnnnnnnnnnnnnnnnnnnnnnnnnnnnnnnnnnnnnnnnnnnnnnnnnnnnnnnnnnnnnnnnnnnnnnnnnnnnnnnnnnnnnnnnnnnnnnnnnnnnnnnnnnnnnnnnnnnnnnnnnnnnnnnnnnnnnnnnnnnnnnnnnnnnnnnnnnnnnnnnnnnnatccgggagccggaggttgcattgagctgagatcatgccactgcac

SEQ ID NO: 3976 - DNA, 722 bp, Macaca Fascicularis
  misc_feature (1)...(722): n = A,T,C or G
tttttacacttttaaagcttttaaagctaaagccagacccttgcctctcccagagtgggcggcccctcccctccttctgagtagagcggttagagcagttgaggcagctttccttgtgatgccacaggtccctctggacaccctgctgcctggccacgcttcctttccctttcatctttctcactgaccaatgggcttggagcattaaggccacgcccctcttctgagttctagtggggccctggttatgcctcctctggctcagttgcacagcggcctggtaggtgactggaggcattcagccgnnnnnnnnnnnnnnnnnnnnnnnnnnnnnnnnnnnnnnctccctccgaaccccatgatgtcagaaaaaatacgacagggaaaattcaccacagccaagaaaaaggtaaagtgcaccaggtcatagcccccaacccaaccacagatcctctccgnnnnnnnnnnnnnnnnnnnnnnnnnnnnnnnnnnnnnnnnnnnnnnnnnnnnnnnnnnnnnnnccagcgactctgggctcccccccaccaaattcttgtcagtcagccccacnnnnnnnnnnnnnnncccaatccctgcccttgccgatctttaccccagggtgactttgggcgggtgactcctggggctccccgctccatacttggccctcacctcctgctgccccaagcctgaccttcctgggctcttcgggcttgcgtctc

SEQ ID NO: 3977 - DNA, 1170 bp, Macaca Fascicularis
  misc_feature (1)...(1170): n = A,T,C or G
cgtaatcgtgagagaatggtgtttgtggnnnnnncccctctttggctggtggaggataaagttcctgctcttttacctccaagacgagggcctcattgatnnnnnnnnnnnnnnnnnnnnnntctgaagaacaaggatgcactaaagttagcaagtttataataaagttaaatataaatcattttgttttaaaatgcctcaaatttttctttaagtattctaagcagcaaacattaaaataagaatatttcctgctaaatgtaaccatacactttattccacaaaatgttatttaacaagactgagggttttttttaagaaaaaattatttccatccaatatttaaagacttgaattttatttannnnnnnnnnnnnnnnnnnnnnnncttttgtataagacagcttagagtccatggagcccggccctgggttggcgtgagtgggtcagagttactcagttactgtgtggatctcctgtcgctggttttactgagtaagcatagtgtagtacaagagctagcggtagtttttgtaatagaccttaaagatcttcaacagttgatcttttttcagaatgttgggaaatcctgtaaatgcaaatagtcaatactgtattaaatacgtgcactcgggagtgtgcttcgcttgtacagttgtaaataatcagaacatatgaaaaaggtacctacagagaaaattctgatacaaattattgatatattatannnnnnnnnnnnnnnntnnnnnnnnnnnnnnnaaatgttgtggtttgaatattattttgatttgttgagattttcttttttctcttacatcggtgtgttgaactgattctgcctcnnnnnnnnnnnnnnnnnttggaaagtcttattaaaagcctccagatgttttcatactcttttaannnnnnnnnnnnnnnnnnnnnnnnnnnnnnnnnnnnnnnnnnnnnnnnnnnnnnnnnnnnnnnnnnnnnnnnnnnnnnnnnnnnggaggtgaaaagtaatctaattaaaatcacttgcagctaagcatgatttacctgccagaggaaaacatggcctggcatttttgaccatttcctttaaagcagttgctattatgcaaatacagagaaacagccacagggctagtgtttttcaaatgcattttaaagaaaccatggggattt

SEQ ID NO: 3978 - DNA, 696 bp, Macaca Fascicularis
  misc_feature (1)...(696): n = A,T,C or G
aannnnncaanggcnnnnnnnnnnnnnnnnnnnnnngctactnnnnnnnnnnnnnnnnnnnnnnnnnnnnnnnnnnnnnnnnnnnnnnnnnnnnnnntgaaggaagtggaannnnnnnnnnnaaagtannnnnnnnnnnnnnnnnnnnnnnnnnnnnnnnnnnnnnnnnnnnncccnnnnnnnnnnnnnnnnnnnnnnnnnnnnnnnnnnnnnagtttaccaggctatagaagctgcatggagtctggannnnnnnnnnnnnnnnnnnnnnttcccctggaggtgtggagaggaaatgttacactttcaggctttgtgcaggacaagcagagagtatcactcaaatcnaagctggctgccctgtgggtgacacaggcccatgccagcaggcctgggtagannnnnnnnnnnnnnnnnnnnggccagcaccagggggtgtgaggagcccacctccagtctcagagcagggttgggcttccctggatggggaggaaagggttaagccggcttgggctctgaagggaaagcactctgcagctataaacagagagcccagggagggaggggccgacaggatgtggccagggctcgagctgtctgattattaacttcacttttatttggagggggattcgattctctgttttacttcccatcaaggaagtgaaagcccaggtctcagaggggcctggtttc

SEQ ID NO: 3979 - DNA, 2352 bp, Macaca Fascicularis
  misc_feature (1)...(2352): n = A,T,C or G
taaatctaaaagatgtccacatagcaatgtaatgttcttaagtaatgcttaatattgattcaggaaaacaccagagaactcaaccgcagtcgacagcatataattcgagcagataacaccatcacgcactcaccctgctctcaagtactttggggtttctttgcgtaaagctgccatctgatgcaatagttgcatctttattgagatcagctcatgatacaacaagcaactagattggtctgcttattgctgtctgggcacccaagcagagatactgcggttttaccatctgatcatggtcctgccatcccatagagcttcccagtcctccctgggatgtcatacttgctcacacaagaacatctgaatgcggaaatggtcaagcctgggaaaatccatgacccgctcaaccaacttttgtctttgaccactgcaccaagatctttcagactacatggacaagcaattgtcgattgatgattgaagatgaggcacaatattaggcctagtctcaagagggtttccagaaagatgtgattgtcctttcaggtggcagttgcataaatgtgctccagacagcctactttcccatgagaatggcatggaagcattgttcatgaactcgcgcagcatcttgtggctgaaatgtattcttagcttgcattgacttttgttgagtatggagttccgcaggtttgctcacagtggcggggctgctcttccttttgccttaggcttgcatctctcatgctctggcgaagctgttttgttgcagtagagattttgttgagtggtctctgttgggttgattttctgggcaccaccaacagaattacttaattgggagtaagttatttaacttctgtgaaatttgtgttctcatcaataaaatgaggatagtcctttctcatactgattgctagattagatgtaacgtttccagaattcctagctcataggagtcactcagatatctgtgatctgaaagacatcagtaacggttcccttcagctttattttcatctcaggtgtctacagcatcatgattcaatcaggggattttcgactttggcactaccaatattttgggccgagtgagtcttggtggtgggggttgccctgcacatcctaggatgttgagcaacatccctggcttctaccatctggataccaggagaaacccctatgccgggtgtctccagacattgcctagcattcctgtgggggcaaaacccccctggctgagaatcactgatttaacctaaaaggatagagtttttagttatgaacttcagactcatagtgagtttgggggattctccagatgccaccctacagctttctgacatgtctccaaggcatgttagcccacctcagcttccctagtagctgggattataggcatgtaccaccaggcctggctcttttttgtattttttgcagagaccaggctgatctttaactccttggctccagcgatctgtccatctcagcctcccaaagtgctggaatgcacccaggctgtctgtgcaaagggaggaataggtgcttgaacagaagagagatgctgctcagaactacttagggactgaatagtgttgttagaatctgagtaaaaggatgtggttttgaggctatggctacccccaaagaagataattggtactaggaatttgccgtgtccttaattactgtgaccatctttaattttctgtctgcttccagagaaatgttggaatagttttatgaacagtggttgtaccaagcatgataaacnnnnnnnnnnnnnnnnnnnnnnnnnnnnnnnnnnnnnnnnnnnnnnnnnnnnnnnnnnnnnnnnnnnnnnnnnnnnnnnnnnnnnnnnnnnnnnnnnnnnnnnnnnnnnnnnnnnnnnnnnnnnnnnnnnnnnnnnnnnnnnnnnnnnnnnnnnnnnnnnnnnnnnnnnnnnnnnnnnnnnnnnnnnnnnnnnnnnnnnnnnggcaaggctgatcttgaactcctgacctcaggtgatccacctgccttggcctcccaaagtactgggattacagggatgagccaccgcatcaggtcataaactttacagtgcttctacatgacaaatgtcatttgattcaagatctatgtctatacatcaatagatgcattcatgcttccacctagtcaattcctattttcctcctttacttacacattttcaaaactatttcttaatctcttgcttgtctgaaggaggtttttttctactgtgtaaatgtttgagtctagctggttgatttttatgagctgtttgcctgaagcttaataaataagacatcattttaaaaaaaaaaaaaaaaaaaaaaaaaaaaa

SEQ ID NO: 3980 - DNA, 1909 bp, Macaca Fascicularis
  misc_feature (1)...(1909): n = A,T,C or G
attatcgcaactgccagctccagctcctgcagtttcccagtcgcaatgcagcaaagcagaggcagacaactaggcacaaagcaacagagttttaaagttttcttctcctgctactacttagcgtgtcttgcatgaggagtatttacctttgtttagccaggagcagagatgcagcctgaatgtacacgatggcttctaacttggcagcgcgaattttcagctgagcaggtactgctcggagacttgtaaccaaactgcttctgatggagcacggctggtttcccaccatgtgtgtgaatagtttgggggcttcttatgccacgctgctctacctgcaggaataaaggctaggacaaaggagaggatgcttgccatggtttgtctggctggggcctgtgcgagcgactcaccgcactgatgctgtgtgactccctgatctaaatctttcccagtcctctctggatgcgggacagctgtcgactagcagtgacacaaccagccatcaagtggagaatccttgcgactgcagtctgtgtgcaggtggagcccgggagaatgacagtctaatttcggtcatccaatggctttttctgattttcctaaataatcgtgctcgctaagtatacagttgtctggattagcctgcctgccatgcagtcctcatcaactctggctggaaatcagggtgccaggcaagccgcctttagctctggcttctttctgcgtgatgctatgcagctaggatgggtcacgctgacaacaaagaaggaagcagaaagcatcactttctcttctcttgtgatgttagcggaacataactcttcttcgcagtgatgccctccnnnnnnnnnnnnnnnnnnnnnnnnnnnnnnnnnnnnnnnnnnnnnnnnnnnnnnntttaattcatctaatcgaagagcctagcaaacatcatcatggacgtggtttttaatgatttggaaaaagcaaaaaaaaagcctgtggagacagcgattcgaaacagcggcacatttaggttattgccaatttgaaatacttggtttgtgaagctgagccctaagggacaagctcggtaactgaggaagagatcgtagataaagaaataaaaatgacaagcgtaatggaggctctgcgaagggactgtcagagcatcagttcatggatggcaatttcgccaggctgagattgaataattcatagattgaaattaccctgctttcacctttccatttaaaccggcatgatctgaatctctaataaattttcaagataaagtaaaatgccaatttgaatctgaagacttttaaaaccagatgctgcatccctgcatctttcggtatctttcacaattatcctatgagaacagcacttcatcacgaagcaccattaccagggaaaattactgtgattacaatagcaacaatagannnnnnnnnnnnnnnnnnnnnnnnnnnnnnnnnnnnnnnnnnnnnnnnnnnnnnnnnnnnnnnnnnnnnnnnnnnnnnnnnnnnnnnnnnnnnnnnnnnnnnnnnnnnnnnnnnnnnnnnnnnnnnnnnnnnnnnnnnnnnnnnnnnnnnnnnnnnnnnnnnnnnnnnnnnnnnnnnnnnnnnnnnnnnnnnnnnnnnnnnnnnnnnnnnnnnnnnnnnnnnnnnnnnnnnnnnnnnnnnnnnnnnnnnnnnnnnnnnnnnnnnnnnnnnnnnnnnnnnnnnnnnnnnnnnnnnnnnnnnnnnnnnnnnnnnnnnnnnnnnnnnnnnnnnnnnnnnnnnnnnnnnnnnnnnnnnnnnnnnnnnnnnnnnnnnnacaacccattccctctctttcctcctaacaccccacccctcaaaccctcaaaatactctacaaccaaaaaaaaaaaaaaaaaaaaaaaaaaaaaaaaaaaaaaaaaaaa

SEQ ID NO: 3981 - DNA, 722 bp, Macaca Fascicularis
  misc_feature (1)...(722): n = A,T,C or G
gtgaatcaagaaaatgtccaagttgacagtnnaaaatggctactggtattttgttaattnnnnnnnnnnnnnnnnnnnnnnnnnnttttactaacattctatttgagaagacttattggtaaagtttgggnnnnnnnnnnnnnnnnnnnnnnnnnnnnnnnnnnnnnnnnnnnnnnnnnnnnnnnnnnnnnnnnnnnnnnnnnnnnnnnnnnnnnnnnnnnnnnnnnnnnnnnnnnnnnnnnnnnnnnnnnnnnnnnnnnnnnnnnnnnnnnnnnnnnnnnnnnnnnnnnnnnnnnnnnnnaaatatctctacatgtatatttttaccttaaaaatacaatgttaggataaatccccttttcaggaagaacaaaagtgtcagtgcatagttagataaaatggtgaaatgttttactgaaagcatactttttcggaannnnnnnnnnnnnnnnnnnnnnnnnnngnnnnnnnnnnnnnnnnnnnaaaaactttaacattttcaaagtgcccaggatgtgtacaaagacacattaatggagattgtacaggttgtttttttgtttgaacctttgaaagagtttaatctcaatgttttctaattttaaaaatttaaaatcttgtttaacaaaaacaatgtattaagatactgttttaatttcattacagaattgtttataaaagttcattcttgaaaaataaggatcctttttaactaccacagc

SEQ ID NO: 3982 - DNA, 766 bp, Macaca Fascicularis
  misc_feature (1)...(766): n = A,T,C or G
ggagtcactgcatgcataaaatgtacannngcagaagatgccgacagaaccattttctttaactctcctttataactgagtttgctgattgatgtgatgcaagggattttatttagaagtaaaagcactgaaactgaaccggaggaaattgccaaaagtcccagaatggctttgacagaattgccatttctgaagaacagctgaaattcatttttcatatctttgagagtnnnnnnnnnnnnnnnnnnnnnttgtaaagggattctgtaaaccttcttccaagcacaaataattccaaacaggaaggttctggggcggggggttatgtgggtgtgtgcatgtgtgttcttccctctaaaattaatttattttctctatctattggaatgccctgtaaggcctttctttaacacacactgactttttgaagaatgatcttcagaatgataacttgctattttatggtgactctgtggttaggcttatttacagttaatctaaaatattcataaagcaccacttattaatcatccttttggatctttcaaacaaaacttaaaagtgtcttcaaaaatgttatggctttgtttgtaattcatggtatattaaaatgttgttttgaaatacagtttatcttaaagaaaatttgacagtaactatattaatggggacgttaagtaatatatttttgattaatggtgtaccattgagagaataagaaatggaagtctattattttattctttaaatgtgctgtttaaatata

SEQ ID NO: 3983 - DNA, 644 bp, Macaca Fascicularis
gtgggtggctcatgctactgttgtccataaagctaagctttgctgggaaggaaatgacctatagtttcttaaagaatcattaatccttataggattcgtgagttactgtttttttcctccccctccctcccattcctgagttttataatctaatccctctataatttctattaccttcatcatagtcattctttccttacgcaaagcccaaggaatgagctgctgctactttgaagtgtggtcattatgatgaatgtgaaaagagttttggcttgttggaaataatttttacaagttatggtacagacagttgttacatatcaaaaaaaacccctgtttattgaaacaggaaataaaaaagggatcttttacattatagaattaaaactaattttttcttgtatataaactaattggtttgattttaaatatttctggcttttattagtatgtcttaattttgagtttgaaaatgttaagtgcaataaaaacacactagtacagattttgttttgttccaattggcatactctggggatgatcacttaaaaaaacagattttacataatgcctacttctggtagatgtcttatgagattgtttgctttttctaagttacttagatgttggatatgtaaaatgta

SEQ ID NO: 3984 - DNA, 682 bp, Macaca Fascicularis
aggactctagggggatggaggactagtgatcggctggctgcttccagtcgattagagaggtgaaaaagctgaacgtgtgccagtaatcttcaaaaggcagaacatatcacctctgccccgtaaactgttctctccgagggaaaaaatggaagttatcctcacagttcactgccgtggtatttcttctgtcccatgctttgcatgactgccatggtacagccttgtttcaaactgttcactgtgatctgtgggtctttgagtttcagtgagtttgctgaaatgtcgaagaaatatttccaaacttcaatgttcaatgaaatttttgttcaagtttgaaatggagagagcagctttaaaaggtactaagccttttacaaattggtgagtactggcacatgagatctagagcaggagcaacttctcacacatagtcagtgggaaaagaaagtgctttgaaagttcctccctcacctacacagtagtcgtcatgtcgagacctgccagagagagacacattctcaagtgaatcctggcttcttggaagcgcttgcctagacgagacacagtgcataaaaacaacttttgggggacaggtatgttttcttgcagctgcggttgtaaggtcttggcaagacaagcagtgtggccagaagtttgaacttctgatgaatgtgtaatgcaa

SEQ ID NO: 3985 - DNA, 1867 bp, Macaca Fascicularis
gtcaaatgtgtgttttcacacacacacacaaatagataagacaaaagcattccatagtttactactgaatacaaatgtcaataaatattttttagttttttaaccttttttaatattgcaagaattcccagtcttaaaataattactggagggtttaatttttttactttcttccttatattagatggacattacatttttagataggcatattcagaagtggatattttgaacatcaatttggggcaaatctgtttatctatacgtgtattgtaaggactgctttggaaatttactcctatgttgtatatattttacatgtactggaatgtagcgtaaaaggtgcccatacgaaaccttctcttaaaactgtaagcagttagaattgagagtctgcaaagtaacaagtatctgaagataaacagaaaactggtgaatcatgtttcagtgagatttggaaaatgtaatatatgaggcattagactcaggaaaatcacaggccaaaatgctcctacaatgtatttgtaagagaagaggccccttctgggtgcaggaagacatttctagaaatatgaggtagaatgaataaccttcattaattgtttccgaaatggccttaaattctaacttcatctggaagagaaaaagaatgcatatagagacattcgtatttaaagggacagggtaaaaatttttaaatattccatttgtattagaatatcttaaaggaatttagagcttggaaagagtttatcacattcaaccgccagtttttcagaagaggaaatggaggtgaagagaaaggctacatgactcagaagtccatcagtcctactgagagtaatgggagggtagccaggtctgaatctcccatccttcaacaccaggaacagtactgtttatttgtcgatggaaggaggttgtccttgtttctctgtgtggacaagcaacatagttgctatgaatttctattttggacctgaatttccaccaagttcagtttttagaaatatgcattactatgtacctaatacttttttagcatgtacaatctgccaactctttactacattgataaaattagaatacacatataaagcaactcaaacttagaaaatgaccaataaaagagacactatttattttctttttttttccagaacatttcaaaaacttcccaaactgtttttctgttagcttaatcattgttaaatccttcactttcacacctactgtcaagaacctaaacttagctgaagcagcttaagtgattcagttcccgtcaaacaacattcaacaggattcttacctcccaggcaactctttactatccagtacataagactcaaggacaataaaattctttatatagtgccatgtggcatctaaaataactttggctaggaaataaaacatatttgctgaaagtttggggttgaaatcaaagaatggatcaaagtggcccttcatttggctccacgtcatctcacaatagtgaaatatagcagaatgtcactgaactaccataatactaaggggagacattttgcaaaaacagggaatgacaaacacgttttttgctcctgttttgaagtaaattgtactaatgacaacaatagtgatcttttataggcccaaattggatcagtgatcaattttgtagcatttctgtttcaaatattcaaaaacaaaaaataatcgaattagaaaacaaaaaacttcaaacttaagtgatgtaatgatggcgcccctgtatttgactagatgttatatacatgccattgaaagacacagtacccaatctgcctaatgtctataaactggtgcaaataaaggacatttaaaccatgaaaaaaaaaaaaaaaaa

SEQ ID NO: 3986 - DNA, 727 bp, Macaca Fascicularis
  misc_feature (1)...(727): n = A,T,C or G
tcataaatgttggcttttatagtataatgttttataatcaatttattaataaaatgatggaaagtgggtaaggcaaaccggcaaatttagggactgaatgaaatagtatatggcatttttaattggtaaagtaattccaaaaattaaataagaatacacatcattcaattgctaagaaaaatgcattctaatggtacaaatgaagtccagagtcagatcttttctcaaaatccttggcatatcaacagaaattacacataaacaagtaaataaaaaccagtcctgtccctcatgataatgagtttctaatgtgatgnnnnnnnnnnnnnnnnnnnnnncttataaagctgtattttcctgannnnnnnnnnnnnnnnnattcccaaaatgtgaattattgtttttatgaatagttatggagcttgtgaatgataatatgccagatgatctatgtaattctttattcctggatacaagcacatggtcaactttttatgcttatgactgattaaaattggatttatttttgcatgagaattgtaagggagccacaaccatgagtagtaacataattaatatacagtgtcaagatatatttaatgagacatttattctataaccagtttttatttataaagaggctcaaatcaatttcaacctgtaattaccnnnnnnnnnnnnnnnnnnnnnnnnnnnnnnnnnnnnnnnnnnnnntcagagatgtttc

SEQ ID NO: 3987 - DNA, 729 bp, Macaca Fascicularis
  misc_feature (1)...(729): n = A,T,C or G
agcaaataaccatccctgcccannnnnnagggtgaattagctcacttaagtcttagaattctgagtcccaggaagcaggtactactgtttccctttcccagataagaaaggtgtggctcagaagggctttatgactccctgcagtctcacagcagagccagtcatagcaccaagcccctccctgcagggcggagaagattgtcctccggagaaacaccaagtgctcatctcttgaccacaagccgggcctcaggggtaacgaagccaccgcagcttgtcagaacagagagaccatttaatggtcgaagagtgccgtgctggagccaggcacaccagggtttgcaccatgtcctggccgtgtggcctctaagtgcttgccctctctgtgcctggtttcttcactgtaagcctttcacagattattatttatttaagcctcacagcaatgctgtgggagccctgctctcaccatcgtccccactgtacctatggggaaactgaggtgagcaggagacacctgtgcaggctcacgaagttgagaagaggtggagccaggacttgaacccaggccctgtgactccagtcctctgacccaccacctcccttatctgctcctcgtagaaccacggggtccttaagggtgcaggaagatgtctcctgtggccaccggagcacagctgtctcactcaggaatggggttggaagtcacttttactttcttcgttcact

SEQ ID NO: 3988 - DNA, 2297 bp, Macaca Fascicularis
  misc_feature (1)...(2297): n = A,T,C or G
aataactatatagctactgcatattggatatggtaataagaatatgctatgtataaaatgtcaatgaaaagtaaaactgcttcttatatatggactttcctgatacgtttcactagtcaaagaaaattagttttgctgtgttattccttattttaacaaatgggaaaaaggtttgaagataaattgaattatcaagccctcaggtgttccaatctgctgtctaccattctaaaatcaagaaatatgaaataaattgataatgtattgatgtcttttcagcagcctatgggaggaaaatatcaactcatcatgtgcttctcagaattacttctgtgcagtaaaaaagttctgagatactttgaagttaacttttttttctttttttaatccctaagtgttccaggagcacatgctaagttgcaaatcctctgggagtggtaatgcttttaaaaagataatgggattttggcaaacatgctgagtggtccagagaagaatctactatgcctcttaggaaagcaaagggaaaacattgaaaattcttgcaaataattatgccttctgttgcccatgtagaaaaacagccttttggtgtgaatggtaggcatggagttgtttaagcaaatgagttgaaatacatcctgaacatgtacattggcgatttttctgacaagtatagcaactgttgtctataaggcagtgtgtcataacatactgtgttcaaaacatttcttgggggttcttccatattcaagttttgtttgttatacatcatcagacaatgttgtttgaaccacttctatgtacaagaaactcactagatcctgtagaaaaagtatgtaaagtcattttagatggccttcctgacctctaggaacctagcaatctggttgagaagttgagatacactgacgtagactaagtcaggacagggtgagtgtctgaatcgtaaatattggtgtttcctagatttccattcttggctcttgttatgggtttgttatgttcccctcaaatttatatgtcaaattcctaacccctactgcctcagaatgtgactttatttgaaagattaagatgagatcattagggtgggctataatccattatgactgatgtccttataaaatggggaaatttggacccagagatatgcacacacacagaatgccacatgaaacggaagacagattggggtgatgcttctacaagcaaagaacaccaaagatagtccacaaattaccagagactagtggagaggcatggaacagattcttccatcttagaaggaacctactctgatgacaccttgatcatcgcctagcctctgacaatgtctgttactcgagctacccagttggtgatacttggttatggcagtcctaaaaaacacagccctcttctgtccataccatctttctcagcaactccattgctaacatgactttactaacatctctacacttaaaatctgcgaatcttttgtctttagcataggcctcttgccagactgccagactgccagacccatacatctagccatttgcatcagtgctgctaaaggtgtggccacagacaggtgcaggtcagtaaatgctttgtaaagaacttggactagaatgtaaatcaactcattactttcttctgcaaggaaagtcttgctataaaagttgtcagctgtattgagcagtatgcatggtgattaaattgatgtaatctctggtataagcacttcatctcagtgacggccaataagaagtagttcacagatgacacaggcctacagagcacacttgaaggagcattgacctccatggcgtctcctttcaatgtcctcacaccattcaatgatacaatttttcttctcatccaaattctttccccttgtattttctaactcagtgaatggccacccagtggcgctaccatataactgagctggccaaggcacaaatgtgcaattcatcttaaaatctttgattgttcaggccgggcgtggtggctcacgcctgtaaccccagcacttgggaggctgaggtgggcggatcatgaggtcaggagagtgnnnnnnnnnnnnnnnnnnnnnnnnnnnnnnnnnnnnnnnnnnnnnnnnnnnnnnnnnnnnnnnnnnnnnnnnnnnnnnnnnnnnnnnnnnnnnnnnnnnnnnnnnnnnnnnnnnnnnnnnnnnnnnnnnnnnnnnnnnnnnnnnnnnnnnnnnnnnnnnnnnnnnnnnnnnnnnnnnnnnnnnnnnnnnnnnnnnnnnnnnncaaaaaaaaaaaaaaaaaaaaaaaaaaaaa

SEQ ID NO: 3989 - DNA, 3082 bp, Macaca Fascicularis
gagcttggagcatgtaactgtcagtgaggttgcagttggtctgggctgtttggctgtgagcgaaatagctgccccctacttctcacttgcacaccacgggatagtccacctgaggctccggatgattcagatggactgtgaaaaacgacaagatggatgatgatacagacattgtttctgacatcaatcttcagaaaaatgtttctagcacgtggctggaatatttaaggagtttatttttcagtgctcctgatgacctccctgaaatcattctaacattgtctttgatcagcaccattggaggtgagttacttggaatgtcaggaatatttactctggccattgtgggacttcttttaaattctacaagttttaaagcaggagttgaagcacttcttcttgaattctggaattttctatcacgtgttgcttttctcatggtgtttactttctttggacttctaattcctgcacatacatatttgtatgtaaaatttgctgatatatactattcattaaatatctacttcacactgattgttttaagacttgtgacccttctgttaatgagccctgctttgtctcgagttggtcatgagttcagctggcgctgggtattcacaatgatctggagtgaaacgaaagggatgcctaatataaacatggcccttctgctggcctactctgatctttattttggatctgacaaagaaaaatctcaaatattatttcatggagtgttagtatgcctaataaccctcattgtcaatagatttgttttgccaacagcagttactatactaggtcttcgtgatgccacgtcaacaaaatataaatcagtttgttgcacatttcagcactttcaagagctaaccaagtctgtagcctctgtccttaaatttgacaaagatcttgctaatgctgattggaacatgattgagaaagcaattatacttgaaaacccatacatgttgaaccaagaagaaacaacagaacagcagaaggtgaaatgtccacactgtaacaaggaaatagatgagatccttaacaatgaagcagtggagctggccaacaggcgtctcttgtcggcacaaatggcaagctaccagagacaatacaggaatgagattctgtcccagagtgctgtccaggtgttggtaggtgcagcaggaagttttggtgagaagaagggaaaatgtatgcgtcttgagacaataaagaattattccgaaagccaaaaaacaattacctttactagaaaactgcttctcaattgggtgtataataccagaaaggaaaaagtgggcccatcaaaatacttcttttttcatttatgccatacaatagtatttactgaggaatttgaatatgttggataccttgtgatattaatgaatatatttccttttgtaatctcttggatatcccggttaaatgcaatctaccgcagagaattaaaacacactaactactgttttctcacactttatgttctagaggcactacttaagctcatagcaccgaaggtgctgcaaataatagataaaagagtgagtcaacagaagaccttttggtatggaatactaaaaggatatgtccaaggcgaagcagacgtaatgactataattgatcagattacaagttctaaacagattaaacagatattattaaagcgagtgataaggaatatgaaacatgctacgaaagagctaggctacttagagtatgatcacccagaaattgctgtcactgtgaaaacaaaggaggaaattaatgttatgctcaatatggctagagaaattcttaaggctttcggcttgaaaggaattattcataaaattgaaagcgctcaaattagtaagttaatcatggccaaaaagaaagagatgcttgagtctaaatctattatcagacctcttactgttgaagaagtcctatatcatattcagtggctagataaaaaccaagaccatataaacttcattcagcttgaaagatcaaagccaggtttggggattgatcaaatggtggagtcaaaggagaaagattttctgataattgacacagactatatgctcagtggagaaataataggagagataaactgcttaactaatgaacctatgaaatattctgccacctgcgaaactgtagtagagacatgttttattcccaaaactcacttgtatgatgcttttaagcaatgctctcctctcattgaacataaaatgtggctaaaaattggactcgctattacagccagaaaaatcagagaacacttgtcttatgaggattggaactacaagatgcaactaaagctctctaatatttatatagaagatataccaatgaccaccaaaactgatatctatgatgaaaatgtaatctatgttatcctcatacatggagctgtagaagattgtcagttacgaaaattttatagagcacctttcttaattcctataacatgccatcagatacaaggtattgaagatttcacaaaagtagtgattattcaaactccgactaacatgaaagcattcagatggaatattagaaagtttattcctaaacataaaagttctcttacaccaggattaatgcgttcaactgaaacattggaagcaggcattcaaggagaaacaaaaacaaatgttaaggagatgcaagagcctgcacattttcttaatgatctcaatgacaaagttcaactgtaagaagtcccttagaataaacctaggaaagtcagttaagaagacaaaacctaccagaaggcaattaaccacaaaggatacactgtggataacaccagctgaagttaaaggaattcaagagagaaatggctggctgtgggaattagcaaaatctttgtaaagaaaggaagaggatgttcatgagagaagataaaggaaagcaagacttttggggaacaatgaggacgacagtctgacagttaactgttcaaaatgtgtctatggggaaatatttgtgtgtgtatgctttatgtgattttatgttacataaatcatatcactaagttaaaaaataaaagccatcagataaaaaaaaaaaaaaaaaaaaa

SEQ ID NO: 3990 - DNA, 1859 bp, Macaca Fascicularis
gaaaagaatcaatcggaattctgcaggtgaagtaaaggcaaacagaaatcacacatgcgtggtgccgtggtcaagcaccataggctctgggggcaggagtgttcgtttggatgcacaggcccaggagggcttcccagggagtgtggagtaacaggctccagcatctgatatggaggcaagagagaatcatgaggaggaggtagaaagcgggcaaatggaaagtggaaacaatagtcttgtatacacctgcagagggtgagattcaaggagccctccgtctaaaatgaaggcatcataacttgaattcggccttccaagctgctttttggtggcttggctgctgacaccatcattgcacatgacgaacagccttagagcttgcagagcaggaagatgtcaggaggaccagggtgaagggaaactaacaaactcagacagataactagggtcttcctggttctctatagctctccccatcccccaaccttggattcctgaaaccatttctctgtgtgattgtaaaaggactttatcaattaactgacatatttgtaagattttaaagaactgtctgatctacatcccaatgagttaaataattctgataggtggaatcgagacacctcagtatcccgtaacaagttatcatggtcctggttgaatgaggacctgtccactcagggttgtgtcgggggtaggccctgagaaatgtgtgaaggtaccacacaggcacgcaaaggtacacaaccggctttcagagcatagtctctgcagtgtgtggacatcggacatggattacaacagaccttacctagcaaaaagattcactcttttgaaaggaagcctgaaacattgcttcacgtcacagggatcctgaggacctattactcacacaccactgtgtatggtgggccaggcacagagctctgaatgctcacattccaccaaataaaaacagacaaataaaaaacacaactccataaagcaacaaacacaaggcagggtagttttccaggcagagaggagggacccgctggggcaaggtggggttcgacctcatttgggaatggcactgaaaaatatgtaggtctttcccaggtggaggaggttggctgggactttctcttgaggacaagaacaaggcgtggaggtgtgaaagaataggttggttatgtgtggaaggttaaggtggaaagatgggctgagatgaggctgggaagacatcatcccatgcaaagttcactgaagcgtatcttggcggcaacaggaagcatgctccgtggatatgtggaaagttttcatggtacatattgaaatgaaaagaaagtaatgctcacattccatggacaaggtagaggagatctctcagagcaggagctggtgttttaaaggggcaacttagggcaggatgcagcgcactggcctgagctcacacccggtgcgataagacctccaggaaaccactttccctctcccggttttgttcttctcattcaacagcatccaaatggcccagctgggggcactggggctcggtgcgtcatacataggtaggatgatttctgacatcctatgaccagaagtagctcctagtgctgaaaccacagaacacagaatggattttaaggtagtagcttcctcctttccggttcgaccaatgcttttagatgaagttcctgcccagaatggccccagcgatgtgatagtctcacatgcagtttgttttcacatgactgctgtaacaggcacgtgcgcgcgcacacacacacacacacacacacccctaaaaaaaaaaaaaaaaaaaaaaaaaaaaaaaaaaaaaaaaaaaaaaaaaaaaaaaaaaaaaaaaaaaaaaaaaa

SEQ ID NO: 3991 - DNA, 592 bp, Macaca Fascicularis
gggttcagaggcctcactgcaagaagacattcgtaccctcccagggccccggggccgttcctagggaagacggggcctagctgctggtcagcgccgcccagccggcctatgagcggagggtagagtcagcggccttccagcccgtattcagcactcctgcgccgtgtccttgctttgcaagccaatccctggagatgtgaggaaccatggttagcatgctcaaagatgaggagcagcagcagaaggcaagacgctagagaagacacccgccagctgccaacatctttctccctcagtaggctactggtctactagaggcctgtgctgaagaagtcttgactgtaaatcactttcggagttttggttctcacatgggaatgagcattttggatagtgaattgagcctgtgttctgacttaaagtgattataagactttttattactaaagaacatattttttaaaaggtcatgggaccaagctgggcatgatagcacatgcctatagttccagctacttgggaggctgaggcaggagatcacctgagcccaggagtttgaggctgcagtgagccatgatcatgccactgcact

SEQ ID NO: 3992 - DNA, 694 bp, Macaca Fascicularis
  misc_feature (1)...(694): n = A,T,C or G
gcattgttcatatcgcagttcnnnnnnnnnnnnnnnnnnnnnnnnnnnnnnnnnnnnnnnnnttactcctggtggcagcaagggagttgcttactcccttctnnnnnnnnnnnnnnnngttgcccccttcctagaacccctgatcttcctcttcctgttactaatgattgnnnnnnnnnnnnnnnnnnnngtatcccgcttcatttcccaaagnnnnnnntgttttannnnnnnnnnnnngcaaaaacacattgataatatccttcacctttgctacgtctaataccagagcctacaaggaagccattcggaagctccagaacccaggccctaatcacggcgcccctatccagcaggaagcagccagatgatcaacgacgccctttttcctttttatactaaagtaagaaataagaatgnnnnnnnnnnnnnnnnnnnnnnnnnnnnccccaccattttacaaactggtcagagtggaaaatnnnnnnnnnnnnnnnnnnnnnnnnnnnnnnnnnnnnnnnnnnnnnnnnnnnnnnnnnnnggctgcactaaattctttcattatcagcagccaaacacaccgcccccaccccattttcacaaaaatcccagacctctcctgcccggaccnnnnnnnnnnnnnnnctgtaagtgggaagnnnnnnnnnnnnnnnnnnggtaccccctctccgca

SEQ ID NO: 3993 - DNA, 713 bp, Macaca Fascicularis
  misc_feature (1)...(713): n = A,T,C or G
gatttttccctnnnnnnnnnnnnnnnnnnnnnnnnntcttacaagtacttttccattcataaactagttaaataaaagttattttttcctctaaacttttatttttgtaatgatttaattcacatggaatttgattttgtgttattgnnnnnnnnnnnnnnnnnnnnnnnnnnnnnnnnnnnnnnnnnnnnnnnnnnnnnnntatttgtaaatctatttttccctagtgttcattcctatttttccatctttatttttctaagtgaactttagaataattttttaataccccaagtaatttttttaacttgttgagagttttttggggggaagggttagnnnnnnnnnnnnnnnataaattacttgggtaaattgatgtatttacaatgtttagtcatctcattaaggaaaatgagaagagtctccatttattcaagcccttttgttatactacttttattaagaccttttttttttgagtttttttcaatataaatcctacacatcttttttttttttttcttggtatggttatctctaaattttagtaacaattttaaacaatagcatttccccnnnnnnnnnnnnnnnnggcatataagtaaaccattgacgtttatacatttatcttgtgcatgaccaatttggtatattcttttggtaatttaagaattttcagtaaatcattttggagtttctgctatatgattttg

SEQ ID NO: 3994 - DNA, 698 bp, Macaca Fascicularis
ttatttatacactttatacttattaaaatatacatttttaaatgttagcctattaatttactcttgattatcaaacattaccagtgttgaactattaaaagcacataatgtatagtaaactatcataggattcttataatttcacttttctttctgtttagacatggaaaaatttatcagtcagaattgctgttttaggtacatgattttcctgaaattgggtgaggatcagtgaaataatgactctattacttgttcttaattctctgttctctaatgttttttcattcacaagtttactggagtataactggcttagtaagtgtgtcctactctgaatgataaaaatatagtcaagctaaaataggtgactatactattaagatagaggagatcatacaaaaggttccaagaaagtcagagtataaaatggaaaataagagaccaaaatgaatatagcataggaataaagatttcactagaaattgcaatttattatgtttcagaggttgtaaggaagtcttgttctttggtttattttactgttttgtgatcttgtgtgcaaatcctgataaccattaactttctcaaacttaatgtctcaaagcctcataaaatcaacataaatatttacttattaagcagtttatgaaacttgaatggggcccctcctgtgccaagggtatgtgtattatgaa

SEQ ID NO: 3995 - DNA, 744 bp, Macaca Fascicularis
  misc_feature (1)...(744): n = A,T,C or G
gatactcataagagatttttcccctttattatgattacattctagatcataaacattgtaagggtatcttttagttatataatccaatattgattgtttgaattcctccttgtactcatcttggctttgtgctcaatttcttgaaataatataaccaactnnnnnnnnnnnnnnnnnnnnnnnnnnnnnnnnnnnnnnngtaagnnnnnnnnnnnnnnnnnnnnnnnnnnnnnnnnnnggtttttgtggcctactggaagccttcctaactctacagctggtgaagtagagcagaaagggccagaatggcttaagatggaactaaatccctatagcattccattttctgctcttgcctcttgaacttagaaggcttgcccatatatatatcctaacaatctgttctctgagctgctagaaggccaatccctggcaagannnnnnnnnnnnnnnnntgaatctatggctcacaaataattgaaaattggctctgggggctgggcgcagtggcttatgcctgtggtcccggcactttgggaggctgaggtgggtggatcacttgaggtcaggagtttgagaccagcctggccaacatggtgaaactccttgtctacaaaaaatgcagagattagccgggtttggtgacacagcctgtagtcttagctgctcgggaggctggggcaggagaatcgcttgagcctgggagacagaggttgcagggagccgagatcgcgccactgcact

SEQ ID NO: 3996 - DNA, 664 bp, Macaca Fascicularis
  misc_feature (1)...(664): n = A,T,C or G
aaaacaaatttgacttaggaaaggattatgtaggaataatgtttgggcttgatttccccgtgtcataatgaagaatgcaagtttggatctgctccnnnnnnnnnnnnnnnnnnnnnnnnnnnnnnnnnctgnnnnnnnnnagtctccatggccttgggctcccaccggcttctctnnnnnnnnnnnnnnnnnnnnnnnnnnnnnnnnnnnnnngaaagtgtaacacattcttagcggttnnnnnnnnnnnnnnnnnnnnnnnnnnnnnnnnnnnnnnnnnncggggaagaggagactcagctgtccttcagtagcttgtgccagtatcccagggcagaagtttccacaggagcctcttgcccttgctcagagccactttgtgaggcggtgggagccaacacccttgggggaggggcagtgctgctcagcacaccccagcatcaggtcagatcattgaaattaaaaaatgtgaatgaagttcatatctaccttttggggaaacaggacaaaccaccaccccaccaagtgtgtgacttctccatatcccattgcagtttccattttttaaataggaattttcaatcccccgtgcttgtctaacgtccgctttannnnnnnnnnnnnnnnnnnnntgtttgaaaatgcatgcatgttacaatgaatc

SEQ ID NO: 3997 - DNA, 738 bp, Macaca Fascicularis
  misc_feature (1)...(738): n = A,T,C or G
cagcctcnnnnnccgctcaggnnncagagnnnnngcggggcaccagggcttgtccnnnnnnnccnnnnnnnnnnnnnngccgcactgaggccagggacgagcgttcagtgggccacagtgaaccaaccaaaccaagcccaaatcattgctctgccgcgtgcgtttctcttgttgnnnnnnnnnnnnnnnntgatagtttatgaacctattgacattgttcaaaatggatcatgtgccatattttgttagtcgacatctgagttttaagtaaaatgattatggaattaatcagcaaatgtagaagaatatattcaaagttaaaattcagtggcagaacagattatttttatcagagctgtaaagaaaacaactgtcctcttctccccaccacccctcctgccccaccttggcccagaaaccaaatgtgaacttcctgtttcccacctcagcgctagtccatgccgggaaccagctgacaatttcttggttttactgtcaataattataccatgtgatcaatgactgtcctcacttagaacaaagcctgagtccaagaatatttatattttaccaatatatgcctgttacaagagaaggaaatatgagttatttaagtttaacttttttatgtgaattcagagtttatttatcgagggaaatatgtacaaagaagcttcaaatggaatatttactgacattccttatacatgacagacacttggctacatgggaagatga

SEQ ID NO: 3998 - DNA, 1569 bp, Macaca Fascicularis
ttagcagtctttgagggtctattatgaatctgtcatcggtgaattgccataaacctaagtttgcctcacctcaggcccagaccatgttttcgaagagcaatttagtaatgtatacagtagtcattacattttatgaaatattttattttgctaaattaacctcttccagatctcctcgggtgatcttaaattctagtcttgagaaactttatgagcagatctgttttcaatttatttatacacctttcatggtaggtaaccatggcagtgaggatggcagagttttgtttttttaatgggccaatcatgttctgagtattatgaggtttatatcctttcattcatgatcaaaattgttaaagatatcacattttaaaaatacactgttaaattcactttgctgtaggttatagtttacctgttataaaattcatagtgctaattatagtagaagcaaagtacatcaatttaggatgtcggaattaaaataatcacaataactaatatagttttttaattgtgaaaactacaattaaaaattggaattttaataccaaccataatattacattatatttagaacagcttatgtaaaatgccctcatttatctaaacaagttgatttttttggttattgtaatctagtaaggtttttgcgtcactactgatctgtcatgaagtttttcggctggcttattcactcatttagacttcatttagggaagctatttcagaataccatatcaaaacgtatcatcttgtttttgcaaaattcacttacttttttgggcacatttacccagcatttcaaataaatgtataggcatgtgtcttgtttaaataagtacaatttataagacttcatgtttgcaagttacatattagggtagtgattgtttatattaccagggattctacactttaccaaaaaaattgccataagattttcctgtcccattttaaattgtcttgatatttaaaaaaataacttcaacattctcaggaagaaatacatgaagtaaatcatatctccatgtctgtttccagatttctctcatctttttactatcccaatacattccttactcctataaatgtagtggcttaaatactgaatacctggcagctcttatagatcccataggcagatgatgataattttcagtgttttgtcatgtttaatagagatcaaactgacttgtgttttaaaatacaagttttctactagtaaggttacatgatttaagtgtgttttaggttttctgcaacaattagctgtaaacccctaatgtagctaatgtttatacaaattttatagtcaaaattattgatttttatttttttagagtgtttcaaaaacatagtgtttgctttgtgaaatacgtttgcttagagttatagtctactgtgactcagaaattgtaaagtcaatttgcattgtaaaaatgaatactaccagcatgtcaaaagaaaaataatttgcatttgtaatataaagtaaaattgtatttaatataaaaaaaaaaaaaaaaaaaaaaaaaaaaaaaaaaaaaaaaaaaaaaaaaaaaa

SEQ ID NO: 3999 - DNA, 726 bp, Macaca Fascicularis
ttttttttttatgagaatgagtctcattttatgagaatgagtctctggctgaagtgcagtggcgtgatcttggctcactgcgacctccgcctcctgggttcaagtgattctcctgccctagcttccggagtggctgggagtacagacacgcatcactatgcccggctaattttttgtactttagttgagatgaggtttcatcatgttgcccaagctggtcttgaacttctgaactcgggcagtctgcccaccttggccttccagagtgttgggattacaggcatgaatcaccacgcccggctaagaaagctgttcttgaagtgtgaaacagccaggcttaaaattattttggagtgcttttagtttgcttttgtttttagccaaagggatttcatactggtttaattatgttcatccttgagaattcttgagaagtttccaacagatttttagttcattttgatgctgttacagtgttaaactatatacagttgacccttgaacaacacaggttggaactgcagggatccacttatacatggattttcttctgcttctgccacccctgagacagcaagaccaggccctccccttcctcctccttctccacctactcagtatgaaggcgacagatgaaagccttatgatgatccatttctacttaatgagtagtaaatatattttctttctcttgtgattttcttactattttctttagcttatttt

SEQ ID NO: 4000 - DNA, 2264 bp, Macaca Fascicularis
catgcaggacacgcccatcttggatttcctgaaagcaggctcctttctcccaggcctttggaaagttcaaaaggagatgtgttgatgcccaacggttgctggccattgctaactcctctgcagcccagccggtcggcctctgtgagctgggaagtcatccaaggcacattagtttgagagctctgtcttctgcactccacacatcttgacagcaccacggctacttaggcaatgtaattgcaaaaacaaacaaaacatgtcatgatgaccttgtacccgaagtccgaaatggcagattgtttgccctaaaggctgtaccgtacatacttgccttaacccacctatgttgtgtgcccaagaatctcagtgcagacagccccaagtcacttcctttaggctaacacactgctattaattctgaatgagttcaagcctgtgtgtttcatgtcaaggaacaagactgaatagctcagcagctccagtgtgtctgtataagaaaagtgccagctgtcagcaaagtgctttaccatagagcctccatggtggcccaaaagagacaagtaacaataacaatatttgtcatctttgtaattctaaaatatggtcttctgatggggttggggatgggacagagtaaaacattaatctactaaactcactaatctactggaagcagaaagcagaaatggcttaactcgctgattttatttattgcactctaggtgcttttataagtatctacaattgtcttttactaacacagaaacagctgtggatttctatcaacagaggccaactgaatatgtattagctatgtttactcttttatatctaattcaaattgaagactctacgtaggtgaacttttttttctaacttcagcgtacaagattatttttgggtgggtggggggagcaatagttaccttggtgaaatatttgagatctttttgtggtatttgggggatctgttgtgtgttagagtgtatttcaatcctcctgtattattgtggcagaaaaaaactgtgctgttaacgtagttggcaacaagatgcctttggaaacttaatagtaggtcaatgtgtttatggaatattctgaactcctaggaaattttgttctatattttaaagcattatttggttttcattagtggaaaacataattagctcaggcttatcaggaactcagatgagttgtatcttttcttggatacacctgagacattaaactcaattttttgaaactaacacaccattctttagtgcagtgaaattcagaagttataaattggcatggagcaagttttttctttgatttctatgaagtttcagttattggattaaactactttggaccttagcccattcagatctacatacaccagttccattactgtgtttgcatggatgtctgtaatatacacacacagaaacatttgaaaatgatagaggaacaaagagttatcattggaacataaactataagaaaagattccagcactcatgcttgaatttcctcagtgggttgtgtgtttgtccatacatacatgtataaaataaacaattgcgaacatgtcagtgaaacctcataagacgcttttatagtgacgtgcatgtttaatgtatgagaaaaatatttaccaatgtattgtcctttgattcctaaaatataaatactatacatgccacaaactattctaatgtgacttttaatgtgactattaaaatgaggtttcactgtacgttcatgctgtggtgacatttcaccttatactacatgtatatggctacagaaaataagccctcatattcctgctttcagttacagccaagttttcaccaaatcatgactatcatcaccaccaaaattttaaaaaacagtagttgactactaaaaagtaataggtggacaggtcttttatgggagtagtaagcacagtagtgtgattatatctgggaaaacatctacagttgtacagctgtatcctcctcaaaatccggtgaagaatgctatttttctaggctgagcttttgttataaacctaatattcagaaggcaagagttatgatcctgatgtgtccttttttttgcatttgttaattctgaatgtatttttaacagagtgatttttttgacttactcgtgtaatttgcattttaaaaataaatggaaaaatgcttcagtttctgagccatccctgaaaaaaaaaaaaaaaaaaaaaaaaaaaaaaaaaaaaaaaaaaaaaaaaaaaaaaaggccaca

SEQ ID NO: 4001 - DNA, 689 bp, Macaca Fascicularis
  misc_feature (1)...(689): n = A,T,C or G
gaataaacactacaatctggagaccacagtgccannnnnnnnnnnnnnnnnnnnnnnnnnnnnnnnnnntgcccatcaacatcggccccctgctccctcnntgagggcaactcgacactctcgtgctgctgcagtcgatcccacgcccactgctccagcaaggaagctgccacccaagagagcagnnnnnnnnnnnnnnnnnnnnnnnnnnnnnnnnnnnnnnnnnggactcccccaggtctggtagcccnnnnnnnntgctacagccgccatgggggggtgaattcctcatcccccaatacaggcaaccaagactccaagcagggagaacaggaaacaaagaataggtctgccagtgaggagcaggccttgtcacaggacgggtctggggagaagcctgtgcacacagctcctccacaggccccggccccggccccaccnnnnnnnncctggacagtgggtggggacatactcaannnnnnnnnnnnnnnnnnnnnnnnngaacgtcnnnnnnnnnnnnnnnggtgaccgcagccccgtcccattatcttcaaagtgttatttctccctcactacaggaaagagccaaagcccaaccctcataacagatggattcattcattcattcattcattcattcagcagccttatcagattcaagtcatttgtatctttaaccagaccaaaaa

SEQ ID NO: 4002 - DNA, 1883 bp, Macaca Fascicularis
gtgccatcttgtcaccttggaggaagagcccacctgggaatgacatcaactcagagggaagtcagcagagccaagaggccgggagaggtgattcctggtgacatcatcctgctcctgggtgcagccacagtggagttggcctcgaatgttgtccctggcatggaaatgaccagaggtcgccctcacatgtcagcagacacctccagccatgtccttcatgttcctcattagcaaagtttgtaggggtagtattctcagttggcatttctagctgagatgtgtagctgggaggtctccacgctgcgggccttgggacgacttctgcctccaaggagacccttactgatgatcataggctcctcaaggtcatcagccaaggcagctttgcagaagtcaaggcggctggcccagcacattctcactgggaccgagatggctgtgggggtcaccccaacagggcagcagggctcctgcagcctccagcgtctgtaccacagggtccatatgatgaaggcccttcatcgcccgaagatcatcagactcccgtggctggcgcccagaagagactcttcctagtagtggattaagccagctcgagagagctatccgacttcaccctcgaattctcctccttgaagggggaagaggtccggggcaagttccagcaaatagggtattccgtgcagtgaggcttccagcaggaaaattatctacagggttctgaagccagagaacttccctgaggaggctcagcacgacatggaaacaacagactctggctttgataccagattcaccataggctgaaagctgaggcccttcggtgggagctcctcttatgcagcctcggaactgttccccagggcaaaagtacgatggaccccggtgggcatgtggagcttgggagtcactgtctacactatggtggccggggcctgccatctctcggacagacttttgtggggctgaggacgacactaatactgtgtgaatgatgacaggagatcccgtttctcatttccatagaactagaacgcctcataaacacatttctggtccttgactccagggaggaccactagctagtgtgggccctcactagcccacatcatggggcgttcatggattaacatgggtcaggaggagaccccaactaagaccatactggcagctattccccgatcacccggagtctggaaagcactcctgatgtgcccgggagatgaggcagaccacgtcccatccttgtaggaacaaagatgcgatgataccatggtctgctaccagatcctgggctgcaggaaacccgaggtgcagggctccaccatcacagtgaagctcgtgccttcagcagatcccaccacctgtcgccattcttccccatcatctgaaagaaactcctttaataagtattaaacttgtactggaattcagaagaggttccagaaggagcagaacatgatgatatgtgggatgttagagaaatcccagagtatgagattatattcagacagcaggtgggaactgaagatatatttttagggttgtcaagaaaggactcctcaacaagttgttgcagtgaactagtggctaaaattaaactgccaaatacaaacccttctgatattcaaattgatatccaggaaacaatccttgaccttcgtactcctcagaagaagcttttgataactcttcctgagctggtggaatgtgccagtgccaaggcattctatatcccagagactgaaactcttgaaatcaccatgactatgaaaagagagttagatattgctaatttcttctgaaactgcatgaaaaagataaaaagtggtaaaatggcattggtaacaattaaaaaactttggaaaaaaaaaaaaaaaaaa

SEQ ID NO: 4003 - DNA, 843 bp, Macaca Fascicularis
  misc_feature (1)...(843): n = A,T,C or G
gatactttttcctagaaaatcannnnnttttgatatgttttggcggataggagacagaaatggtgattgtcaggtgttgagtccttttgtagtatttgtagtctttgatactctgtaagtactgttcctaaggcaacaacattgcattccttggtttatactttttctattcaccagagtaggaaatcttaaatccttaggcatccaagaagtatactagctttttgcttctcttttagaaatacttgtggggagagaaaaaaggatagtttgggcatattggtatagtttgaggaaactaaggttaatgctcatgtaacatttagactttgccataaatatcagaaccaaagattgagacattcatgtagagtctggaatgtatatacgggacccgtaaaaattcccagtatacatgttttatgctcaccaatatgaactggggtcttcaaagaaagaaggttgaaagtggaaagcccttgaaagagctccccaatttgtaaaatatctttaatcattcacgttagggatctcagagctgtgggtctcagattgtggattcatgcatcctttgtgcaatttgaagatagtccgtatttcctatttcagtattaggtcctgcaacacttttcaattcttgtagaaggtgttttcaggagtggtgatgtctgatgctcnnnnnnnnnnnnnnnnnnnnnnnnnnnnnnnnnnnnnnnnnnnnnnnnnnnnnnnnnnnnnnnnnnnnnnnnnnnnnnnnnnnnnnnnnnnnnnnnnnnnnnnnnnnnnnnnnnnnnnnnnnnnnnnnnnnnnnnnnnnnnntctaaaactgnnnnaaaaccattt

SEQ ID NO: 4004 - DNA, 2680 bp, Macaca Fascicularis
  misc_feature (1)...(2680): n = A,T,C or G
gattaagagtcttttcctgtgtcaccaacaagggggctgccctgaaccagccagagccagagggacaaatgaggatgccttcaatactaccccctcctcaaatgttatgagcagagagggacttgtactgccaccatctggcctttgtaggtgtcccagacatggcaagtatgtggtgagagggaaggaaacagcacaaattgtctactttaccattctcttaaaataagcttcatgtgagcaagcttttcagagcagcaggactagggctgcgaaaaatagagtgtggtgcagctgcaccctttagaactttgggggaaaacacatattatttaccagacaataatagataccagagaataataatgattattatagtgtttgggatggcaaatgctgtagttaaggttccagaatggctcttattataaatcccgttttcccgagtctcttgtgaaagcctggaaattttctttaagtaggctgatgctgtccatgtttggtctttgtccaaaggtgatttaaatataaagaaacttactggagaaatattccttttttaaaatagtggatgcattaaagaaaaaaactacattatttaaaaaagcagttgcagcattcttaagtaagcaattcaaaatggtggtgtttcccagttactggaggaaaatgttaaacactcccttctcccttttaaagaaagaatttggaggccccctctaactacaagattcagtcactcttggttccaggcccagaggtggggatggcttccctccctccacagcaacttccaggctgtgcttgctaaatgcaaaagaactgtccccagaagaagtgaccccggtgtctttggatccacttgtcatctctgcagctcctcagttttttgtggcctcacatttgatggtggatcttggtgcttttgtttttgtatcccttctctccattgtcacttatttgaaagaaagaaagagagagagacagagagaaagaaagacagtcaaatgtgaactctttattcagagataaatatccacatttccaaatctgaccgtgccaaatgaaaaggtttccatggccttgtaattccacccccattacatatttgtggtgttttgcattttcactttggttatttaatatacatattaagtacacacagatctggtgatttaatgtgattgggggaactcaggcatttcctgtcgtgcacagtgaaactttcaaaccatgtttttggctgctgctgattattgttgccattaacaccaggatttggatagcagggttcaaagcacaagcttccacttagtcctcccaacgggcatttgacctcctcttgctcttgctaaattcatgttgcaaacactccaagcaagctaccaggtcgctttctggctccatttcttcactataaaatgaggaaatggtactgtattatctctggggtcccttcaagtcctacattctatcacctctctggagttgtttgttcattgttctaagaataatctcaacagttgtaaagacgtttacaagtcctctgtcaccacctcaccttagccaaattttacccattcacatttctgacggcctcatttattggcagtaagaaaaggtgctgttttggggcatggcagaagagagccgcctgacccactcacgtgatcaaagtgtgtcgcgcgcccacagcgggccagactctaggagctaggagttcaactccagagctaggagttgggtgtagagacacgagcaaaagagacaagcccctgacctctggtgctttaccatgcagttggcagacttctaagtggctgctcccaggagtgactgagtggcctcaggaagctgtatttcaaaccaagcgactggcagcaaatgagagaagcctgcagggataaagaggcagagcctcatgtcttggtgaatgttgggatgagccttccccagaaactaactttcctggtggaaaatcctgttcagagcctctgccctgggaccccaaggctcttggttggtttattttcttccagtccagtgctactgtttgttttggacgtgaagacatgtgaatggctcaccttttacaggcaagacccacacacggagaaaagcaggcatttcttccagcttagttgcctttgtgggaaacttctgaagataggtatatgtgtccatggtaattttccacttgccaaaaagtgaatctgttggccctcttttcagcaaataccagagctgagacatcgggttacaggagtgaggtctggagctccagggtcccccgtgaccttacctggctttggagtggccttgggtgactcaaaagacctcctgctggggctgggcacannnnnnnnnnnnnnnnnnnnnnnnnnnnnnnnnnnnnnnnnnnnnnnnnnnnnnnnnnnnnnnnnnnnnnnnnnnnnnnnnnnnnnnnnnnnnnnnnnnnnnnnnnnnnnnnnnnnnnnnnnnnnnnnnnnnnnnnnnnnnnnnnnnnnnnnnnnnncagctacttgggaggctgaggcaggagaatcccttgaaactgggaggcagagattgcagtgagccagttgtgccactgcactccaacttgggcgacagagcgagaccctgtctcaaaaaaaaaaaaaaaaaaaaaagaaaagtaaagacaaaaaaaaaaaaaaaa

SEQ ID NO: 4005 - DNA, 4233 bp, Macaca Fascicularis
ctgaaagaccactatctggagtttgaggtgtgttgcacccaaatgttagtaaatgctgatttctgagttatcttaggatctgtccgtgaggcggtgtctttctttgcagttactgtcaccgagagaggcgtgccttgcccctggctctaatttgggagctccaggcaaggtcaaagtggtccctcttgtttgtgattctgtttaagtgccaaacaaacatcaaagagtaactgccagtttatacacttaaaagcaaatagcctgcctggtgggaatagcgtgcgcccgctgtgaggggaagaaaaagcacagtagagggacatgccagggtagacagctgctttctgtgtccctgttctcttccggcagaatcagagtcaaaaaaagcacaagggaggaagcgagccacagagggatgtgaggcatcagcttttcccttccaatatgtgccctggctccacgcagtctatgcagcactgggagcgggtgtgtttacattgttcctggcacttgacacccagttgctgatgggtaaccgacgccactcgctgagccctgaggagtatatttttggagccctcaacatttacctagacatcatctatatcttcaccttcttcctgcagctttttggcactaaccgggaatgaggagccctccccaccccaccgtcctccagagaatgcacccctcttggttccctgtccctcccctgcgctcctacaagaccagatataaaactagctgccaacccaggctgtggccaggccactgtctaccccagcccagcccagccctctgccgcttgtacatacgccatggggaccctgaggaaccgaggccatgtcaatccctgtgccgccctgttccccccattacatcttccaaactgggacagtcaaggctgaaggctcctctgggtttgagggcctaagggacagcggggagaagcctagcaggatttcaaatgcgggagtgagacccaggaagcccagcggagccctgaccccccaccacaattcctcctagggctgcacaaccatgtggccttgggtcctgcgtccagtctgtgtcctcctgtctttctcgtgcaggacaggcattgacactttgtaagaaagggggtgggggacgtagctgggcaggtggagtgagtgggcaggatggctgtcccaggctgcccatcttctcttggctctgggaccagcagcttgttctagggatttgaagcctgtgctgtctgctgctcgctgtgaacggccctcccaggtcatgacagagcactgttggggcaggaggtgagagcagggggccctgctcctcagtgagggcctgtcctggggctcccagggaagtgggagccggggagccaatccacccagacccacgtccacctgggaggcatttggggttgcagaaccgagatccacatcctctcactcgcttctctccacccaccaggctactgccacaggcctgaggctgagtgaggtgtgcttgggccctccggctggatgttctgggggaggaggcaatcactctagctgccaggccagccccatctggaaggagtccctgctctgtcccagccctaacccgaggctgtgtgggagtcccttctgcacctcttatttcctaaacccttcctgtcagctgctgtttgctggcttgtccccagccaggcctcctgaggccttcgtagttggcagagtccacatctcttctagcttcactggccgctcactcagcccagcgtccctacgtgcccccccgccacccccccacttatctctgcatctctccaatttggaagccatccagctgatgctaacagccagggccagtccctccagctggtcccatgtaatgaggccagggctgcttatcagcttccaggcggctgggatctcaggcagggtgtgcgtcagccttccaacccccaggggggcgcctgtggggagggaaccaggaggccacactgggggagcgtgcagccagcatgtgcagtggccagctcgaggccagtggaaagttactgtgtggagacaggaaagctctgagtggatagcagaaccctcccttggcttcgccctcctcctcttctctctcccctgtgctgggagctccgtctgccctgggaagggtgacgaggtgtgctgttccttcccaaccccatccctccccacccttcctactcccagctttcaagaaatattgcagaagcatttgaagttttgttccatcttggatatttgaagagaaaaggagccaagaactggcgggtggtgtgtgtgcagcaaaggcattgggggcacgggtgagatgcccactgtgtgctggtctaaattaatccatcgcagtgatcctccagagacagcactccgctcatgtccgtcacagagggaaaagccgaggtgctcagaaaggctcagtagtgagtcccaggtcatatggctagcgagtggtgggcctggggttcagacccacagctgcctcacgcaaacagggtatcactcttgcccatgggcctggatgggggctggaatgagaacacagagaggtgggtggtcaggccctgatgtcctggggatttcttgtcctcagtgccacccggcctcccgtctctcctgaaacccctcgccaggttttgtgctctgaggtttctatcctccggacatgaactgggaggcaagatttctggtttctggttctaacctcaccgccagcgggctcctggtgttaggggagggtttcttgctgtctgggattcagtttttctatctgccacgtggaagttcatagccaggatagggtgggagaggcaccagaacacttctctccactgacttcctcacctggttcccaccctcctccacctcctctcctccaagccactcagtttcctctcctcatctctggcctcagttccagaggggttagtcccagcaccccactctcctgccactgtcagacagccttggtcatgcttcctagaatctacttgtccaagttctcctctccctgggataagttattgcagaaaaactggggatttaaaagcttattcagggctgagtgccaaaagcttgggggaggaggggcaggtcctcagctataaacaacatcacacacgcatcacagccatttgagaaatggcttctttgcagagctggggaggccaggcagaagatgctgcagcctcctactctgggtcctgagcggggcgtcccgggtaccacagtgtcggcagcagggtcagggccaaagactatgtgttccatctccaatacaggcagtgaggatccctgaaacaccaggagaggcgtcagaaggaggaagggtgggggaacaggaatgcaggattaaggaaaccgcagctgagcaggtgttgcaagctgtaaaggaggaagggagcctgaaggccactcacatttttggactgggtggggctgggcccaggaaagggtgggctggattttgtaaagctggaggcagccaggaatctgatcgtctggaatacgaggtaaggggtctccccttgaagtcctctcctggaagctgcagatgggggccagggtgcgagtctgggactcattcctgggcacacgcatggctccttctgttatcacctggggaagctccggaatcttagttcttccattccctactcctccttccgagggagtcaggatgggacagacacccattttccaacaggctccgtgcctccctccctggcccgcctgaggccaagtcccaggtgtcctggctgctctcctgggcgggttggaattttgcacaagcactttgctgccctccggtggctgcttgaggaaacacagagcctggtttgggagagtcaccgagggcccatgtggctggaggttgggggcaggatctggcccccagctctcctcagacctacccagacctatctgctcatcagccgccactgttcacttttgccgaacgatggttgcatctcttggacacagtgtaccccctcccgagccctccctgagccgttctcctgagtccctgatggcagacagctccagggacacagcccggctgccataccccagacactcctgttgtccactggcctcggctcccgcaagttccccagtgtccgtgcctgttcccttccctggcctcaccttcctggggtctgtgactgactggagataaaaataaaagcaattctgacacctgaaaaaaaaaaaaaaaaaa

SEQ ID NO: 4006 - DNA, 704 bp, Macaca Fascicularis
  misc_feature (1)...(704): n = A,T,C or G
gaggcctcnnnnntcgcgaaggagctgcagcatccaggtacgccgccggctagggccgagcaggggctgccagtcccgctgcctgcgcgcccacctgagtcagcctccgcttgccgcgtcctcccatcccccagtcttcaggcctggtgcccttgaattcagtcacccgcgtctgttgtgtcgcggaccnnnnnnnnnnnnnnnnnnnnnnnnngcccaagcccaaactcctcgcagcagtaggnnnnnnnnnnnnnnnnnnnnnnnnnnnnnnnnnnnacctcgactcctgcctggaccctccacgctccgactactccaaatgtcccttccnnnnnnnnnnnnnnnnnnnnnnnnnnnnnnnctccggggcacccttcgtgcatatcggctatccagctccacctcttgaccgcattnnnnnnnnnnnnnnnnnnnnnnnnttttctccagcccgcccttctaaaaagacagttccactcccaccccgattcccacccctacccttttctgctaagttttctcaagcccccaccgtgtctctgagctcttgtctgaactctcacagtgcctctcccatcagaccataagctcctgtatgacnnnnnnnnnnnnnnnnnnnnnnnnnncggtagcattatgtattgtattgtattgtatttattgtatattttattttatttatatcatacagggtcttgctt

SEQ ID NO: 4007 - DNA, 734 bp, Macaca Fascicularis
  misc_feature (1)...(734): n = A,T,C or G
ggttcctctgactgggagctcagtgaggactctgaccagtaacttacacaaaaggcgctctatacatattataatatattcaatgactaaatgaacaaggactttccaactgtgtttctgagttttacagatggcaaaactaaggccaaaggataggagtggggctcatacagctaagtctgaagggaaactggaagcagcagccacctctgcacctcacctggtccaagaggggttcaggacttgggccaccaaactctagggcctgtccctcaggcgcaattgcagctgcttctaggctatgccaacctctgccagagaccagctgtaagggtgtgagcaaagacaggaacagcagaggccagtagagggagtggtgacagggccaagggagctcttgggcttgactctcaaggcctgaatcactgtgtgtgtgtgtgtgtgtgtgtgtgtgtaatgggagtggggctgggaaaattggtgccttccaggaaggaatgtcctgttcccctgcccacaaaaccttcaggagctgctgctcccagtnnnnnnnnnnnnnnnnnnnnnnnnnnnnnnnnnnnnnnnnnnnnnnnnnnnnnnnnnnnnnnnnnnnnnnnnnnnnnnnnnnnnnnnnnctctactaccaggaccccaggctcaggccatcaatcaccccaggagaagagatcccaacccctaccaggacccagtgagaggtagacagcacgattgct

SEQ ID NO: 4008 - DNA, 703 bp, Macaca Fascicularis
  misc_feature (1)...(703): n = A,T,C or G
ctcaccacctgcccttactcnctgcccgctgttgtcagcctgtactgtgttgaagctcccaggagagacaactgcagccatctctttccgctgtgttcagtgatgtcagttcggcccagctgggggtattcgcgtcatggaaacagatcatcagatttggtgtatgtttgttttattttgctttctcagagagccggttgttaaacattagccaacaccccattgatgctattccttctgcctgaaacacctccccactgccaacgagctctaaagacnnnnnnnnnnnnnnnnnnnnntcccaaaggcaagaatctggtatcaccttcatattgttttcccatatttgagcaccactgcccgtagcattatttacttagcagttttgctcccgtcaactcgctttttaaaaatgaaacttattttaaaaagaaaagttttggccgggcatnnnnnnnnnnnnnnnnnnnnnnnnnnnnnnnnnnnnnnnnnnnnnnnnnnnnnnnnnnnnnnnnnnnnnnnnnnnnnnnnnnnnnnnnnnnnnnnnnnnnnnnnnnnnnnnnnnnnnnnnnnnnnnnnnnnnnnnnnnnnnnnnnnnnnnnnnnnnnnnnnnnnnnnnaggagaatcacttgaacccaggaggcagaggttgccgtgagtcgagatcacaccattgtactccagcctggggaacaagagaaa

SEQ ID NO: 4009 - DNA, 873 bp, Macaca Fascicularis
cttaaaactcaattcatctccctgggaatccctccaccccattctttcatagcattcacctgcgcgatggagttgtgtgtgtctccttctgcccccctcaccaggccatgactccctgctccctctagctgggaactgctgtgtacatcttgccaccagcacaagccaggcaatgtttctccaacagagctcttgtgagaatttggaccagccacacccccagccatctctctttcacctttcacctctttctttcttattcagcctgacttcatctttatgtctccttgccttagaaagagttttctgtcctcatgtttcccacagtcttttgacttgtcttcttcaccacaaaacttcttgaatgatttttagtctctctccaactctctcacttgccctctacccaagcctttacaaccagacttggatgcccatcatattaggaaaatggcttttgcaaaagctccaaacatttcattatggtgttgggacaagggcaagcaacatgtgcttatggagagcacaataagttcaacctcatggagttattgagacctaatgagttataatctccacctgatgaacttagagcagtgcctggaacatagtaggcttttgataaatattaactgctattatttcatagagccgtgctaggagccaaatgcggttatgtggtgcttgagaaatggatggcccaaatagagatgttctgtaaatgtgaatacccactgcatttagtgttaaacaggtttagtgctaaaatatttattaatatttttatatcgattacacataataatggatatattgagtaaaataaaatatcttaagaagaaaaaaaaaaaaaaaaaaaaaaaaaaaaaaaaa

SEQ ID NO: 4010 - DNA, 681 bp, Macaca Fascicularis
cagaaggcttttaatgaaaagcaggctccaaattattttcttttctaacaacatgcagcctgtaatatcaagcttcagacatagacaagtaagctggaagcttgcacgggtgaatgccggcagctgtgccaataggaatcggacacctgggactgggcatgttcacaatggtgactctatcttcccttctctttgccagtctcttccttacagtaaggagcagacaacatggcactggtcaagtggcaagtccatttgcataataggattagagtggggcgaacaaccttccaattgcactatggaaatatcacacctggtccaaccaacctgtgcgccctacataaatcagacaccatctcctcaagcctgcctgtaaaatccgatgcactcccattccaggctggaattcttttttgggtgcccctctctctcacaagaagagagctgttcccctttgtctttcttttgcctattaaatgctttgctcctaaactcactcctcgtgtgtcagtgtccttcatcttcttggcgtgagatgacacacccttagtatttacctaggacaatgacacttcttcagcaggtggtcatcggactggtggagcttaagacgcatgtccatgatcaactgcaggggtgactggagtgttgtcctcttccaaggagggaggtggtgtc

SEQ ID NO: 4011 - DNA, 572 bp, Macaca Fascicularis
  misc_feature (1)...(572): n = A,T,C or G
tgtaggttatatacaaataaccatgccgttttatgtcagggacttgagtgtcctcagattctggtatccatggaaagtcctggaaccagtacccccatggatactgagggatgactatacaaaaggaattaaagaatggagggctggtgcggtgtcttatacctgtaatgtcagcacttcgggcagcctaggcaggcggatcacctaaggtcaggagttgaagaccagcctggccaacataaaannnnnnnnnnnnnnnnnnnnnnnnnnnnnnnnnnnnnnnnnnnnnnnnnnnnnnnnnnnnnnnnnnnnnnnnnnnnnnnnnnnnnnnnnnnnnnnnnnnnnnnnnnnnnnnnnnnnnnnnnnnnnnnnnnnnnnnnnnnnnnnnnnnnnnnnnnnnnnnnnnnnnnnnnnnnnnnnnncagaaaaaaaaaaagtgctcatacttgtatggtgtttactgcagcattctcaacagtccaaagtagaaacctgagtgtccaccaacaaatggttaatgtgtacaatatacttttaaatagacagtcattaaaaggaatactttttacagt

SEQ ID NO: 4012 - DNA, 724 bp, Macaca Fascicularis
  misc_feature (1)...(724): n = A,T,C or G
agctgattcaaacttacaaaggagtacaacagttcacncaggcatagaagaaacactcactccgtatcataagttacatggcaagaagaaggcacacactgtttaaactactctgaataaggttttttgtttttaacaaaagctcatactttattcacatttccttggtttttacctaatgtccttttactgttttagtttcaggatctcatctaggataccacattatatttggccatcgtatctccataggctcctttagaccacgacggtttctctgactctccttgtttttgattaccttgacagtttcaggacaaaattggtcagctaatctatggaatatccttcaacttgagtttgtctgttatttttctagtggttttagtaaggttgtgggttttggatggaagacccatgatgaagtgccatcctcatcacttcatatcagggaacatgctgtcaatatgatttctcacttgtgatgttaaccttcatcacctggattgaggtggtgtttgtcagatctctccacatgaagttactgttctccctctttccacactttgctctttgaaaggaagtcactgtacactgcccaagcctaagtggtggggagttgtgttccacctccttgggggaagagtgtcgaattcttctgaacaagagatttgtctcttatttattgttcagtcattgatctatatcattatatggacataag

SEQ ID NO: 4013 - DNA, 556 bp, Macaca Fascicularis
  misc_feature (1)...(556): n = A,T,C or G
tcacttttttaataggatgccaactttttgggagcagacaccttgtgtgattatggccacatccccagtgtatagaagggaggctggcacatagtatgtgcttgataaatatgtgtcaagttagtggtggggagtgagagaaaagaaggtaatcattccaaggtttctagcttgggtgacagggcagatggcagatggatggtcaggaaatacaagagaaagaatccagtttttgagggatgatgaggttgtctttgaattaatggaattgaggtgttttggagctactgaagtaccattgtaattagaaagacagttctgggccgggcgcggtggctcacgcctgtaatcccagcactttgggaggccgagacgggcggatcacgaggtcagnnnnnnnnnnnnnnnnnnnnnnnnnnnnnnnnnnnnnnnnnnnnnnnnnnnnnnnnnnnnnnnnnnnnnnnnnnnnnnnnnnnnnnnnnnnnnnnnnnnnnnnnnnnnnnnnnnnnnnnnnnnnnnnnnnnnnnnnnnnnnnnnnnnnnnnnnnnnnnnnngg

SEQ ID NO: 4014 - DNA, 734 bp, Macaca Fascicularis
aaatgtgtataatgtgttagcccttcttgttgctgtatgtttagatgctttccaatcttttgttactactaataatgctataaaataaatatccttgtacttctttgtgcatttgcttttttactgagctaattttaatgatttcagcaaaagttattttgttattgagtgatgaaacaaaagatttttgagggtattcacgagcataagtatcacatagtcacttatggttgttgtgttcgtagtacttagtacaaggtatcagaattgttcttcagttaatcttttatcttgagaagttaaatcttggtgtaatcttatcctcatgttcatataaaggtatgtggagtttgtagtgaggacttagacccaggtacagtttcctcgttaaattagaaatgcttttggcagtgttaacagctcttttagaatttgtctagcaggcttttcagtttttgccagaaagcccctaaaaaaaaaagaaggaaaaaaaatgcttttgtctgggtgtggtggctcatgcctgtaatcccagcactctgggaggctgaggcaggcggattgcttgagcctgggagttcgagacaaacctgggtaatatgtcaaaaccccgtttcttccaaaaatacaaaaattagctgggcatgatggtgtgcctctagtctcagctacttgggaggctgaggcgggagaaattgcttggacctgggaggttgaggctgtagtgagctgtg

SEQ ID NO: 4015 - DNA, 713 bp, Macaca Fascicularis
  misc_feature (1)...(713): n = A,T,C or G
ctcacgtgcaggnnnnnnnntcaagtttgcacgcannnnnnnnnnnnnnnnnnnnnnnnnnnnnnnnaggcactgtagcannnnnnnnnnnnnnnnnnnnnnnnnnnnnnnnnnnnnnnnnnnnntcacttgggtttgataattgannngagctacctcattgaatgtttttggaaaggtgtttttggtgtgcaagtcacctttgcctcgcagttgaaaatgtttggtcatgattgcgtttgaaaccagnnnnnnnnnnnnnnnnnnnnnnnnnnnnnnnnnnnnnnnnnnnnnnnnnnnnnnnnnnnnnnnnnnnnnnnnnnnnnnnnnnnnnnnnnnnnnnnnnnnnnnnnnnnnnnnnnnnnnnnnnnnnnnnncatcctgggacgctgtacccaattcagtggtctagtcctttacacnnnnnnnnnnnnnnnnnnnnnnnnnnnnnnnagatgaaaaaacacnnnnnnnnnnnnnnnnnnnnnnnnncgcaacccagtgtctctgaattccacccccagaagagccctgaatgagaagagcggtttcccgtgcacgtggagggtggtcagcggtgagcgttctggggaccggggaaagacacgttgcctgatgccgcgcacgtgcgcaggccctgggtgcacacccagaaaggggcatgtggctgtagaaccatccatgcagctacagctaaacaattgccaataaag

SEQ ID NO: 4016 - DNA, 602 bp, Macaca Fascicularis
gggcaaaaaactcgaggactgtatttgtgactaattgtataacaggttattttagtttttgttttgtggaaagtgtaaagcattccaacaaagggttttaatgtagatttttttttttttttttgcacccatgctgttgattgctaaatgtaatagtttgatcgtgacgctgagtaaatgtcttttttttaatgtgctgtgtaaagttagtctactctgaagccatcttggtaaacttccccaacagtgtgaagttagaattccttctgggtgatgccaggttctatttggaatttatatacaacctgcttgggtggagaagccattgtcttccgaaaccttggtgtatttgaactgatagttactgttgtgacctgaagttcaccgttaaaatggattacccaaccgaaatcatggaattattggttataaaagtgattgttggcacatcctatgcaatatatctaaattgaataatggtaccagataaaattatagatgggaatgaagcttgtgtatcatccattatcatgtgtaatcaataaacgatttaattctcttgaaaaaaaaaaaaaaaaatcaaaattaaaacggtttgttgg

SEQ ID NO: 4017 - DNA, 3141 bp, Macaca Fascicularis
gacgtgttatctctctgggacgtatagtttatagaaacacaaaatatttgatttcctgtgtcggctcagctacaagaaacacaactgttatcttgacagaggaagaggggaatccaagaaaaatgcatgtggagaattaaacccaagtgttctgaattcagcacaccccttctctgtcctcagactggagtccacacgtgcaacttttctgtttgcacgtgttttattaatcagcatattccttttctgtttggatttatatccctctaatgttctcctttaatgttctcctttaatttcacaagaaaaaaaaactcctgtattttaatcagttagtaggagagcagcagaaatagatagatgtgctgttgccactggactgatgaaggtggctgtcttggaactgggagacaggtccacagaggtgcactcaggcaacaagacagccatctctctgcttcagccctctgcctatagggattagggaaatggagctctggctttgaagttatttgtgagtttagcaacttccagttacctgcagagtgctgggtgcacagcaccccctcataggagccctgttctctgaagactctacaagaaaaaaggtctagggtactccattagctaccagaatggtataggggaatttagaggggaaaaaaatccatgttttctgtttcccaggtttttaaaaagtagctcttccccaaccccattgctagcttgttgcaatgtgaaagctctggtgcacctgaatttactcctggccttactaatgattcatagtgtgatcttgggaaacgtttttaagctttctgagtcttaacctccttgtctctaaaatgggcaattaaaacaatcttcaagaggcctgtaaggttaatgccaataaaacgactgactctgcccttcttccttaggaagtagtatccagcaagcattgtcccaccttgtcttgttgatgaacaatattataaaacctgcagtcattctgtctgtagatcagagcttagttcgaatggaaccatgaaaatctttgattctgacctcctaaggaaaatgaaacccagagggtgtggtcatactggatggctcccatgcgggcctagaacccaggatgcttcactcttgactccatgttcttccttttataccatatggctgtgaatacatactatgggatggaattcaacccttctaagtaaatcctcagtctggtctatattgttacttgcctgtttccagtagaaggagccacccagacgtttagtgaatgataatcctagaagttgagtctgagtacatcagagtttggcattatttgcaatatcccaggaaggagctgtaagacaccattgctttctggactttagtgaccagctgatctacccttggatcctccaagaaaagggaaaaaacacttgtcttatgttgttttagcaagggagttcagtcaagtggcaggaaagattccctggtctgcatctaaacatcagtccacagagaaggaaaaggctcttttacttggagattttcaagttgaagaagtacaactgcttggatggagggtctgtcatcagaatagaaatatgctagatggtcttcaagacctttttgaacctatggattctaaaccctagaggaagccagaatatgtgatcataccatctgaggaaagttaggagatattcatcttaagagatattctatttggcagtcacttgttacgcttgagcaacaattgtctaaactagaaagatagaaccacacaatgtttatcatcattgggtcaatttctccccctctatcgagtgaggagattaaggcttgaagaaaggaaaagacttgccaaccaccacagggctcatgagggacttggacccatgtcctgtgtctctaccacagctgactctcagctggctaaaggagaaaatgtgaggaattacctgtcaaattagattgagctcagagtaaatagatgagcacattgataactctaaattagactttctacaaatgggaccaaacatatggaaggggctgctggcctgcctcaatgtagccaggccaccttgtctcaaagccaagactcagcagtacatggattctgagaagtccagggtctgaattgtctctgattactggaaggacaggttaactgaatgtctgtgatcactaacaggtgatgggctttgtgcccactccagagatattgtgggagacaaattctaacaggctgtcctcccggcatcaggagtcattgaacaatcatggattgctgtgtttgagtttttgttttgttttgtttcgttttttgttttttgctttgtttttggttttttgtgtgtatgtgtgtgtgctgcatgcacatgcgtccaagacttatgggtggtttaggggaaagtgctagcaacagtgtcaatgtcattgttaactatatttcatatttgagatctcattgttttcaaataaacagtgttttccatgactgtgatatttatttttgggaacgcaacaaggtaaaaattatgtttctcagatgcactgctactttggcattatgactctgttctgagaaactctttgtgcaccactaggaattagtagtgaaaaaaaaaaactggaaatggatgtcttcaaatgtgctaatcattaggggtggagtattaacaaccagaaagaaaggtttggatattaccttttaactactagttagtatcatgcttgatcaacatttgttcctagttatcaccattgaattaagacattaatggtaaactgaggttactgatgcatcatcacatttaagtaaaaataatttcatgttttccccaaagaaaaattaagcctcccaatcttgggatccaattgtgcagtagaattcagagatttctcatttaatcttgtatcctgtacagctacaaatattttttaaatgttaggaataaacattggaattttgtcttaaagagttcaaaaccttggaacccaattttctcactacatctgtaagggccattacagacccaaagctgttttgaggttttcatatgttgtttgctgaagtcattgtaactttttgcctgctttgcctctttttgtacaggagttttgagtgtgaaaaaaaaaaaaaaaaaa

SEQ ID NO: 4018 - DNA, 417 bp, Macaca Fascicularis
  misc_feature (1)...(417): n = A,T,C or G
ctgnnnnnnnnnnnnnnnnnnnnnnnntttggctagagatttactacatccatccttggaagaggaaaagaaaaaacataaannnnnnnnnnnnnnnnnnngtccaaattcttactttatggatgtaaaatgcccaggttgctacaagatcaccacggttttcagccatgctcagacagtggttctttgtgtgggttgttcaacagtgttgtgccagcctacagggggaaaggccagactcacagaagggtgttcatttagaagaaagcaacactaatgattcaaacagcttcctgaattttgtgttatctcacagaaagccttatcataaattccatagttctaattaatttaccaagataatgtaattacatttggttttgtaaggtatacaacagtaatctcctattttggtgt

SEQ ID NO: 4019 - DNA, 692 bp, Macaca Fascicularis
  misc_feature (1)...(692): n = A,T,C or G
atataaaccatgacttttggctgctcaacattaatngtnncctttttgtgaatttatttgtaggctcttttttataatgaaagtttcaaagttgctatgtatgagggttctcatagagcaaccgattaaaaatttaagcaaatatttgaacattttatctgaactcatcacaatttcaccctgaaataatgtgagaacaatgggaaactgtagcttgctccttcccaccctctctgagcatctttgggatcttgttgctcaaaactcttctgtgacttcatcttccccaccatttgtgcccatctcaagcctcagcaagaaaccatgtggaacatgaagcttaatgacttgacagtgtactagtgttaaactctcatacctctgttacaaagcgagaaacgccacacccggactggccttttcttcccccttcacggccctcgcttctccctgcaggagctcgggggcgaaacctgtgtatgnnnnnnnnnnnnnnnnttcagatcatgctccaacttgccaggtgtaagctaatgttgtcggacaccttactataagcaaatgttattcagtgcgttcaatgtatattgacttccatactggtttttccaaaaaccaaaggtagctttgaaaaaccaatgtctggaaatgtttggagcgttaagctgattgaccttctgaccttggggctt

SEQ ID NO: 4020 - DNA, 2541 bp, Macaca Fascicularis
  misc_feature (1)...(2541): n = A,T,C or G
gttgtccatttttgctcaggctgtttctttggcttggaaaggctccaatcttccctttctgtctccttgtcttaagtccttcccttctagcataagtcctatcacctttctcccttaaactcttttgtcatggaaaagtagagattgaccttcataatgaaggatggatttcaagaggcttattttccccagaagtgctgacacagtaccatcttcactagcagcaatggcactgcagtaccaaagggctcacagacactattatttcctggtgctgtgcttagaagaacagtttgttttagaaaatgataagagatagctcacatatattatgtattttctatatgtctgccattattctaagcatcttatatacattaagtcatttatcttcataacaaacctatcaagtggatattgttaatactcttattttagaaatgagaaaattgaggtacagaagggataagaaattgcccaaagacacagctggcaagacttgggatttgaattcagacagtctggcaccagagtctgggtgcttagccagtgaaatagaagtgcagtgaatttgcgatggctctttatctccctagtctcaacgtggcccttaacattttcagagtatatgcagagggataggggctgctgagcagtgttcttcccaggaacattgagtctattcctctgtgttggagaaatctggctgggggccaccatgctttacaaagaggagattggtaggcagataaatttgctttgtccttggtcattctctgaatatgacgagttcagaggcatgaccagggccatggcagagtagattgaaagcacttgtgccttctagtccttaatcatctcagtgtccctagtgccagcataaagtaggccattacacatggagaaggtattgtgacacaatcacatcataatggctagggtttaattaactattcctcccaggccttctcccaggaaggagtggggcttcttgcaacggaccacatgggagtgagggtggggagaggagattcagagagccttctaaatgtgagtataattacaaaactgagtcagaaagggaatgaatggttttgccttgcagtttagagaatgatgtaacctcacagttcaggaagatgttaaaaattatctctgctgggcacggtggctcacacctgtaaccccagcagtttgggaggccaaggtgggcagattgcttgaactcaggagtttaagaccagcctggacaacatggcgaaaacccatctctacaaaacattannnnnnnnnnnnnnnnnnnnnnnnnnnnnnnnnnnnnnnnnnnnnnnnnnnnnnnnnnnnnnnnnnnnnnnnnnnnnnnnnnnnnnnnnnnnnnnnnnnnnnnnnnnnnnnnnnnnnnnnnnnnnnnnnnnnnnnnnnnnnnnnnnnnnnnnnnnnnnnnnnnnnnnnnnnaaaaaaaaagttatttctaccggatacccttccagtgcctgaatccccctatgaatgctctgctaagcaaatgtccagcccctgcttgtatacctgcaccaatggggatctcactaccagtctattccagctctgtatggctctgttagaaagttggacattttgttgaatggaaatctgtcttcctgtagcttccaccaattgggtctaattatacctatgggatgctagagaacgagttagcttcctcttccatacaatagccctacagaaatttgaattcaatgatcatatccactctgagtttttcctttcaggccatatactcacaggtgctttagttgtgtctcttctcacatggtttcactagtcatgtatgtgtccactgactgcttcccacttggcttagagctcttcaagtagagagtgccagcccgcatcaggggagaaccattctttccatccgtattagtctgttctcatgctattgatagagacatactcgagactgggtaatttataaagaaaaagaggtttaatgggctcacagttccatgtggctgcagaggcctcacaatcatggcggaaggcgaaaggcacatcctacgttggcagcaggtgaaagcgagcttgtgcagggaaactcactttcacgaaaccatcagatctcgtgaggcttactcactaccatgagaacaacacagaaaagacctgcccccatgattcagttacctcccaccaggtccctcccagaacacatgggaattgtgggagctgtggttcaagatgagatttgggtggggacacagccaaaccatatcaccctcctgggagactctgtctgtaatgagtgcctaggatcagaaatttttgctctgacttccgaggggttgcagggattttgggtgagtttggtttttacccagaagagggccagaaaaacaaggtcaggcatgnnnnnnnnnnnnnnnnnnnnnnnnnnnnnnnnnnnnnnnnnnnnnnnnnnnnnnnnnnnnnnnnnnnnnnnnnnnaccctgaccaacccagcaagaccatgtctctgttaaaaaaaaaaaaaaaaaaaaa

SEQ ID NO: 4021 - DNA, 721 bp, Macaca Fascicularis
ttttaaaaaccaaatcatttttctttaactaacttctattttttttaagaaaaaaaaaatagactggtgggtactcacagaaaagttgtataagtccccctgttgctatttttgatgatagagaataaatagggtttttgaaacctttgtagtgttttttcttaaaatccactcttggcaatgcaataaaaaaaaccgtcaccataagccagtgacacctgactgaagctttttgtcattatcctgggaaaagtggcagcttgcaaggaacattacaaagtgcacttagaaattaggtggttaaactgtgccaattgttttcgttgttttataatatcattttccaaaactgtccagtaagttttattatttttaaaactagtttttcaactcattagttctaggctgtactctcttgtaagctttatgataaccactttagttttgtgaataataaattttattcttttgttaatacttgtatacaatttaattgaaaactgtagcttgcacaccggaccagatgagtcccgcactggcacagcgccctgcacatggagtgatgtttcataaaatggaattttaatagtttcagagcaccaagatttctccgcaccctataacctaagcattggaactgtgcattccaaaagaaattcctcctctttatccctgtaatgcactgactaacagaagacttactacacatttaagctgtata

SEQ ID NO: 4022 - DNA, 1404 bp, Macaca Fascicularis
aatctaaagtttttctcctctctaataagacctctgaaactcataagccatctttaagaatttcttacaaaaacatgctggaagacagtggatcttgtttgtatcctgaagatttttttctctttgttgttttaaattaattgtcaacagatgtggaactgttgggttggttcttaagtcacttggagaagggaaagatgcatctactcaaggttggcacttggagaaacaacactgccttttcctggcttatcatgtttggtgttctttggcttgttagtcagaactgttgcagagcaagtgttgtttggacggcttatatgaacatatcatttcatgttgggaatcatgtgttgtcagagttgggagagactggagtctttggaagaagctccactttgaagagagtggcaggagttatagtgccaccggagggaaaaatccaaaatgcatgtaatcccaataccattttcagccgatcaaagtactcagagacctggcttgcacttattgaacggggaggttgtaccttcacacagaaaattaaagtggcagctgagaagggagccagtggagtgatcatctataactttccaggaactggcaaccaggtgttccccatgtttcatcaggcatttgaagatgtcgttgtggttatgattggtaacttaaaaggcacggaaattttccatttaattaagaagggagttctcattacagccatggttgaggtggggagaaagcacatcatctggatgaatcactatttggtctcttttgtgattgtcacaactgctaccttagcatatttcatcttttatcacattcatagactttgtttagcgaggattcagaaccggagatggcagcgattaacaacagatcttcagaatgcatttggacaactccaacttcgagtggtaaaagagggggatgaggaaataaatccaaatggagatagctgcgtaatttgctttgaactctataagcctaatgacatagttcgtattctgacttgtaaacattttttccacaagaattgcattgacccctggattttatcccatgggacatgccccatttgcaaatgtgatattctaaaagttttggggtttcaagtggatgttgaaaatggaacagaacctttgcaagttctaatgtcaagtgaactgtgtgaaaccttatcacctagtgaagaggagacaaataacgaagtttctcctgcaggaacctcagataaagtaatccatgtggaggagaaccctacttctcagaataatgacagccagcctcattcagtagtggaagatgttcatccttcaccttgatggcctgacttttgaggaagtgtattaaacctgtatgtgaaatcagataatgataatgaaaaaaaaaaaaaaaaaa

SEQ ID NO: 4023 - DNA, 102 bp, Macaca Fascicularis
gaccaatatcacagccagtaagtaggagagctagaaccctaaccactatttgttatacagatggttataaatgttcaacaaggacacaccatcacatatcaa

SEQ ID NO: 4024 - DNA, 677 bp, Macaca Fascicularis
  misc_feature (1)...(677): n = A,T,C or G
aaagatgttcagaagtcaagtaactggaaaaataaacctnnnnnnnnnnnnnnnnntgatnnnantcagtgttggtgtngngatgtttgtcgcttttatgatttcgtattgtgcatgcagatcaaaaacaataaaataaacctggctcaagcacaaaccagtttctttgnnnnnnnnnnnnnnnnnnnttggtttatgggtggccaattcagaagagtggacattctcaacaaatcctaggccgtgcattcctgtcatcctcttcnnnnnnnnnnnnnnnncatccttcaattgcaacagtctccaggaccatcagcatattgcatttcatgcacaccaaatatttttaaagacatttataaataattcnnntatgactcacatttctctacgaattccctcatacagcaagtataactcttttctttaagggcttatgtattttgnnnnnnnnnnnnnnnnnngacaacattctagcacactttattcatattttaaggacttttattttctgttctgcaactcttcnngaannnnnnnnnnnnnnnnngttttttgtnnncagttgcaactcatgcttggcattttcagaatgcttttctggcattaagagatgtaaatgataatggaattattgtatgaatactatcacaaagagtagaatatgcattgttatt

SEQ ID NO: 4025 - DNA, 576 bp, Macaca Fascicularis
  misc_feature (1)...(576): n = A,T,C or G
ggaagtatagtctttgggtagttgatcatttccccagctaaaaaaattcttattactgtgtgggaagagtacatattgaggtacagctagcaacctctgcctctgccacattgtttttaaaatgagtattatatttcactaaatctaagacatctcacaattttaggtaccccaaagaaaaaaatgaagccaaatgaattgtgacacattgtcaattaaaagacacattccctgggaggccgaggtcagtagtttnnnnnnnnnnnnnnnnnnnnnnnnnnnnnnnnnnnnnnnnnnnnnnnnnnnnnnnnnnnnnnnnnnnnnnnnnnnnnnnnnnnnnnnnnnnnnnnnnnnnnnnnnnnnnnnnnnnnnnnnnnnnnnnnnnnnnnnnnnnnnnnnnnnnnnnnnnnnnnnnnnnnnnnnnnnnnnnnnnnnnnnnnncaaaaaaaaaaaaaaagatacgttcccatttcagaaacccgaaaaaatatgcatcttataattattgaaatatagcatatcctttaactatcttcaattttgttttaactaaaaagtgttcgctcatctataaca

SEQ ID NO: 4026 - DNA, 676 bp, Macaca Fascicularis
  misc_feature (1)...(676): n = A,T,C or G
ataacaacatggaagaggtttgtgggggagagaaaccttatttgtccccagannnnnnnnnngagaagcactgtgaattcaaacaacttgctctggaccattttaagaagaccaagaagatgggtgggaaggatttcnnnnnnnnnnnnnnnnnnnnnnnnnnngaggaaatcaaggaattatatgannnnnnnnnnnnnnnnnnnnntagcannnnnnnnnnnnnnnnnnnnnnnnnnnnnnnnnnnnnnnnnacgggcattgtagctttgtacnnnnnnnnnnnnnnnnnnnnnnnnnnnnnncttgaggttgtagcccagttgttcaactgtatggttggactactgttaatagcgctcctcacctggggctacannnnnnnttctnnnnnnnnnnnnnnnnnnngcggagctattgattttggtgccgcatatgtgttggagcaggcttcttctcannnnnnnnnnnnnnntcaggccaccgtgagggatgcagttgttggaagaccaccccaggttaaaaaagctcnnnnnnnnnnnnnnnnnnnnnnnaaacaaaaaaacgaacccctactgatttctgggtttnnnnnnnnnnnnnnnnnnnnnnnnnnnnnnnnnnnnnnnnnnnnnnnnnnnnnnnnnnagcnnnnnnnnnnncctgtaataaatga

SEQ ID NO: 4027 - DNA, 736 bp, Macaca Fascicularis
  misc_feature (1)...(736): n = A,T,C or G
agcgccgactccaaaccaggacgacntgcaaagtcccagccagcaggacaccgtgggcactctggcaaatgaaaaaacggaacctggtcttgagctgaatcaatgtgttattgttaccgctccccccccaccccaccccggtttacctgatcagtgttaacctttaccgggacactcatctgttacactggaacaccctcttctctttgtcaatgggtacagacctctgtaaggaaatgcagtgtgttgcagtggtcttttctccccctcaccttctaaggtcagctctagctgagcatcactgctgtctttaggagaaaaaacaaaggtgcggctgggagccatggctcatacctgtaatcccagcacctggggaggctgaggcggccagatcacttgaggtcagnnnnnnnnnnnnnnnnnnnnnnnnnnnnnnnnnnnnnnnnnnnnnnnnnnnnnnnnnnnnnnnnnnnnnnnnnnnnnnnnnnnnnnnnnnnnnnnnnnnnnnnnnnnnnnnnnnnnnnnnnnnnnnnnnnnnnnnnnnnnnnnnnnnnnnnnnnnnnnnnnnnnnnnnnnnnnnnnnnnnnnnnnnnnnnnnnnnnnnnnnnnnnnncaaaaccaaaagttaactannnnnnnnnnnnnnnnnnnnnnnnnnnnnnnnnnnnnnnnnnnnnnnnnnnnnnnnnnnnnnnnnnnnnnnnnnnnnnnnnnnnnnnnnnnnnnnntgtaccac

SEQ ID NO: 4028 - DNA, 759 bp, Macaca Fascicularis
  misc_feature (1)...(759): n = A,T,C or G
tactagttagcatttcataggggttgtgaatttttgattatttgaatattttgtgtccatacacatattgaaagggttttgggggtcttatttgtttaaaggtgtcttctgtttgcctgtttaatgtgtacttcagctttgcaaagattacagggctgtatgttacagaaataggagatgctggccctgtactggggaccactacaaaaattcccctgaagacctttgaggtcnnnnnnnnncctttgtgaacagnnnnnnnnnnnnnnnnttcannnnnnnnnnnnnnnnnnnnnnnnnntgtagcctgctgtagaccattccagcaaatgtcagaatgcagggcaagatgtgtgtcgactgtgttttttaagtttaaattacttatttcttcaggtgagtgtgcaccaaataacaatactgaaaggcccgccccttgcaaggccgaggaaataaagcttnnnnnnnnnnnnnnnnnnggggaaaaatgccactttacgaatacttttctaacaaaatagcattataatgaagtttttacttaattccattatttatatgttgatgtgaatataagtggttaaaaaagtattcttgtgggacatctcattactttgtagctgtggcgttattaaccagtgaatgctgtggtccgtagcaaaatgcgttgtcttctgtgtgatgtggaattcaggcctgtaattttaaaagatggtgtggtttttccnnttgttcgtattttaataaacaactgctcta

SEQ ID NO: 4029 - DNA, 2150 bp, Macaca Fascicularis
tttagctgccattctggcaactaagcgttggcaggaaacgcagcttagttgtgtccgaggacttacgatgggaaacgtttgtagttgctgcctcaatgtgtgttccagtcaggatgaagtagtggatcctgaggtgcccaggaaatcccccgtcagacaccaccacaggcataagaagcaaattctccatcactggcatcacgaccgtgtacaccctagagttgcatcaacggaagatcacagtgagaacctggcgcggaagcgttcatctaaggatgtcccaggtgttcacgtggtggacaaagacacagagaaaaacagtatgcattctgggatcaccgctatgctgaggaaaaattctggtgttgacaaaggtgacctgaaacacctacagcagcatatgccagggcagacatcctctgaggaagccacaggagttcacatgatgcggggggacccagccacactggcaaacgatgtacatcaggagccgtccagtgacaaccgagacggggaggacccagaggatgtgaagaaatcgtcgggagttccaccggaggagagcgacgaaggcttgttgttcgagcgtctgctcaaggtaccatctgagagcttcccttactcattgaagaaaagagtacactttgaggaagaagagcgtgacaaaggcttgttgtgtgaacgtccgcccgagataccatctgagaggttattagactctgttgagaaaagagtacactttgaggaagaagagcgcgacaaaggcttgttgtttgagcgtatgctcaagataccacctgagaggttcttagactctgttgagaaaagagtacactttgaggatgaaggtatgtgttatgggtttactttattaattgtttttattttgcttgaaattctgggatgcatgtgtagaacgtgtaggtttgttacataggtataaatatgtcacagtggtttgctccacctatcaagccctcatctaggtttttagccccgcaggcattaggtatttattctaatgctctctctcgtctttcccctcatgccccagggattagttttttgctaaggaaatatcttagtttttcagaaaggtggcactttttaccctgcgtttggtggagaatttctctggagcttcctaagagaaatgaggttttaggcaatttggtatggaaaaacagtaagacgttggtacagatttgtgaccatcttcctgtagtctctgcaggaagtggtgtcccttacacgaaagggtggtgtgcatcaggtttgggaggtatggaggagagagtctacgggcagtgattgtgagtgtctttcggagtttttgtgcatgttcaaagcaccacacaaggattatatgttttttttttttttttttaaaaaagagttgtccatcaccctgaacactttacataaatcaacccattgattctccaccacagctgtctgaagtttaatatcctcagtcctaagttactggttatgcagagatgaatttctcaaagtcttggctttctcagtagaggagggaaatgtgaaatcaggagtggttggcaggttgattctatggacttctgtcctgcatcgatctcacagccattgtataactcatcagcctggcagtgactttgggcacctaggtatgcatgtggaagtacaatacatacagaaattctatgcactgtctatgatcgtagaatggtcttaatggtcgcataacccaggattagaatgggtatgttttacagtggatttaggtgtggtcagaaatgtgaaacatacatggagaggtcacaggcttttgcttcagtggtcggtttattcctcagctcctgtttaaaagcagagaataggcagggtgtggtgtctcatgcctgtaatcccaatacattgggaggccgaggcaggtgaatcacttgaggtcaggagtttgagaccagcctggctaacactgtctctactaaaaacacaaaaattaactgggtgtggtagcaggtgccagtaatcccagctacccaggaggctgaggcaggagaatcacttgaacctgggagagggaggttgcagtgagcctagatcctgccactgcactctagcctgggcaacagagtgagatttcatctaaaaaaaaaaaaaaaaaa

SEQ ID NO: 4030 - DNA, 767 bp, Macaca Fascicularis
  misc_feature (1)...(767): n = A,T,C or G
cagtcaacgatgnntttgnntnancnnncnnnnnntgacagaggaagaagtgtgagctctgaagcaagattcaaactctggcttccccgtttatcagctgtaacaggaacctctctgaacctcagctactatacgtgtatcgtgggtataaaaatgcttcctttacaaggctgttatgtggattatgggagaaaaatatgaaaagaacctagctatgatatgcagaataatgtcccccaaagatttccaagccctaatctctgggaacttgtgaatacgttactttacatggcaagagagacaatgtggatatgattgagattacagaccttaaaataggaagattatcgtggattatcaaaggggccccatctaatcacttgagcacttaaaagcagaagtggaaggcagaagagtttgtcatagagacgcagcacaagaagcagagacagaagaaatccagggtgagaagaatttaatatgccattcctagctctgggtgtgcagagactacctacaatgactcaaaagaggcctctaaataccaagggagatgcccagatggcaaccagcaaggaaacagacctcaatcctacagacagtgatttctgcccactacctggattaacctggaaatggactctcccctagagcctccggaagggaaagcggctcagcgaatgccttgatgtcagtcttgtgagacttgaaacagagaaaccatctgagcctactggacttctgacctacagaactgtgagataaaa

SEQ ID NO: 4031 - DNA, 754 bp, Macaca Fascicularis
  misc_feature (1)...(754): n = A,T,C or G
tgctgtgcagggaaagctgcctnnctgctcgggacgtggattcctttcacctcctcctcgcctggctactcctgacgcaggttgtcaggactccgcttgggtgtcacccgtccaggaagcctcccttaattaagggccctgggcactcaccccatacgtgacgagcagccctcctatgtatttcgtcgcacccccgttgtttatatcaactattccactcaccacccttctgggcaatcctttatctccccctctgaaatcccatcactgagggctgggacccctccccagtacttatccccgtttgccggcgctagtctggtgcctggcgtgtggaaggcgctcagtaaacgtttgtggagcgaagaaacgacgcaaacgtgatgagcacgacagcccgaaacagagaagacgcagttaggaggttactggccccgcgcgggggtaaagggggaaggtcgggctcggggtggcaggacaccagagggcacgggtgactgccggggtgctcttgcgggaggacgggcgtcaaggcccccggcaaggttgcgataaagtttctctccgaggcacagactgccgcctgcggggtcagcatttacctctcccttcctccttcctaacccaacttcggcggagagctgagggctgagggctttaggcgcgttatctcgaatgttggtcaattctaatgcttctgtgttgtaagtttaaaatacacatgggatttagaaannnnatataaaatgataaa

SEQ ID NO: 4032 - DNA, 763 bp, Macaca Fascicularis
  misc_feature (1)...(763): n = A,T,C or G
cgcttgccatgtgcacgatgagttcaggacgggcagcggtggaaggcccttttgtcannncggacatggaagactgnnnnnnnnncattccacagacagatgagtcaaccctcatgaccatagcctatgtcatggctgccatctgcgccctcttcatgctgccactctgcctcatggtgtgtcagtggcgctgcctccgctgcctgcgccnnnnnnnnnnnnnnnnnnnnnnnnnnnnnnnnnnnnnnnnnnnnggaggcccatgggcagaagatagagattcccctggaccannnnnnnnnnnnnnnnnnnnnnnnnnnnnnggagacacagatggcacctgtggccagagcacctcaggaccctccccacccannnnnnnnnnnnnnnnnnnnnnnnnnnnnnnnnnnnnnnnnnnnnnnnnnnnnnnnnnnnnnnnnnnnnnngaaacagaaaagagaaagaaagaagcactctggtnnnnnnnnnnnnnnnggtcacctcaaatttaagttgggnnnnnnnnnnnnnnnnaacttcagcccnnnnnnnnnntccaccattccttctccaacccaaagtattcttcttttcttagtttcnnnnnnnnnnnnnnnnnnnnnnnnnnaccctggtgtgtgtccctgtggaaccctggcagagaagagaccaagcttgtttccccgctggccaaagtcagtaggagaggatgcacagtttgctatttgctttagagacagggactgtataaacaagcctaaca

SEQ ID NO: 4033 - DNA, 719 bp, Macaca Fascicularis
  misc_feature (1)...(719): n = A,T,C or G
agccccatttgcttccaagccctggagtttttaccntggctttgcctgccannnctgcacaggacactcttccctctcggggtgtgtgatgaactcccaggagagggaagatgggagccagggcaagataggaagctctgcctgggctttccactaggcatgccagccagaccaataaaaagcgtccgtcccactctgctaagcctgcttttcttcagcagagggatggaacagagggtgagagaggcagtggccatctccaccttagctcctgctccctctgcatcggagcccttcctttcttgggggatgggctcttgccctcttctcttttcccttcctgtacctttgactaacccctcagcttccgggcctgcatgtagtagtcagaagaggaagaaagaacagacgttcacaactgaatctcagtaaacagaatagcagtccctggatggcagtctgcctaaagattcctttccctgccttctcccatacattccaaaaggaagttcaacagtcagcagcacctccaagactgtctccttttggccaatnnnnnnnnnnnnnnnnnnnnnnnctgaggcctcctagaggctgaggggcaatggtgtgctctagctggctcatcccagcccagatgggccagttattcaattttgaagaattttgttgcaagcnnngttgttaaacacagccattataattatgtaaattgcaaa

SEQ ID NO: 4034 - DNA, 707 bp, Macaca Fascicularis
tccccaaagctgtcatttgcataagctgcaggccatagattccttatcccctcagtaactgaccctacaacaatggaactgatccacagcgctctagattttcaggctcacccaccaacacccctgctttccttgggattcctgtttgaaaaagaatggttgaaaaattaggtttcacttcctaatattttgtttttcttcctatttggttaaggtatattcatttcatttcctacatgcacattaagggtagttttgtgtagactgctatgggataaagtcatgttgcattgcaattagttattctaaaacataattacagtttatcatagttgaataactggaagacttctcaagaaagatcactgctcttttttaacactgatatatagacactttctcattttcccttaaacttttttttacaacactcataaaaaggaactttctttctagcatgcaattgtatttttattttattttaaaatatttttattcaactgtatatagaaaatgcatatatcataaacatacagctcaatgcattctcaaaaatgaacatactcaggtcaagaaacagaacatgaccacaccccagaagccttccccactttcccttccgggcaagcccccaagggtacacactaccttggcttctcacagcatagattcattttgcctgttttgtattttatataaattgagcc

SEQ ID NO: 4035 - DNA, 1890 bp, Macaca Fascicularis
atgctgaggggagatttagcgatgggaagaaaatttgactcccagtgactgtggtgggagagatgacatgtctggagaagtatggaaatggacagatttaatcttgagcaaatcactgaaattctaaggagtttttgttttctcatctgtagaatgagagcgttagaccactagataaagcctaattgcttttgtagcccgttaggaatttattgataatcacttcctgaccatcatgctatccactcgcattctaaacgaaaaaatacacagtgtcatcctattctactcccctacatctcttttttgagtctactgaattgaaatttctttattttaatttagaagagaaaaatgaagacaggacattttgaaatagtcaccatgctgctggcaaccatgattctagtggacattttccagacagaattacactcttcttcaagtgctacataaatgtccatggtcttcgtcattggaaacattctcattctttagaggcaacagaacagtttggttaagaggacaagactctggaattagattgcctgagttcaaattccaattccatgtgaaggctgaagtgttagacatggcagataatgcatttgatgatgaatacctgaaatgtactgacaggatggaaattaaatacgttccccaactgctaaaggaggaaaaagcaagccaccagcaattagatactgtgtgggaaaatgcaaaagccaaatgggcagcccgaaagactcaaatctttctccctgtgaattttaaggataaccatggaatagctctgatggcatatatttccgaagctcaagagcaaactcccttttaccatctgttcagtgaagctgtgaagatggctgggcaatctcgagaagattatatctatggcttccagttcaaagctttccacttttacctgacaagagccctgcagttgctgagaagaccttgtgaggccaattccaaaaatgtggtatatagaacaagccagggcacttcatttacatttggagggctaaaccaagccaggtttggccattttaccttggcatattcagtcaaacctcaggctgctgatgaccagctcactgttttatccatctacacatgccttggagttgacattgaaaaatttcttgataaagaaagtgaaagaattactttaatacctctgaatgaggtttttcaagtgttgcaggaaggggctggcaataaccttatccttcaaagcacaaacaagacctgcagccattatgagtgtgcatttctaggtggactaaaaactgaaaactgtgttgagaacctagaatattttcaacccgtctatgtctacaaccctggtgagaaaacccagaagcttgaagaccacggtgagaaaaaccagaagcttgaagaccgtggtgtgaaaatccttgaacccaccgaaataccagaagataaaagtcaaggaaatatcaacaatcctactccaggtccagttcctgttccaggtcccaaaagccatccttctgcatccttgggcaaaatgctgcttccagagtttgggatggtcatcattttaatcagtgtttctgctataaatctctttgttgctctgtagtttcatgcattgtttatctttcttgttctttacttgaaataactatagggatcccacaggagatcaaaaggaatgatgtatttttcacttgttggccaaagtcactgataaaatgagaattgtatatttgttattcattttgcaaattcagaaagttggtccagatatatgtcacagaacttttcacttctatactaattgaaaaaaatcccgaaaactgtatacttctgattgaattcaataaaagatttttagatatttcaaaaaaaaaaaaaaaaaaa

SEQ ID NO: 4036 - DNA, 721 bp, Macaca Fascicularis
  misc_feature (1)...(721): n = A,T,C or G
gatagatagtggtctgntcacatgtgcnnnnnnnnnnnnnnnnnnnnnnnnnnnnnnnnnnnnnnctcaagtgttttcaagatctagcatgtggattttaaaagatttgcccttattaacaagaataacatttaaaggagattgtttcaaaatatttttgcaaattgagataaggacagaaagattgagaaacattgtatattttccaaannnnnnnnnnnnnnnnctgtttcagagagagtactatatatttatggnnnnnnnnnnnnnnngcaaatcttgatttagtttgatagtgtgtggaattttattttgaaggataagaccatgggaaaattgtggtaaagactgtttgtaccctttatgaaataattctgaagttgccatcagttttactaatcttctgtgaaatacatagatatgtgtgtcttcaactttttattatggtcttataattaaatgtaaaattgaaaattcatttgctatttcaaagtgtgatatctttcacaatagccttttttatagtcagtaattcagaataatcaagttcatatgaataaatgcatttttatttcctatttctttagggagtactacaaatgtttgccacttaattttcaagtatctgttttaatagttaactgactatagattttctatgnnnnnnnnnnnnnnnnnctgagaatagtaaatgactctttgctatattttaaaagcaatt

SEQ ID NO: 4037 - DNA, 760 bp, Macaca Fascicularis
  misc_feature (1)...(760): n = A,T,C or G
tataactcactnnnnctcaaaaatagtcntgaggtaggtactattattttcaccatttcacaagagagatacttctatctttttacatacacacagacctgaagcaccttgatcaagttcccacagctatgaagtagtagggctagcttccaatccagaaagtctagatccaagactgtttatccactatactatacaccctattttgtgaaggaaaagacaaagttcaaattctccaatagtccattgtctattaatggaggcagagctatatttctatacataattaacaacacagtgtggtgggtacctgtactatttactgtctttacttggactcattccnnnnnnnnnctcacacaaaaaatgcccctcctgagatcttatattttctatttatcataacactcaccatattttatatttttaaatgtttttggaattctcttagcattagatagtgaacttccatgcagatgaccacatctaattcattattattattgttattcatgctggacatcaggtacaaaaggttaagaacttctcagttcattatactatcatcattggtgcctctgagctctcaatctctctctctctatttatttggtcccttttatccccagtccctactcccatatctaacctcttacccctacctcataggtaaacattttaatgaatttgatatttcctttcatttgcatagatcctatacaatatgtattagtgtccagtgtacatgtattttagttag

SEQ ID NO: 4038 - DNA, 742 bp, Macaca Fascicularis
  misc_feature (1)...(742): n = A,T,C or G
atgcagctgatactgcagtggttnnnaggccatnnnnnnnnnnnnnnnnacatctcagtcatacccagtgctcggtggatcatgaccaaacccctgtcatgtggatgcgtgtgaatgggtagcagggagtcaggatcctgctttctccagcaaccccttaatgctgtatagcttgcataagcctccctggtgactcctgcaggaaccactccattgtcctccagctccccagccttcnnnnnnnnnnnnnnnntggccagatctcttagcctgcaaagagaactttccccagtcactatagtccattctccttcccaaggcttggggcagaccattcgtcnnnnnnnnnnnnnnntatacagtcttctttctggccccatcttaaanntcttctgccgtgctgcatcccagatgatgtctcagatgctttggggaatctttaacagctgaatttgagtcggtcttcttaggctgcacctccagcctctgcgcagacccccactcatttcccatggatggtgggaccccatcattctctcatctcggcgttcagggcatgctttccttggcggcccctggtcacatgtcatcaggctgggcgggaagtgtccctgggtgcgtgctccacttctccctctnnnnnnnnnnnnnnnnatccttagtcccctctcatgcccactgtnanctgattatagcacttccactgctgctgtcagataggaagtgnnnnnagcagggggca

SEQ ID NO: 4039 - DNA, 727 bp, Macaca Fascicularis
  misc_feature (1)...(727): n = A,T,C or G
ctgaagagagtgacagaaagaccccatgacccccccatgtggatccccatctgtgtctnnnnnnnnnnnnnnnnnnnnnnnnnnnnnnctggaggatgcagggcaagcccttaggggcctgccagggctcggggggcaaacagggacttgggaaactcagtgtacccccgatgcctcacccattccatgtcatcacccatgtctgccacccactgattgggcaatggtgggcccatggggtggaagcccccagatgactgggcagttctacaaaagaatggccagtgcaagcggggactagagggtcctgattttgtgtttgtccctcttcatctctctggactctgatctccttctcccttcccatctccaggccttctgtnnnnnnnnnnnnnnnnnnnnnnnctcccatcctccctgtcccatcctctccacctaatcgctcccaattttgagagccaaaggctggcgcttctgacttcaggagcgagaggaggaggcctagtttgggcccatgtattttaaagcagagtggacagcagagagtcaatttccctttcgttgggagtgggcagtggggtggctaatcgtctccggccaaccaggggcccgttgcccaggcaactcaccagctctnnnnnnnnnnnnnnnnnnnnnnnnnnnnnnnnnnccaagatttaaaggtatgcctagcnnattgctcttttcaaaacctaccagtcccact

SEQ ID NO: 4040 - DNA, 761 bp, Macaca Fascicularis
  misc_feature (1)...(761): n = A,T,C or G
ggcgtgatttcggctcgctgcaacctctgcctctccagttcaagcgattcttgtgccttagccttccaggtggctgggactgcaggtgtgtgccaccatgcccggctaattttcgtattttttagtggagacagggtttcgccatgttggccaggctggtctcgagctcccgacctcaagtgatctgcccacctcggcctcccagagtgctgggattacaggtgcgagccaccgcacccgnnnnnnnnnnnnnnnnnnnnnnnncaaactgaaactctgtacctaaaaagagttccaaattccaccctcaccccagaccctggtaaccactacttcactttctctctgaatttgccttcatatgaatgggattaaacaagagttgcccttttgtgacnnnnnnnnnnnnttagcaagccatcagctnnnnnnnnnnnnnnnnnnnnnnnnnnnnnnnnnnnnntgtcctccagaaaagaaagatctggagggtcaggctactgtttttcttcagaataatgagggggcagatgggtagggatgaacctcttcctcctctgccactttagctcaaaggaactcccatctttttattatttgcaagttagctttctgttgcacatctccgccttgtannnnnnnnnnnnnnnnnngtgttttgtcaaaaaataatactttccctggaaaaaagccatgtggtagcaaataccnnnactttttatggccaaataatacgccattatatccatagaccgcatttg

SEQ ID NO: 4041 - DNA, 739 bp, Macaca Fascicularis
  misc_feature (1)...(739): n = A,T,C or G
gaaacttgtttacagaagatttagaaatacccctatttctcatttgcagttgtttttctttgtttttgtttttgtttttttccccttctttgctctgtcaacatgagggacctatctatacaggttgacttttaacatcaaaattggatttgtgtcacactctgtatttattgttaagagaagaatgnnnnnnnnnnnnnnnnnnnnnnnnnnnnnnnnnaaacctttagaatttatgacttactgttaggagtctgtcatatggttagaatttttacttcccctcccgctgccatttattctacnnnnnnnnnnnnnnnnnnnnnnnnnnnnntgaggaatattctcacgctctgtggtatttgnnnnnnnnnnnnnnnnnntttctctgtctttagtatttttttgctggtgcttcttatacttaatatggaaaggtgggaagaatattgcattagatgtaattcttcgttctagaccnnnnnnnnnnnnnnnnnnnnnnnnntgtgtgtgaaggagtctcactctgtcacccgggctgtgtagtgcagtggcatgatcttggctcactgcaacctccgcnnnnnnnnnnnnnnnnnnnnnnnnnnnnnnnnnnnnnnnnnnnnnnnnnnnnnnnntgcnnnnnnnnnnnnnnnngctgtgttttcacttttctnnnnnnnnnnnnnnnnnnnnnnatagccnnnatttttctcagctccaacattgtttgattttt

SEQ ID NO: 4042 - DNA, 720 bp, Macaca Fascicularis
gcaaaattttaactgcagattttctttgtagaaattctatgtataatgcaggtacctacttggcccatggctggtaactatttgggcaattagaaaaaaagaaaaaaacataaaaactagtgtctattgctgctttgaatatgtttgaaagtctgaaaatgtaaatagtttatcaaaaaaaaatcttgtacagtccagtgtaaagtttttaaatgaccttaagggttgccatcacatctttctcacactctcctcttgataataataataataaaaagtttgctaaagattaaagaaatggggaaaaaaatctcttcaaatttacaagaatgaatcattgttcttagctttgttgcatacacaaacttcttggatttcgttgtgcagtattgacgtgagataaagctcaacattgaataatctttcagtggtacttttcaaagtcttcccctcctctgcctcataattaagggaaaagacaaattgaaagacacactgtctttatctatcctggtgtatgttggcaccttagctactttttttttcctttttgcacaaggtgctttcctgatatgttcaacatgccatctttgggtgataatgtatatgccgtgatggggctcaggcccctaaggggagtgtctataagaactgcctatttatgctcatttacctcaagactgtcctctctaccctaatctagtgtcatcactccatctt

SEQ ID NO: 4043 - DNA, 751 bp, Macaca Fascicularis
  misc_feature (1)...(751): n = A,T,C or G
gcttcagaatgatnnnnnggaaaannnnnnnnnnnnnnnnnnnnnnnnnnnnnnnnnncaaagaaaatatcagctagtactttctccagtaattccatctgtaacaatgagcatttaaaagttgttataatacatttaaataccttgcccatacaagtgcattataaaatgtagcattaatgaaacaaccaaatgtcccaacttaacctgtcttnnnnnnnnnnnnnnnataaatttctcccactatctctatgaatatgtnnnnnnnnnnnnnnnntataccactgaatagagatagtagacaatttttattttgacagaaatccactcgtaaaattacacacaaaaattctgctataacctatgtgcattggcagnnnnnnnnnnnnnnnnnnnnnnnnnnnnnnnntcatgcatgtgttttatgatgttgtctgttccttttttgacttacatatttataatacagaatgtgagaagagttagctctttgtagttatttagctggaagacatagaaaactgttctagaacctttaaaaagcagttgcaggaatttttttaaagtccctgaaattacaagtcaagacattattttaaattattattctttnnnnnnnnnnnnnnntatacatcaagatttatcaataacatatagacaaagtaggaaagtatggttaccatattgtataatggcacctcatgttgcttatttcttctataattaagtcataaattgagctcacaaaaat

SEQ ID NO: 4044 - DNA, 102 bp, Macaca Fascicularis
tcgccggcggagggcgaggtcttcgacattcagctgacctaggtgtgagccggatcccctctcccagcgggccgggggatgccccccagactgcacacgggg

SEQ ID NO: 4045 - DNA, 757 bp, Macaca Fascicularis
  misc_feature (1)...(757): n = A,T,C or G
gtctgccccgaaaaatgcnnnncgtccgaggccagagcttctcggtgtggatcttgtgtgacgcgnnnnnnnnnnnnnnnnnnnnnnntnnnnngcannngtttgaatattaccatcgnnngagnnnnnnnnnnnnnnnnnnnnnnnnnnnnntggnnnnngacatccagctgacccacgtgcagacataggccgctccctggccctggggccggggctggggtggggggcactctgggtcttctcatcatccccacgtcccaggcccagcctttccaaccctccctgggatctgggctttaatgcagaggccatgcccttgtctggtcctacttctggctacagccaccctggaacggagaaggcagctgaccgggattgccttcctcagccgcggcagcacctggggctccagctgcccaaatcctaccatcccaggaggcgggcacagccagggagagggaggagtgggcagtgaagatgaaggcccatgctcagtcccctcccatcccccacgcggctccaccccagtcccaagccactagctgtctactcctggtgggaggtggcctcctcagcccctcctctctgacctttaacctcactctcaccttgcaccctgcaccaacccttcaccccctcctggaaagcaggcctgatggcatcccactggcctccaccaactgaccggatttcaggggactggactcttcaggggactagctcctttcccagtgtccttaaaaaaagaaagaaa

SEQ ID NO: 4046 - DNA, 2172 bp, Macaca Fascicularis
  misc_feature (1)...(2172): n = A,T,C or G
agacgtgctctggaaaccggaataaaaagaaaggatttcggggaggaaggagttgcagttggcgagtgtgggggctgctacacactcggctgcgggttaaagcttcaccactctggtctctatgactccctgcgaaggttgctgtcatcccacagagacacagctgagctgcctctctaaagggcctgtgttctactcctgaatctggtttctcctaagcttttatctcaccctggtgacagctcagaaacacacaaactctgtgttaagaaaactaagaagtcattcatctgcacatttcccgaaatcccccagaagcccacatagactgaatggtgtccttattggaaactctccaccttagccaaggtgcaaagtcctcccagtcccccaggagcttcccttctttgagctgtactcaagttttctgtaaaaccactcagttcaacaaatgagtttctcaatcttagtttctgcttgttgactttaaagttcatctataataaacacactgaagtcctcaaaaaaaaaaaaaaaaaaaaaaaaaaaaaaaaaaaaaaaaaaaaaaaaaaaaaaaaaaaaaaaaaaaaaaaaaaaaaaaaaaaaaaaaaaaaaaaaaaaaaaaaaaaaaaaaaaaaaaaaaaaaaaaaaaaaaaaaaaaaaaaaaaaaaaaaaaaaaaaaaaaaaaaaaaaaaaaaaaaaaaacaattttttttttttaatagnnnnnnnnnnnnnnnnnnnnnnnnnnnnnnnnnnnnnnnnnnnnnnnnnnnnnnnnnnnnnnnnnnnnnnnnnnnnnnnnnnnnnnnnnnnnnnnnnnnnnnnnnnnnnnnnnnnnnnnnnnnnnnnnnnnnnnnnnnnnnnnnnnnnnnnnnnnnnnnnnnnnnnnnnnnnnnnnnnnnnnnnnnnnnnnnnnnnnncaaactccccttgggttatccacctgcctcggcctcccaaagtgctgggcatgagccaccgtgcctggcttgacacttatcttttatatctatatacttttttcttttttgnnnnnnnnnnnnnnnnnnnnnnnnnnnnnnnnnnnnnnnnnnnnnnnnnnnnnnnnnnnnnnnnnnnnnnnnnnnnnnnnnnnnnnnnnnnnnnnnnnnnnnnnnnnnnnnnnnnnnnnnnnnnnnnnnnnnnnnnnnnnnnnnnnnnnnnnnnnnnnnnnnnnnnnnnnnnnnnnnnnnnnnnnnnnnnnnnnnnnnnnnnnnnnnctgacctcaggtgacctacctgcctctgcctcccaaagtgccgggattacaggtgtgagccaccatgaccagcctaaaacacctaccttttatttttaaaaaatccaacacattatcagtacttcatgccagacaccattctaggaaagtaactcttctttcacatcaatcccatgggtagctgtcatttacagatgaggaaactgaggcacggaggtgaagcaactttcctgaggtcaccctgctactaagtgacacagctggcatctagtgcagcaggctggctccaagtctacgcccctcacccctcagatgctgctcaccaagccggaggggctgtgggagcaagttagaacacaggacgcccctggcagcagcgccctgtgtgtgaaactacggcggaggaggccatattgcggcgaggaaatgctgggcggtgccgcgcagtcagggctgaggaccgggacagaggttgggtggggcgtgtcagcattcctccaacgggcaggtctcagcgctcctcccactgctccactcctctgcagggcccaggtgcccttggccctgggacacacctctcgccatggagttcgacctgggagcagctctggagccaacctcccagaagccaggtgtgggggcgggccatgggggagaccccaagctcagtccccacaaagttcagggccggtcgaaggcgagggcaggtccgggtccagagcaaggacaccacagctcttccgactccagcagcagctccagcgactcggacatggatgtgaagccccacaccgctggctccaagcagcacgagagcacccccggcaaggccaagaagcccaaagtgaagaagaagaaaaaggaaaagggcaagaaggaggctcctcactgaagggccctggacagggctcattaaaccttcctctctgcc

SEQ ID NO: 4047 - DNA, 753 bp, Macaca Fascicularis
  misc_feature (1)...(753): n = A,T,C or G
gggactngnnngagtgctccagcacctgcgggcccggctggcagcggcgaactgtagagtgcagggatccctccggccaggnnnnnnnnnnnnnnnnnnnnnnnnnnnnnnnnnnnnnngccaagccctgtgaaagccagctgtgcccnnnnnnnnnnnnnnnnnnnnnnnnnnnnnnnnnnnnnnggacgtggggnnnnnnnnnnnnnnnnnnnnnnnnnnctgtgatgactctatatatcaaggcagcatggcccacccaggcctcccattgccgcaacccctccagtactgcacgaattcctaagggggaagaggagaggggatggggcgacagatcctatcatcaactgtccagtggactggaccttgctcgggttcaagtagagggcataggttaaaaggtaaaagtgcacttattgactcagacaggacactcagcgtcagtctgtttgcaaaggactagcaaagttaaatgaaaaaaaaaattctatctggtttccccgataaataatctacctcagaggggaaaacattagtacaagagaggcgtggggcagggagtcaatggtgannnnnnnnnnnnnnnnnnnnnnnnnnnnnnnnnnnnnnnnnnnnnnnnnnnnnnnnnnnnnnnnnnnnnnnnnnnnnnnnnnnnnnnnnnnnnnnnnnnnnnnnnnnnnggagagccnnnnnnnnnnnnnctgccacctgcaggggtggatccatttcaagtatttatgcaaatgtgtc

SEQ ID NO: 4048 - DNA, 764 bp, Macaca Fascicularis
  misc_feature (1)...(764): n = A,T,C or G
attttgcagagcactgantttnnaagcaccttcacatacacaccgagtgaagcagggtacaaatgattaacccnnntctacaggtgaggagactgaggtgtgggagagtagaggcggcagaactctggggaaagacagttgtagcgccacttgccctcatgtgatgctaaagaaagaaaagctacgaaatctggaaagaagacatttgagaggcccaaggaaaaaggtgagctggaagagggagnnnnnnnnnnncagagagaggcccgagacgaaaagtgaccatttggaaggtgcnnnnnnnnacaatccactggacgtnnnnnnnnnnnnnnnnnnnncgattcctctgagcactgccctaccacctgacaaatggggttcggggcacttccagcacactgtgcctgtgcctgcagagaggtcctccaaagaagtcaggagtccattcccttataggagtgtgactgtaagtatcacttagatctgtgacatggagacagtgatttatccacacttatgatgactgtgtgttaactacaaaaacatgcccctctgggttaaaaggctccacaccagcactgccagcttggcaagcagaannnnnnnnnnnnnnnaacccccatgttcccccttgaccaggtgcctttgtgcagtgtacagactggccaacctcacctggcagccctgtccaaagattttttttaatttgctaaaatataagactcaccagggcaggaacatcttattcatgactgtgcact

SEQ ID NO: 4049 - DNA, 801 bp, Macaca Fascicularis
  misc_feature (1)...(801): n = A,T,C or G
aaagagatnatatcacngcagaagnnntgtgannnnaaaaataaaccaggacctccctgtgatttgccttgtctgcagatgaccgatggactctcgtgtgtcagccctgggcttnnnnnnnnnnnnnnctcagggagttgggggtcagttgccgctctcaacgggaatgcgggaatgcctcctctccttgtcagagatgctgaacaaatagcaagctctgtggcagtcatgctggcctcctaataataaccnnnnnnnnnnnnnnnacatgatttttgtgtttttttttttttttaagaaactgccccaggggttcattatagaacaggagtgtgtatggaggacttaggtccccacatagagtggccgttctgtggcggctacaaccaattccatcccttctttcctgcggacacacacctgacccctggcccctgccctgtgtgtccagaggaggggcactggggaggctgtggagcagaggnnnnnnnnnnnnnnnnnnnnnnnnnnnnnnnnnnnnnnnnnnnnnnnnnnnnaaaggccagactgctttctcagtgttactttctaaagctctctttttatggtgttataaagatgtataaagttggtataaacaggcttgagaccactttgatgtaaaagctgtcatagcagtttttcttacagtggcacaattcatttgactgatggaatattcagtgatgccatttatgtcctatcacttttttctcatccatctttatgctataactcatattgatttaagaaatgatttctccttttggcaaagcgatccca

SEQ ID NO: 4050 - DNA, 705 bp, Macaca Fascicularis
  misc_feature (1)...(705): n = A,T,C or G
gtgggtgctgnnnnnagccacggcccagcccctgggctccctctggctccgggtggcggttgccgggccccctcctgagtctgcaccctcttccccacccgcagtgcccctcccaccnnnnnnnnnnnnnnnnnnnnnnnnngtccccataatggaaaaccacatttgtgatgcgaaataccactctggcctctacacgggagatnnnnnnnnnnnnatccgcgaaagacatgatgagtgccgggaacagccggagggacacatgccagggcgactccggagggcccctggtctgcaaggtgaatggcacctggctgcaggctggcgtggtcagctgggacgagggctgtgcccagccctaccggcccggaatctacactcgcatcacgctactacttggactggatccaccgctacgtccccgagaagccctgagccaggcctgtgtcacccgggtcagcggagggccagcccctcctgtccaaaacaccactgcttccgacccaggtggcaactgccccccacaccttccctgccccgtcccgagtgccccttcctgtcctgagccccctgctctgtcccgagtcccttcctctgtcctgaggacccttccccatcctgagccccctcccctgtccnnnnnnnnnnnnnnnnnnnnnnnnnnnnggccctcccctgcccagctagctggtggtgggtgctaat

SEQ ID NO: 4051 - DNA, 1951 bp, Macaca Fascicularis
aagttaagtggaagtcggttgagatagctacgatattattattctctctgtttctaccattgacctagttacagggcccgattatcttctcagctgacccctctgaaggaaattattttcaatcaggctggttcattgttgacgtcggcccctggccagaagggaacagaggaacacatagactccccaagaaatgaagcctaatttctctgcaagatataccaactgaaccaattaggaggcacccctccaaagaatcaccaaattagaattctgcacacatgtgaccctcttcctctcctcttcaactgtctccattctagaggtcaccctatggaaaaagaaggaatctgtccccggagcctgggctcaggagcatcataggacacattcatgtcccctgacaagctctgatcatgcaccttcatgacctgacccagttaattagcagagtgggcagcagcagtactcctgaagtcatttatacaccaggacagccaacagtcgtcttcaaccagaacgcattccacagagaaaactgacagccacatatccgaactgccagatggttacatgtgtctacaaaacctccacatcattgactgtttccaacttcggccaggatctagggccacaaaataatcaacctggggccgctgaccggaaggcagccccggaaaacttcccgtgggaagagttccagaaattgcccggactttaacaagtcccgctgtgctggctgccagcctcagaccgtcagaggccaccgcgactcgccttgcccgaatgccagcaatcccgccgaagcacggagccctggacttaggaaacattccccggtacatttttacagatttgaaaagcaggaagggaaaaacatttcgagccgaaaggagaaatctcagagtcctgggggcaccgaggggccagcgaggtccccaggcgctgtacacacgtccaacctccctcctccacgcgccctgctcccccaccctcttcccatccctcctcccccaggcagaacccccccctgctgctgtgcctggtgggcgtgacggcggcgctggcccacggctgtctgcactgccacagcaagttctccgagaagttctccttctaccgccaccatgtgaacctcaagtcctggtgggtgggcgacatccccgtgtcaggggcgctgctcaccgactggagcgacgacacgatgaaggagctgcacctggccatccccgccgagatcacccgggagaagctggaccaagtggcgacagcagtgtaccagagaatggatcagctgtaccaggggaagatgtacttcccggggtatttccccaacgagctgcgcaacatcttccgggagcaggtgcacctcatccagaacgccatcattgaaagtcgcctcgactgtcagcgccactgtggcatcttccagtacgagaccatctcctgcaacaactgcacagactcgcacgtcgcctgctttggctataactgcgagtcctcggagcagtgggagtcagctgtccagggcctgctgaactacataaataactggcacaaacaggacgtgagcatgagagccaccccagccttcctggtatcgccggccttcaggtgtctggagcccccacacctggccaacctgaccttggaagatgctgctgagtgtctcaagcagcactgacagcagccgggcctgccccagcgcaacgtggggccaggactcagctggacagcccacgcctgtccctctggagctgggctgctgctgcctcaggacccctcctccaaccccagacagagcctgagctggccagggccgggagggcgggagggagggagcgggggtgggccgtgtacagcgtcagcacctgggcaggtctgcggagctgtgagacgtgatgattaaaatccctgatgtttctcaaaaaaaaaaaaaaaaaaaaaaaaa

SEQ ID NO: 4052 - DNA, 733 bp, Macaca Fascicularis
  misc_feature (1)...(733): n = A,T,C or G
aagatgtgtaaacaggtatttttttaaannnnnnaaaggctcatttaaaacaggcaaagttttacagagaggatacatttaataaaactgcgagaacatcaaagtggtaaatactgtgaaataccttttctcacaaaaaggcaaatattgaagttgtttatcaacttcgctagaaaaaaaaaaaaacacttggcatacaaaatatttaagtgaaggagaagtctaacgctgaactgannnnnnnnnnnnnnnnnnnnnntgttatgaacatccaagtctttcttcttttttaagttgtcaaagaagcttccacaaaattagaaaggannnnnnnnnnnnnnnnnnnnnnnnnnnnnnnctctggacactctatatgtagtgcatttttaaacttgaaatatataatattcagccagcttaaacccatacaatgtatgtacaatacaatgtacaattatgtctcttgagcatcaatcttgttactgctgattcttgtaaatctttttgcttctactttcatcttaaactaatacgtgccagatataactgtcttgtttcagtgagagacgccctatttctatgtnnnnnnnnnnnnnnnnnnttgtacaattttaaagttcttattttagtatacatacaaatatcagtattctgacatgtaagaaaatgttacggcatcacacttatattttatgaacattgtactgttgctttaatatgagcttcaatataa

SEQ ID NO: 4053 - DNA, 2790 bp, Macaca Fascicularis
aaaagaagaattttctgataaccatactggcaaaatgaactgggctgccttcggagggtctgaattcttcatcccagaaggcattcacatagattcaagatgcccactaagcagaaatatcacggaatggtaccattactatggcattgcagtgaaagaaagctcccaatattatgatgtgatgtattccaagaaaggagccgcctgggtgagtgagacaggcaagaaagaagtgagcaaacagacagtggcatattcaccccggtccaaactcggaacgctgctgccagaatttcccaatgtcaaagatctaaatctgccagccagcctgcctgaggagaaggtttctacctttatcatgatgtacagaacacactgtcagagaatactggacactgtaataagagccaactttgatgaggttcaaagtttccttctgcacttttggcaaggaatgccgccccacatgctgcctgtgctgggctcctccacagtggtgaacattgtcggcgtgtgtgactccatcctctacaaagctatctccggggtgctgatgcccaccgtgctgcaggcattacctgacagcttaactcaggtgattcgaaagtttgccaagcaactggatgagtggctaaaagtggctctccacgacctcccagaaaacttgcgaaacatcaagttcgaattgtcgagaaggttctcccaaattctgagacggcaaacatcactaaatcatctctgccaggcatctcgaacagtgatccacagtgcagacatcacgttccaaatgctggaagactggaggaatgtggtcctgttttggcacgagggtgatccgggatatgaccctgcacagcgcccccagcttcgggtcttttcacctaattcacttaatgtttgatgactacgtgctctacctgttagaatctccgcactgtcaggagcgggccaatgagctcatgcgagccatgaagggagagggaagcactgcagaagtccgagaagagatcatcttgacagaggctgcagaggctacggcgccaaccccttcaccagtgccatcgttttctccagcaaaatctgccccatctgtggaagtgccacctccctcttcccctggtagcaatccatcccctgagtacactggcctcagcactacaggagcaatgcagtcatacacgtggtctctcacatacacagtgacgacggctgctgggtccccagctgagaactcccaacagctgccctgtatgaggaacactcatgtgccttcttcctccgtcacacacaggataccagtttatccccacagagaggaacatggatacacgggaagctataactatgggagctatggcaaccagcatcctcaccccatgcagagccagtatccggccctccctcatgacacagccatctccgggccactccactatgccccttaccacaggagctctgcacagtacccttttaatagccccacttcccggatggaaccttgtttgatgagcagtactcccagactgcatcctaccccagtcactccccgctggccagaggtgccctccgccaacacgtgctacacaagcccgtctgtgcattccacgaggtacggaaactctagtgacatgtatacacccctgacaacgcgcaggaattctgagtatgagcacatgcaacactttcctggctttgcttacatcaacggagaggcctctacaggatgggctaaatgactgctatcataggcatccatatttaatattaataataattattaataataataaacccaacacccatcccccagaagactttatctctatacattgtaactcatgggctattcctaagtgtccattttcctaatgaacatgaggatgggattcaatgtgggatgaataaactttagttcagaaacaggacttactaaaagtcagcgggattgggtttctgtagccaagccagacttgactgtttctatagagcactatcttgggcaggccattctgtgccttttccctctgttccatgactttgctttgtgttggcaaccacttctagtaagctactgattttcctgttgacaaaatctctttagtcttgaaggatggatactggagacagaatctggtttgtgttcttggatgggcacataatttgccaagagcattcaccttgccatctgtctgtcatcgtactgtacaaggaacagccctcagacgtgttctgcacatcccttcttcctggtggtatcatcactgcttcctggagcaccagggctaaatggggagctatctggaaactctagattttctgtcataacccacatctgtcacagtacctgcattgtcttggaatgtaagcactgtcttgagggaaggaagaggtctgttctgtattgccttaagttgattgaggtttgtaggagactggttcttctacatacaaggatttgtcttaagtttgcacaatggctagtgtcagcaaaaggcaggaaggtttttttttttttttaagttctatgagaatgtggatttatggcattgagtatcacactcagctctgctgtgttaactttgtgaaactggatggaacaaactttaacttaccaagcaccaagtgtgaaaatgactttcatggttccttcataaaactataataatatccgacactttgatagaaaaaaattcaaagctgtgcctttgagcctatactatactgtgtatgtgtggaaataaaaatgtattgtacttttggagaaaaaaaaaaaaaaaaaaaaaaaaaaaa

SEQ ID NO: 4054 - DNA, 692 bp, Macaca Fascicularis
aagagaagtaccccccctaactgtgaccggatcaggggtctaccactgcccgattttctctgcctgatctggggactcaggagaggccatggcagccacagcctaggggtggttcagtccctggcccacagcgctggtcagttgagtccttctgggaactggggctatgaaaattttcggctttgaggacaggtacccatggaggaaaactttcctgagggggtgaggaccaaagaatcaagatccttttcaaggcctgcgatagccaagatgatgagaacttttagataaggctgtggggagagtccctggccttttgagcgtcctgcttgggcatgcagggaataacccttctccagcttccagtgtgaactgagaaagggaaatcctgcctttggagaagctgggatcttcccagcaccagaaacttctgcaggcccctgcctggctcacggctaacctttgggtgggactggagtttcctgaacagggaacaagggagccttccgcagagctctgacaggcaggcctccgagggcctgtgctgtgtgctgttaggatagcttggtgttgtctacaccccattagtaagttctgtctgagtgtgtcctcgctgttcattgtctaatttggtaacatttattttggtcctgaccccttctgctgctgctgggtttgagcttcagtgcagg

SEQ ID NO: 4055 - DNA, 734 bp, Macaca Fascicularis
  misc_feature (1)...(734): n = A,T,C or G
gacatgaacagnnnnnnnnnnnnnnnnnnagtgcacacctcaccgtccttcagnnnaaggagaagggcaagccctgggaccaagaactctcctaccttctcccttgagcagcagcaaggaccctgacgctgtccctgatgattccctaggggctcccgcctgccctagcggctgagaaccagcaccccgatgcctgaggctgggagcctgagccccttcagctttgaggggatgatactgcttggggtgggagctaaaaagagttgagaggcccttggtggaaaggggcaccagacttggtctgagatagtcacaacccaggtgacattgccttctcagccaacactgccaacctgaccctgtcatccccagattgacagcgccacttcaggtggctgggtgactaaagggcttgtcttggtggggtctcccatccctccaagacccatcctgcacagtccctccagggttggggcaggagatggccaatcatgcgcccacctctccctccagcgctgcctgcagtcagctcggcttcccgacctgcagccccagactctgctctcccagaactgactcactcctgcctgggaggggaatgcagcattcatgctatgtatcctggaattgggaggtttctgggaagggcagaggataaatgtggccctgcctgctcccaggtatacctaggaccacctggccagatccgctcccagacggcctgnactgcttgc

SEQ ID NO: 4056 - DNA, 722 bp, Macaca Fascicularis
  misc_feature (1)...(722): n = A,T,C or G
ttcatataacataaaaccaaccattttaaagaatgtaatccagtggcgtttagttatttaccacgttgtccaaccatcacctctgtggagttctgaagcattagcacccccaaaggggcttgtggctctggagcaatcaccccccactcccccttcctggcccccggtaacggggtcggtgtcctgtggctgtggatctgccagttctggtcgttcccctgcagtgaatggaaccaacactctgtggccttcgcgtctggctctttccactcagcataatgttctcgaggttctttcacacgaatcagtgcctcagtccttttcacggctgcgtaatattccgtccatcactgatggacgtgtgctccgtttccactacttgtttattgtaaactgtgctgccatgaacatttgtatacaaatatttgatacacctattctcaattcttttgcacacatgcctaggagtggaattattgggttaccgataattctgtttgacgttttgagcgtcacagtggccacacggtttacattctcaacagcaatgcacgtaccaggactcactccaacttctgtgtgtattctccaatgcttgttactgtcctttatgtttattttatattattttttgagactgtcttnnnnnnnnnnnnnnnnnnnnnnnnnnnnnnnnnnnnnnnnnnnnnnnnnnnnnnnnnnnnnnnnnnnnnnnnnnnnnn

SEQ ID NO: 4057 - DNA, 664 bp, Macaca Fascicularis
  misc_feature (1)...(664): n = A,T,C or G
agggattaagtgacgtcatccatcgtgcctggtccatgccagccttccatgaagggcagctctgactacagctgtctatgccgggaagccgcccatttctcaaaaaacaccaaggcctccagagaaatcctgacatctgcctgaccattgacgccagatgccgagggcttgtctctggactctgacccacctgccttggggtcaaccaagagatgtcctgacccagctctttttccttactccgaagtaaggcacagtgcttgtgagcaccaagggcttttgggggacctcttcgtcctcacttggcactgtgtaaccctggccagaactggaactcctgaccctctgtcctcacctctctaaaacagggcagtaacaccaacatcacaaaaatgtgaggctcggccgggcgcggcggctcaagcctgtaactttgtgaggccgaggcaggcggatcaccagcactttgggaggccgaggcgggcggatcgcgaggtcagnnnnnnnnnnnnnnnnnnnnnnnnnnnnnnnnnnnnnnnnnnnnnnnnnnnnnnnnnnnnnnnnnnnnnnnnnnnnnnnnnnnnnnnnnnnnnnnnnnnnnnnnnnnnnnnnnnnnnnnnnnnnnnnnnnnnnnnnnnnnnnnnnnnnnnnnnnnnnnnnnnnn

SEQ ID NO: 4058 - DNA, 756 bp, Macaca Fascicularis
  misc_feature (1)...(756): n = A,T,C or G
ttagtaggaaaagacnncaaagcnnntacagaaatggaaagagtgcttcatgttggcggaaccattgtattgttgctnnnnnnnnnnnnnnnnnngcgccttacagattgtaaagagagcagcatccctttgaattccaaggacagtcacannnnnnnnnnnnnnnnnaaaaannnnnnnnnnnnnnnnnnnaaaannnnnnnnnnnnnnnnngtgtcaacttcannnnnnnccaggaaccacgagttcttagacagaatgtcaccatttggctccttggtaccagtggnnnnnnnnnnnnnnnnnnnnnnnnnnacagatgcgttcatatgtaaatatgagaagtcgcactcttctggactatagcaggcnnnnnnnnnnnnnnnnngttcaggcccttgtaagttagctgtacagcagaagtttgctgtctctaggannnnnnnnnnnnnnnnnnngctccaggtaaccaaattcccccaaagacgggaggtgtggctgttaggtacacgtgcttggtaagagtttctgctttatattctaaagtgcctaatgtttttgacaaaaaagttaccgaatattttttagacttaagttttatattctgtcagaatgtgaannnnnnnnnnnnnnnnntgagcaaaaacttcaatttcaaaataaaagttttcaggggttcacctaagtgtatcannnnnnnnnnnnnnnnnnngatatttaactatcagattttcggaaatgtaaaaacctttatat

SEQ ID NO: 4059 - DNA, 2208 bp, Macaca Fascicularis
aatcagtcacttttgagcagaaggtaggggccaggcactgtgctaggtccgtccattaaaattgtctcacttgagccacacagcagctctgggagagaagtggcagcaagatagaatgaatccaaagtgcacgaattttgtaagtcaaaactggattcaaatcctgattttgtcatcactttgacaagttccttaaattcctgaacctcaattaatgcattcctaaagttaagatctgtaattaccagccttgttaggttgaaatggtaaggtaaatgagatcatttctttggcaaaattattctaaatgagttcattcccctcctatcagacacgtacttttgtattctttctgctaaacactttcctatgtttaactaaaaattcagctatttctttgaactgtggcacagccatatctttcccatcttgaacttgaacaattgatttattttggatccttaatgtaagacattatatttatgcctgttaaattgcatctttttggtgtcaggttggccttttcagcccattgagagaatgttgaattttacgtttagcctataattatactaaatatttttcacagttttatgtcattgaaaaatctggtaagttttcttcttatgtctactttgatgccattaataagaatattgaatagagcagaacccaggggcagagcctgtggcattcaatcagtggtcccccaacaggttatgacagagccattcaccaagcctcttggctgtagatgtacaaccagctgtgaatccacttaatttttctctcatagagcccaccgtcttatagataatgaaagacttcatcaagtgctttattggaaccaaagacactatatctgtgacattctcctggtctgtgaacctcatactaataactctgtcaacaaaaagaaagttaataaagtttggcaaaaacggattttcagtgaggccagcaaagtttgaagagtggctgatgacgcaggggttgttgccaggaaaaaggggcatggctggctgctgagctccttttgggcaggttctaggggagggctcagcccttccagttcagaaactgggcttaatcaaaacactgaataaagttagaattttatgaagctcattttataccaggcactgtgcttaatgcattgcatgtgtctcatttaatcctaactattatactaagaggagaatactatttcttagctccatcattttacacaaggtaggtgacactgagagaggttaaataattgaccaaaaggcatatatagtaaatgccagtaccaacactcacactcaggtcaccctgacagcaagccccactcttaatcactatgccctcctgatcaggttctgtgcctcggtggcattgatttaatttaactaaggagagatcagtgtatcaagatgtccagtctgttaatacatgatgggaaggattctctaactgaccgaatgctccgctccctaatcccccatcttcaacacttcctcttctcatatctgggtactcagaacactgatccagtgattactgcttcctggtacatgtggtattgaaggaaagggaattttgagggatatttcatttagatcagtacaaaacctgataaaatagccccttgagtaatcagggagcttacttacgttaagattcagtctctctccccatgatgctatcaaagctagacattctaattcttttttccatagttgcattgcttcaatctgccctctacccttgctgcttcaccctaccctggcacactttctttgtttagctggatttcagtatcaccaattaaactatagtcacgctgccagtctatttcattgactcttcatggactagaaagtcattctgacttcaatcactttgtttgtcctagtctgttttgtgttgctataacagaacatctgagactgggtgatttataaagaaatatatatatgaagaattctagtaaggactccaacaacagaaaaaaagtatctttttaaccataagctaaactaattaaataattgaattaattgaaaatctcatacattctatatgcagatcattgtactgaggttacttaacacaccacctcattatctaaaggtaattgaggtttttgtcatgtaaatacgcatcgttgaaccactaatgcagcccttgaaagttaccttaatttaaaaaaaaaaaaaaaaa

SEQ ID NO: 4060 - DNA, 570 bp, Macaca Fascicularis
  misc_feature (1)...(570): n = A,T,C or G
aaacagaaaaggggaattccaagggtggagggtgcaattttaaataggagggaatgagaaggtctcactgaaatgacttggagagagctgtggatatccagggggagagtatttgtctaggcagaggaacacccagtgcaaaggccctgaagcagaaatgtgtcaaatgtgtttgtaaaacacaaaacagctggagtggcnnnnnnnnnnnnnnnnnnnnnnnnnnnnnnnnnnnnnnnnnnnnnnnnnnnnnnnnnnnnnnnnnnnnnnnnnnnnnnnnnnnnnnnnnnnnnnnnnnnnnnnnnnnnnnnnnnnnnnnnnnnnnnnnnnnnnnnnnnnnnnnnnnnnnnnnnnnnnnnnnnnnnnnnnnnnnnnnnnnnnnnnnnnnnnnnnnnnnnnnnnnnnnnnnnnnnnnnnnnnnnnnnnnnnnnnnnnnnnnnnnnnnnnnnnnnnnnnnnnnnnnnnnnnnnnnnnnnnnnnnnnnnnnnnnnnnnnnnnnnnnnnnnnaacagctggagtggggggagtgggtagcaggaagagaccaagtttggtggtggggggtggtag

SEQ ID NO: 4061 - DNA, 2371 bp, Macaca Fascicularis
  misc_feature (1)...(2371): n = A,T,C or G
aatatatgagatgttacattctatatttttagccagttaagtgaaatacctttttgacttctgataggaaaaatgtgtatgttctctttttttttttttttttggttaatccactttgtttttcatggctattcaaataataagctcccaggtctcaaagtggaaaagaaagggaaacatctattgctatatctgccatgctgatctcacacagtttcctgaaaatggaagtgatctcaatcttgtcttttgccaatgaggatcttacagaggtttcagattaaaaatgtagttatcatttaaagtaagaaaattgtactcactgggaaattttcattaaaagcattattttggtgaaacacacagtgtgaataaaatatagaaattggaaaaagtctatggagcatgtgttgcaaaattaacagtttatattggcaggaagttcctgtactcttttctctttaattatgagaatttctcattaggttctatttaaagcttgctataattgacttacatattaaagaaaataacagtgcaaatacagattagaatgcctgcttttatggataacaatttgtataggcaacctcttttagcaatttatgcagtaaggaatatgtgtggttgcagggagggttagacatctgagtttatcatggatataaaagggatttcttctttaagctcagagtcctgacatatgaatatgtgatgatttgtgttctagctttatttttatatggtcctattccttgcatgaagctaagatgtgaatgaaaatgttaccacaaaagacatctgacaaatacctttcagtactctctcttctaataaaccatattccactttgcgaattcagaagtaaaacacagaacctaaatgaaacttgtgacatggatacagagaaatttaagtgacctgttccacttcaaataataacagagtgtgccattggcaaacttggagatgaaggatgctttctctctgagcaattataacatgttattactgtgctctcatgcagattttcattctaaaagcctcactggtatcgtactgtgaaattgttttgttcagtatgatgttgaagaaatgtgagcatacagaatgtataaaagtttcatttgtgcaagtagtcatatatacagatagtccttagatagcagagaataaaatcattacaaaacatttattctacaaagaaccgctcctcttatatgtgtcactgcatcttcctgggtatatgtggtcttcagtagtggacactgatggtgaatcaaggtgtatttactaagaacatgccaaattagatgaaagagatttccatttagagagaagagttttgggattaacagctctctgcttcttagcacagtattttacaaagcctttcatgatatccttgttacatggcaagaagaagggactctatttcacctaaaatgtgatcatgtgtgtatgccagttgattttaggtgatattcagatgaacattttcttaaatgaatactatttctgagatatgttactggtttttagttcatgttattgattttctattaaaatgctattaaaaggtaaaaagtgagactacttaaggaaaaatatcaagaaagtactgacacaggtagtatgtatatatgaatgagaaattaaattggacagtttctaagattttttccaactctcagattctatgaaagacaaatataaccatccttcttaagcagaaaaacagaattaaaagtaattaagttgttaaagatcttggactagaacctaactctttttgacaatcaaagaattggaagaaatatgaccctccattggggtctaagcaaataggcagatatattttaatcattaaaaaactatgttttgattattttcacgtaacaacaaaagaaaatgaaatgagagggacattcaaggctcctcaaagttcaattagccagagaaaataatcatgttcattcttgcttaaagttgtttccctcttgcctttttttgtcagatgggggaaagagtagatgttctccatgtataataatctagaagccatttcaaatggccgggcgcggtggctcacgcctgtaatcccagctctcagggaggcagaggcgggaggatagcttgagcccaggagttcgagacctgcctgggtaatatagcgagaccccgttctccacaaaaaggaaaaaaaaaaaaaaaaaaaaaaaaaaaaaggccaaaaaaaaaataagcgcaatctccagcattcccccccaaacctaaaaaaaaaaaaaaaaaaaaaaaaaaaaaaaaaaaaaaaaaaaaaaaaaaaaaannnnnnnnnnnnnnnnnnnnnnncaaaaaaaaaaaaaaaaaa

SEQ ID NO: 4062 - DNA, 693 bp, Macaca Fascicularis
  misc_feature (1)...(693): n = A,T,C or G
ggcgagcctgnnnnnnacagagaaagaaccttgcccaaactcaggcagctggggctgaggcccgaaggcagagcagccagagagggcaggatgggcccaaaaaggaaaatgaggacgtgcagcagcattggaaggctggggccgggcaggccaggccaagcaggggccacagggtgggctgtggagctctcaggaagggccctgaggaaggcacacttgctccttctggtccctgtccttactgcccaggcagcatggaggggaagggtggggcagcccagagaaaggagcagagaaggcacacaaacgaggaatgaggggcttcatgagaggccacagggcctggctggccgcgctgtcccagcctgctcaccacctcagtgaggggcaggagctggggctcgcttaggctgggcccacgtttccctggtgccagcacccctcaagcctgtctcaccagtggcctgccctctcacagccccacccacccagcccacccattgaagtctccttgggccaccaaaggtggtggccatggtaccggggacttgggagagtgagacccagtggagggagcaagaggagagggatgtcagggggggtggggcacagggtgggggaaatggggtgaacggtgctggcagttcggctagatttctgtcttgttcgtttttttgttttgtttaatgtata

SEQ ID NO: 4063 - DNA, 739 bp, Macaca Fascicularis
  misc_feature (1)...(739): n = A,T,C or G
acagaggcagggcatnnntgagactgatgcctgtcctgnnnctggcctgtgtcctgggtgtgtgccgtacctgctgggccagtcccacacatttccaccctgccnnnnnnnnnnnnnnnnnnnnnnnnngggtgtcnnnnnnnnnnnnnnnnnnntgtgtccccgannnnctgtgagacctccctgttcttggtgaccccagttgggctttgacccctccagcaaccttgtgtcccatccctgcccttcctcccaccccctcaatctgctagtccctgaagcctttaaccaaacgggagtgggcacagaaagccttctcctggcaacaggacaagggctgcccgcgtgtccagccctgttgctctcctggcactgagaggtggatccaagcagagttgatcagtccccctgccagccctgcctaggtctagccaggggaggttgtgtgtgtgtgggagaagaccccgggatgtgctggggtgggatggaggttattaaagatctaagtgaggaggggctggggtttggatgcggggtgaggcccgagcgctcacacttcgtgtagggctggcaggggcctgacctcgggcagggcagtggccttggtgccccacccctgccctgcgcagtatttattgctaaattattgtccaggaggggcagcactgggcctggccccccgggtatttattgctgtacatagtgtatgtttgtgatatataaggttttctttatttgt

SEQ ID NO: 4064 - DNA, 716 bp, Macaca Fascicularis
  misc_feature (1)...(716): n = A,T,C or G
ggagagaagggaaagtgaagaagacagacctagaagtgaaggagagnnnnnnnnnnnnnnnntgcctatttttacaggctcggaagctgccatctgtgggagggggaaagtccctcattcattattatccaacaattggagaaaaaggagaccccacgtgcacacgggtgctcgctccagtcctnnnnnnnnngcccaaaactagaaaccacctcnnnnnnnnnnnnnnnnnnnnnnnnnnnnnnnnnnnnnnnnngagcacctcgccaccgtgtggccggcctgcagacctcatgcaccgacagggaaaggggtcctcaatctacatttatgggaaaactgacaaaatcagccccaactcccaggaggagagagggactgggttggannnnnnnnnnnnnnnnttttttctaataggttnnnnnnnnnnnnnnnnnattagatatgatttggtttggctgtgtcccctcccaannnnnnnnnnnnnnnnnnnnnnnnnnnnntcccatgagttgtgggagggacccagggggaggtaattgaatcacaggggccaatctttcccatgtgattctcgtgatagtgaaccagtttcacaagatctgatgggtttatcaggggtttctgcttttgcttctaattttctcttgctgccaccacgtaagaagtgcctttcacctctgccatgattctgaggcctccccagccatgggaac

SEQ ID NO: 4065 - DNA, 711 bp, Macaca Fascicularis
  misc_feature (1)...(711): n = A,T,C or G
acagtgatagagatagatagatgtatgtgaacagatnnnnnnnnnnnnnnnctgaattctttgtcaccagcacttttgatatgagcannnnnnnnnnnnnnnnnnnnnnnnnnnnnnnnnactgacttttataatttaaggtgttcactatattttctttggttttaaaatgcaaaatctcattggctgttctcttgaatgtcatatcatactggtgttaaaatatgtaatgtatnnnnnnnnnnnnnnnnnnnnnnnnnnnnntatcttaaaatgcagaagtgattggaaggtaggtcttatctagcctttggatttcaagaatagcatagtccttttgatttttcagagtttatannnnnnnnnnnnnnnnnnnnnnnnnnnnnnnnnnnnnnnnnnnnnnnnnnnnnnnnnnnnnnnnnnnnnnnnactcataattggaagaattgtgatcgattataggatctggttaaaaattcagttactgaaggaattaatgagaacttggaagaaaatactgaaaggactgtcataagggctatagctcaaacttcataatacataaatcactggcgtctttttggatttggttgtttgattctccttccttttttgacatatatatgccttaattcttcaatctgagggaccatgctttgaaatagactgaaaattaagggtcaccacctaattttacttgtattcaatatc

SEQ ID NO: 4066 - DNA, 781 bp, Macaca Fascicularis
  misc_feature (1)...(781): n = A,T,C or G
gcagacaacagcaagacgggagcgagtaaaggagggatcctgtccannncctgcgannnnatccgggagttgcgccagaccaaccagcgcatgcaagagactttcaaagaggccgagcggctgcagatggacaacgagctcctgaggcagcagatcgaggagctgaagaatgagaacgccctgcttcgagcccagctgcagcagcacaacctggagatggtgggcgagagcacccggcagtgacgcccgccgccaccgcgcagccgccgccgcccacgccggcctctgctgcccctttccccagcccttagcacagagagggacacacgcccctcccccagctgcgtttttttatagtagatttttaacaaaaaacggggagaaataatggatttctgtggatacagtgcccaccgccctcctccacttggaaacggtatcctccctccccatccgtctgtcgcccttctcccggccctcactaagccccggcacttctagtggtctcacctggaggcaagagggagggggacagaggcccttccgcgtcccgctgcctcctgctctctggaggtactgagacagggtgctgatgggaaggaggggagcctttggggggccacccggggcctggacctatgcagggaggccacgtcccaccccacctcttgtttctgggtccctgctcccctttgggtgtgtgtgtgtgtgttttaattttctttatggaaaaattgacaaaaaaaatagagagagagaggtaattaactgcaataaactc

SEQ ID NO: 4067 - DNA, 742 bp, Macaca Fascicularis
  misc_feature (1)...(742): n = A,T,C or G
cagggttttttaatactnaaaaacattatgctacatgtcattgccattttcatattttagggttttgctactcttatacaatggaatcaatgaaaatgtcatccagccactgaattgccattattatatctaaaaagtatctaagatgacagttgtcactattttatctccatgctgacatttgaaagaaggtactagtatccctctagccagagtgctcaggttttcattggtaatcaaacaacagttgtactaaaggaaagtaaagctaggacctaagtcagaatcatagttgcctgcatatatggtaacaaggttgtgttcatttgctttcacagtgatgaatgagaggatgaggagaaattatttgacatttttctgtggttgaatagaagacacctttcttttgtctttaggtttaggagaagatactaagatactggatgtttaccctatcttagtttgattggagtaataagagagaagaagagggtggactttggctttttcagtgtttttttcccctaaagggtgatattgctgatgtttctatcaattttacacataatatgtggctatgaaaacataatctcacttaagtaaaagaaaaagacaaaaatcattgtctatcactaaataaccaacaaaacagtgtaacagttttaagttcaataatgttaagtattgtataaaaatatattggaggcgaagttcagttgatgacaattgtgtatatgttact

SEQ ID NO: 4068 - DNA, 460 bp, Macaca Fascicularis
  misc_feature (1)...(460): n = A,T,C or G
ctgcatacttaaaccaagaggcaaattgtgtaggcagtccatctttcccctcacattattcctagaaagaaattggaatgtgatcttactgtagctgatcactttatagagggtaaacactgcgattagaggttggatttctgaccaagaatatggtatcaaatagaggaccagcagtatgccatagaggcaaaaacaaagatggaacagtatacctcgtatcttaaaacatgtttacgtctggccaggcnnnnnnnnnnnnnnnnnnnnnnnnnnnnnnnnnnnnnnnnnnnnnnnnnnnnccactaactgggtcaggagattgagaccattctggataacacaatgaaaccctgtctccactgggggtacaaaaaattagccgggtgtggtggtggacacctgtaatcncccggctactcgggaggagagtggcatgaacctgggaggcgaagcttgc

SEQ ID NO: 4069 - DNA, 715 bp, Macaca Fascicularis
  misc_feature (1)...(715): n = A,T,C or G
ggtaaatgaggtgcctggtaatttatctctttgcnnnnnnnnnnnnnnnnnnnagcttttgcttccactgnnttctgtagaatttgacagaacccaactatttccctatgcaaggtacagccttacaaannnnnnnnnnnnnnnnnnnnnnnnnnnnnnnnnnnnnnnnnnnnnnnnnnnnnnnnnnnnnnnnnnnntgtggttgaaggttttagttgtannnnnnnnnnnnnnnnnnnnnnnnnnnnntgccttgggcttcatgaaagcaggcccagcctggnnnnnnnnnnnnnntcactgtttttaattccacatttcctacttggtcnnnnnnnnnnnnnnnacacgtaacagattcctttatatgtagtggaagttactatttnnnnnnnnnnnnnnnnnaaagtatttaactnnnnnnnnnnnnnnnnnnnnnnnnnnnnnnnnnnnnnnnnnnnnnnnnnnnnnnnnnnnnnnnnnnnnnnnnnatgtatatccagttaactgagagaatttttactctcttcataaaactgcattaagtttttgattttgtagaaattagctttggtctaggcaactagtggttatactgtgcaaatattgtaatgaatttttacttttttgatttttgtaataaaaattggtgcagatagagaaaatgtcaaacgaacaaaccagtgttctaagagtgttactaacattttgtttt

SEQ ID NO: 4070 - DNA, 707 bp, Macaca Fascicularis
  misc_feature (1)...(707): n = A,T,C or G
ctgtcccagcattctcattnntcttatcctaattaatttttttagcccttatttacataagtattatnnnnnnnnnnnnnnnnnnnnnnntttcatggcggtnnnnnnnnnnnnaaatgactgnnnnnnnnnnnnnnnnnnnnnncattctccatatccaattagaaaaacaattatcagtttgtgacctttaccattttttgtcaaaatattagaaactctcacactctcagttacaaatgtagaggacaatgaaaatataatgaaataaatatttatttgtgcactgcaattcaaannnnnnnnnnnnnnnnnnnnnnnnnnnnnnnnnnnnnnnnnnnnnnnatcaagagtagttggaagagtgcttgcctttttcttgtatatttctgatatggagtgatatggtttgcctctgtgtctccatccaaatctcatctcaaattgtaatctgcatgtgttgtgggatgggagnnnnnnnnnnnnnnnnnncggacttcccccttgctgttcttgtgacagtgagttcttgtaagatctcagtgagttctcatgagatctggttttttgaaagtgtgtggcatttcccccttcgctctctctctctctctcttctgccaccatgtaaagaaggtccctgcttccttttctccttccaaaatgattgtaagtttcctgaggcctcccagtcatgctccctgttaagc

SEQ ID NO: 4071 - DNA, 752 bp, Macaca Fascicularis
  misc_feature (1)...(752): n = A,T,C or G
tcttaagaagcaccttcaaattcttcataatggtagccaaagcagaaatgggatatttaataattcttacatctcactcatgtagtcttctgacataacaattaagcagagatcattttctatgttcaaactttaaaaactttgtaacgataattgggatttcataacaaatgataataagtggttttgtgcattgattttcttggtacccaataacatgccaattaaaatccagacttcacactgacacctaaggaacacagcaggatggccaaagctgagtgtcagtcattgtcatagatgcaaccatcagcaatatcatcatagatctctccatcattgtctgctagataactccgaaggacataaccatatttcccttcttcatttctgcagagaacttttgtatcatctgtgttttgtataacttctagagattcaccaggttttacctgtagatctctggttccccactttttagaagttacagaagttgtaacattagttgaatataggactctaatttcaccatcatatttaaattttttcctgaagtctttttcttctttttcctgcttttttagcttcttaaggtccttttcttctgtcttagcttttccaatattagctccttgactcatctctgctgatgaaatagggaaatcagaggtatccacatcatcgtnaacttcatctcccatgtcgaattgtttaggnngagcnnnnaaacatcatcagcatcttcctcttca

SEQ ID NO: 4072 - DNA, 184 bp, Macaca Fascicularis
tatcaaggctcgtagcaaaaagaaaaaaaactccgtaactatttaatagatattagctaaagcacagctctagagagagacactcaccagacaggcccttaccatctgcagggccaccactgaggttcccaggtctggagacttcctctggtaaacattcccccagcctcccctcccctgggga

SEQ ID NO: 4073 - DNA, 501 bp, Macaca Fascicularis
atgttcacccttaaagttaccgtgtaaggtcatgatttgtaggaggattaaggcatgtatctctggaaagggcaagaacgttgcttttaaaagtctaattggttctgaagtttgatgttttttctgctgattcctttaaaatgttcggctactagagagaaaaaagtacagtaaaagaacccccaagtcggagacctatcagactgagaatatgtattttctcatgttctaaagatacagaatacctgtgtggtgtaaaatgtgagccaaaaattgtttcatttctctaagtgtgcctcccacctaatttaattacacttaattgttcttgtttataactgccttttatggtgatgttgatcattttagtccttcgatcatagcactgtatcatcttaaaagctaataatagattacttgtaacacaggctcactatgtgagaattcataaagctgtatgtacatttattattgtactcttcattgtatttataattcgaa

SEQ ID NO: 4074 - DNA, 2367 bp, Macaca Fascicularis
agaagctagctgagagcgcctgcgcggccgtcggttgagggggaggtcgggtctgggaaactaggccctggggttttccctgagcaggagcggtgcccgagggcctcaggcatcagtccaggccctgaatggctggtctccagcggttggcaccacatctgcctgtgggcgttatgcttccacataatacaacagaagctccagggccccactcagccaagcaagactcttacgaacaaagtgactcttcccagcagtccttgaaggggcacctgaggaacaatttccagaagcagcttttgagcaacaaagagttgactctggataaagtccacactcaccccaaatggaacacaaaagcccggagctactcctatccccactgtactggaatcagccaccaagatgcaggaagtgatttccagggccaaggaaatggtttgttttactcatcaggccctcaatcctggtatcccaaagccaataaccaggactttatcccctttacaaagaaacgagttggagtggaccgggcgtacccactgaaacccgtggtccacaggaagtcgtgcagtacaggtgagtctggcactgatggggaccagaatgtctacccaaggccccctgaactgagagagttttcatccaggaactttgatgtgaggaaccaggtcaacttttctgtggttgatcctgttcttgctgccatgcaggcggagaaggccttggcaaacttggacaggatggagtgggtgcagatccgaagactagaagctgcaggggagagcttagaggaggaaatccgaagaaagcagattctcctgagaggaaagctgaagaagacagaggaggaactcagaaggatccagacccaaaaggagcaggccaaggaaaatgaaaacagagagctacagaaaattatattccccaggagcagagttaaaggtaataacagcaacaccacgcacaaagctgtcttctccccagaatttgattttgaggaagaatttagtagagacaggagagaggatgaaacttgggaacggtctcaacaaaattcgagtccattccagctctctgattatagaatccagagactcaaaaggggaaggctggtagcaagcaataacaaaattcgagaccgagtctcagagccgtcgatggagaagttctccccgccttcagaaacaccaggcggtgctttgcagggatctgccagaaattccagcctgtccatggcaccagactcctcaggttccagcggctccactgaagagccacaactgggtgagtgcagccactgtgggcgaaaattcctcttgttcaggctggagagacactccaacatctgcagcaggatgcagggttccaagaggaaagtgtttgactcctccagggcccgggctaagggcacagaactagagcaatacttgaactggaaggggccagcttcagccaaggctgaacctcctcggaagaacaactggagacagaagcacgaatcttttatccatacgctccgccaggctcgagaggtccagcaggtaactgccaaaggtgaaaaccgttcacacttgcctcccatcctgcctgcagaaaacccagactacattcagtgtcctcactgtagccaccactttgctcccaaggtggctgagcaacacattcccaagtgtaagaccatcaagaaccgtcctccacctccaaggaagcattatagttgagcagacaacaatggaaacttttggataggtcagaaagctctgcttctcttcagcagtaaatgggagtagaatttgatgcaaagcagagagaaatcaaacagctcccagatctgcctgcagagttaaagtctgtgaggagagagccactgctaagcagcaggaggcagaaggaagccccagcttcccactaaattacaaccttgggctggtaagctttatgttattgccctcagaattgacgggcgaagacactgaagagtcgtgagcaggctccattaaagctctcttcttgcatgcctgacttgtggtttgtgctagtgaagtgcctgcatctggttgtgccttcctgtcactgcatgtatgttcagagttctgttaactcttgcttttgtagaagctggagttattaggatgtgttggagtcagaggggcatgatcacccagatggtaactcttatgaaagataatataattttgctgtaaggcattattaatggaaatctatccttggtctccctggtgcatgatcctggccaaaaaccaatacaagtatgtaaggttaaggcaccaatgtctcctaaaccttccctatggtgtactgtgtaataaaggaaagatctttatgtaaaaaaaaaaaaaaaaa

SEQ ID NO: 4075 - DNA, 672 bp, Macaca Fascicularis
  misc_feature (1)...(672): n = A,T,C or G
tctcaggggcaggaaccacaaaaaagggcatatgtacaagacgaacccaccgcctgcgggctccaagacacnnnnnnnnnnnnnnnaaacagaagagctgaccttaaggccggcgctcctctccctgtggcctggggctccaacgggcagacgagggccccagcccatgcctcgaggggaccgcggccctgcttcacacggtgacctcggtcttgctgttggtccttaggtaccgggacccgcggcccgcgctgcggtaaaggccgggggggtgcgggctgaaggtctcgnnnnnnnnnnnnnnnnnnnnnnnnnnncgggccgcgtgaccgggccgccgaggtacctggaaggcctgagccatcgggtggcggagcggggcggtccgggccgggcgaccggctgtccaggcggcataggggccccgcgcagcagggggcgcgtagcccggtggggcccatgggcaggcgtctaggggcgcaggctattccggggcgggacgcggggcccccgcctgagtttgccgcggggacggctcgagggcgggaaaacgctggcagaagtcccgcgggccggcctctgcggccttcatcgcggctgccttgaacgtggcgtacttggcgtanncgggctgcagtgtcaagctgcagnnaccctgcagccgcgggccgc

SEQ ID NO: 4076 - DNA, 759 bp, Macaca Fascicularis
  misc_feature (1)...(759): n = A,T,C or G
agtatgcnnnnnnnnnnnnnnnnnnnnnnnnnncttccggaaacagtcgnngtcccctccnctcaggctctgcctcggcctcactttgtctagtctaccctggacaagatgccgtgtgtttgaggcccagcagagtgagcccttggccgtgatgtatctgaaacacctgttaggggttccctccatatgtcagagcctctctgggatgaagttcaagcaagaaaacccannnnnnnnnnnnnnnnnnnnnnnnnnnnnnnnnnnnnnnnnnnnnnnnnnnnnnnnnnnnntctgtgcctcannnnnnnnnnnnnnnnnnnnnnnnnnnnnnnnnnnnnnnnnnaagcacctactgtgtgccaagnnnnnnnnnnnnnnnnctccctcagccagccttgagaaggctggaggtggcatcatcacctccgttttacagacaaagcagctgagaccccagcgaggggcggaaaccnnnnnnnnnatcacccagcaggagtcgtggcagaatggagcatcagccagaccctgttgtgggcgttgtcatcaagggagcttgaatggagggtctggtgtcagatacagccgactccagccccagctcnnnnnnnnnnnnnnnnnnnnnnnnnnnnnnnnnnnnnnnnnnnnnnnnnnnnngacatcaacagcccactctgcgtccctttctgagtcccctgcccagcactgcctagtgttggagggtagaccaaggctgtgcatgactcaccccctccttccatc

SEQ ID NO: 4077 - DNA, 993 bp, Macaca Fascicularis
  misc_feature (1)...(993): n = A,T,C or G
atatgacacacacacacacacaacannnnacattcaataagtctgcatnntccaggtccttactattcctgtcnnnnngttatatgaacacacacacacacacacacacacacacacacacacacacacactgcacatttcagtaagtctgcattgttctgggggtaaaacaggcaagaaattaaagtaagaccacatttaagtattactctgtagaatcaaaacagagtagttaacaccaattatgcaagctactttnnnnnnnnnnnnnnngggagctgacatgatcaaatccatgttttcaaatgaactgaaaaannnnnnnnnnnnnnnnnntaacccatttatttcagttccaggctgagagccctggggcatctagcagaatgcataattgtcatctggcaatagttgggactttgctcaattttaataccaatctctcctgattgcaattacctccactactttcatgatcccctacaatattttttaaaataatacatttattcactgaatcaaatgtcattaatgagttatcttctgtggaggatgactgttctctttgttaatgttcacaatcaaaatcttgggctgagaagaggcccttcaccaacgagtttgaagcatcacagcgtgtgggaaggtgggaaccaggatccccattcatttccaactgagacacagagaagtgagtcacagaatttgagccctgctctcttgactgcccagccagggacactgatttctttaatgtcttcacttaatcctgcctcttaagcattaaaacattctcctaaacctctgagtgttttgtgggttctgggtgttttgtacattttagccaagttaaccacttgtctgcaaatactgactttcctatgaattctttgaagattattgagtcagaaaggaaaaatatagccccaaattcccaggcttttaatgcgctaaccgtgtattgaaatgagaagttccttacaaacctatatc

SEQ ID NO: 4078 - DNA, 1794 bp, Macaca Fascicularis
atcttttccattaccagattttatttaattagggaacaatttcatctaaagggagaggtgtctgatcttgggaacacagaggataatcttatcattgacagggctatatagctttgtagagttcagaagtcaacaaactatctgctgcctgccccatctcactcgtcttcaatattatttcctgttattatgcctgttattctactaccaagttcagcattgccaatcttgacaagtcaacaaatgggcttagttaaagaataagttgaatattttttttggatattcattgggtgtctgatgtgtctcaagcatatatatattgtccactagccagatctagaactcctagtcttgtgacatattatcagacagcaaatgatgttgtaacattatctactaaaagtttctgttggtgttgccttaggaaactgggactaagaagactgaaaggataaatatcaagctatgtcccattcagccctcccttgttagactaaactgaaatcaccccagtgtcaggataagaggtaggtaagggccagggatactgcataagattccctcacagtacacgagaacatagggcattctaagctagaaaggacgtgggcttcctggtgttcaatatagtgggaaatcattttttgaatggtggctacatgatgctgaggtgccatttagcagaaatgtgaatctcttatggaaattatgtagtttctcaggaataaagaaaatgtgtacatttaattgaaagaaaaaaatggtagaaaatatggaactatcacaaggacccaggaagaatgaacagaataatttgggtgccctcccttgggcatattgtctagtagctggcaggctcatgaaataattgcttctggagaacatacagctgtgttgccacttatgtggcaaagctgcaagtctataccctgggaattctgtgggacctatgactacccttcagaagtctacattcattttagttacataaatgatggagaataacttttagttgtctccctggtactgcctcgactagtactctagaaataaagcattcaaaaaaagttaggttatcagtccagagcagaatccagaataagaataaaccaattacatcactgtttaattctccacataatctaactctagacaaatttgcctcacctctttcctttctcaagtgataagtgatcgacaagtaaatctaattatgttactatggtcttatccatgattttcctttgttcttaaagatgaaacatcataattgatacaacagaattttgtgtactcagacccctacagatatctccaatctcatctcctatcagacgattctttacttcctggaatccagccctatccgccttctataacaccatttactcatgttccttgctgccatcacagggcaattgcatgtgatatgttctctacctagacacctttccttctcctttttgctctttaagacaccctttagatcttggatgagtattattttcttgggaagtcttctttgacttcccagagcaggtcaaataatacttgtagattttcagaacatcctatacttacctttgatggcacttatcacatttgcattttcacatttatctatatgattcgatcaatgtctacttccctcactagactctaagcaatttgaggagggaaatcaagcctgtattgtttactgctgtatctctagtgcctacaggtgttcccggtatatagcatgtgtttaaaaaaaaaaaaaaaaaaaaaaaaaaaaaaaaaaaaaaaaaa

SEQ ID NO: 4079 - DNA, 3917 bp, Macaca Fascicularis
  misc_feature (1)...(3917): n = A,T,C or G
attctagtcaaagaaagacatcgtttttctgtgaaaggtttattgtgtttgtatatactctctagccactctcctggggaggacttgggtttctggacaggaatgcccccagcagtggggacatgaaacctgcaaacccagttagggcttgcatctgtctttcctgatcgcactgggggtcacagctctctctcttttggggttcacagtgctgtatccctagtaccaggcagccctactttccagaagagcctctcaaggggtcatgtcttttttagcctcagtattgggtttgtaggcaatctgaagattctggggtatatttaggcagaacacggttttataatatctggtcactgttgttaactcaaactactcatttcaaatagtaaagtttcctgagctgtttgctgacaaactactcaaaatgaaagtattttagacctacaacaataaaacaaaccaaaattgcccctttatatgttttatctggtgagtatgtagaacgctctttcagatctttctctttgatgtctttatcagctacctttttccatcaaagataacttttatcttcacatatcattaatgaatgtttctagaagtttgcttctcatacacatatcttgtcatttatctggaagtacatattaggttagtgcattcttccacagggctctctgatgtttgaaactattttatttccatacttttatctctggcatgtttttatttaaggaaaccaaagcagatacagacttaagaatgtgaatgtgtcaaaacttgtgattgtttgtgattgtagtttattatgttggagaaacctgtcttcatggaaacaaaattcagactttgctcaagagccgtattccccagttgatctgtgaacctggggtggagctgtcagagatcctaactgtgatccagttcagaggcaagaggatgggccaggcctgactctcctatgattttatggttggctgagccggcttaacaaacaattaacttacatgtatttttgaaacaataatcctcaattggcccagagggaggtgttgacaactcaaatgggaagaaaagcagtttagtcctgcctgcattatccacgtctgagatactttgcagaaggcattcagttccagagaatccaatctgacaacaaacaggacttggcaagtcaatctcagggatgttgtgagaaggataatttagattaaactgtactgttttgactattttctggttctatttatttttgttcaagtcattgggatgcatgagaatggtaaatgagaagtatggtgataggtgagagatcttacatattttaatgattggtttatttagaaataatttgtcatcaaagttctgttttgacagtcacaaataatgaaaaagcagaaaatgggggtgtgaggagcacatctctgctgtcaaaatctgcagagctctggaagctatggatccttcagatgtggtgagcagggctccggcagtgaggtggcaaaggagatttatttgattgcagtcttttggtttaaatgccaactcatctgagaggccttccttaaatctgctgaaatctgccccctccatagccagtctctatccatgtttaaccttcttcatagcacttatcacactttgaaaatttgttttagcttgtctgttttgtctcttcctactagaacacctgtctatgagggcagggaccttattcagcactgtgttcctagcacttaaatattatctggcacaatatagagattcaattaacactgaacattttatctttcaagacttgttcgagtgctgattcattattttttatgtttgaaacataaacaaatagttctactgcctcctgccattacagagaaaatgccaacctgccaaaagggcaccccctccgacatcctcccctgtacctatcagaggtctctgtagctcagataatgtggctcactttattgaataaaagaagagagaggatagtagatgccaacaactagacatatactacttgcttggaggagacatcttctgaagcatctctctgacatagatagcaatctctttccccctggggaacatgcgcactgttacacagcttggacattaagtttccaaaatcaacaagtccctggaagtttcttgctatttctcagtccgtgacctttggttttgctttaatgaattgtgtgttcctgctgcttggcagtaaacagggagagaggcaggatcctgggaagctctgcactccccaccgacccctcacagtgactggggcccacggaccaggcctctgatggaggccattcccaggagcccagtccatccctccccatcctaacactgcctccacccctggggcctcttttgtatgtatgagagaggaaacagaaagaaacttcacaaaaagatgatttttgtgaggtagtttaatagaagagtagacagcaaatgccaccctagggtcagctggaaaggctagttgcataagaattgcattttctttatcactttgaagacggtaggatgggaaaactcagtagcttcgtacacctcagggtccttaagagaagactgtcagtttagtgaaacatgcctggcctgttttatttagaggcacagacattgttttaataatatctggaattcctttgagatagcagagataccattgaaggttgtgcccccacctcccttggacgcagctgtgtggtcaggagagcatgtgctgccagtgaggccaattggggctaagaatttcgaggataaaacaatagatggagtttagggatgtgtgttgtttatgtataaatgggagcagaagaaaggaattttttgaaagaaaataagtactgacctctgttcaatatgctttgtcaggctggtttcagagcaaaaccactgttctctcttatcaacttgttctttccttttaaagataagcagaaatatcactccctcttcagcctaaatgctctgcttgtcttgaccagcagatgctttcaattactggcttattcccagagcagagagacgcactaaacctctgccaggtaaggtgacgcttactggatgaagcttgacttttgttctctttgtagttgcatcatttgggagatagacggttctattgtgattatgctcccagcccctaaattaatgagctaatttgggcacaaaacttgatttctataattattttggcaataagtgtactatcctatcaggataacacaacagcaccccaccttaattcaattctgtcaacttttatcaagcatcagctgtgtgtcgggccacgttttgacccttgtggaggtgagaggagattcagtgggctcttcaaggcagtagacaacaagaggcctgcttatatatgaggttactaagaagcagttgtgttcctgggttctcattttattataattcaaaatatcatttagtgagtgcctaactttggtcaggcacttaacatgaatcatctccattccttacaacagtctagttaaggagataatattagctttaacttacagccaaagaaactggcactcagagagaatgaataactttccaagtttgtacagcaagaaagcgattctgattcattgtgtactttttcttccggtagacagtaacttaggctgggcgtgatggctcaagcctgtaatcccaacactttgggaggccaaccaggcggatggatcacttgaggtcaggagtttgagactaacctggccaacattagccaggtgtggtgactcatggctgtaatccttgaattacatgcctgtaattcaaggannnnnnnnnnnnnnnnnnnnnnnnnnnnnnnnnnnnnnnnnnnnnnnnnnnnnnnnnnnnnnnnnnnnnnnnnnactacatatcaaaaaaaaaaaaaaaaa

SEQ ID NO: 4080 - DNA, 719 bp, Macaca Fascicularis
  misc_feature (1)...(719): n = A,T,C or G
acaaactnnctttagtgtctgcatgtttttccacttcctgtccccactgaggaatggaaagcaagggcacagtccttgctcatgttttggagtgaaaggaacattgaaggtcatgtgagctttgctgaggcttctcctggcctcatgtcagatacagctcctaactccaagcagcccaccatagcgtcctccttttttttttgtgatggggtttcgcacttgttgcccaggcaggagtgcagtggcacaacctcagctcactgcaacctccacctcccaggttcaagtgattgttctgcctcagtctcttgagtaacagagattacagtcatgcgccactaagggaggagaccacccctcatattgtcttatgcccaatttctgcctccgaagaaagaagtaaaaactaaaaggcagaannnnnnnnnnnnnnnngacagcccggcaccacaccctgggccnnnnnnnnnnnnnnnnnnnnnnnnnnnnnnnnnnnnnnnnnnnnnnnnnnnnnnnnnnnnnnnnnnnnnnnnnnnnnnnnnnnnnnnnnnnnnnnctgttctgtactaattactggtgcatgcagccctgtcacataccccctgcttgctcaannnnnnnnnnnnnnnnnnnnnnnactcccttagaggtgtaagctcttaagagggacaggaattgctcacttggggagctcggtttttgagacgtgagtctaccaa

SEQ ID NO: 4081 - DNA, 770 bp, Macaca Fascicularis
  misc_feature (1)...(770): n = A,T,C or G
cagacagagtgcctgtcnnngtgctgttgnggcccacaatcctcaacatggaaacttcctgtcctgcctagggatcacagctgggnnnnnnnnnnnnnnnatagagattctctaagggctgaagaaaatagaaaattgcaaaagatgaaggatgaacaacatcaaaagagtgaattactggaacttaagcggcagcagcaagaggaagaaagagccaaagtccaccagactgaacacaggagggtaaataatgcttttctggaccgactccaaggcaaaagtcaaccaggtggcctcgagcaatctggaggctgttggaatatgaatagcggtaacagctgggtgctgtgtgaagaatggaaacatgcagcaataaagacaccagtcctggtgaacctgatgcccgatggctggtgtggcggcggacagataagtatacgcccagatggcctgaagtaactgaagaatcacaaaagaagtgcaaatgccctgccccgcctaactgatgacattccaccacaaaagaagtgaaaatggccggtccttgccttaagcgatgacattatcttgtgaaattcgttttcctggctcatcctggctcaaaaagctcccacactgagcaccttgtgacccctgttcctgcccaccagagaacaacccccctttgactgtaattttcctttacctacccaaatcctataaaacagccccacccttatctcccttcgctgactgtcttttcagactcagcctgcctgcacccagggtaa

SEQ ID NO: 4082 - DNA, 3031 bp, Macaca Fascicularis
tacttggatcgttctcgctttccggtagctaaggcgatccgcgggacttcccactgagacgggcggatgttatgttgtatcagggcgaacctctgaggagcgctagctgcgcttaggccacggtgcggcaggcgccggggttctctgaaacagaaacgtttaggggtgtggaaacgtgttccggggaactgtggttttgaagtgcgatacacacctgtcttgccctgttccaagatggtggcagggcttctctgagtctctctcttccgccagtccgttggagaagcgctctttgattggccagtggacagcgtcgtggcatgacgcgctggggcgctggccaatcggttgagagctgagctggacttggcggtgggagccggggcctggctgttgcagctgtgggtgaggacggctctagctaggtgagcggttccggccaggtgagcgcggcgcccaggtgacggaggtccgagcgcacggttcccttttagactatggcgacatacctggagttcatccagcagaatgaagaacgggatggtgtgcgttttagctggaatgtgtggccttccagccggctggaggctacaagaatggttgtacccctggcttgtctccttactcctttgaaagaacgtccagacctacctcctgtacaatatgaacctgtgctttgcagcaggccaacttgtaaagctgttctcaacccactttgtcaggttgattatcgagcaaaactttgggcctgtaatttctgttttcaaagaaatcagtttcctccggcttatggaggcatatctgaggtgaatcagcctgctgaattgatgcctcaattttctacaattgagtacatgatacagcgaggtgctcagtcccctctgatctttctctatgtggttgacacatgcctggaggaagatgaccttcaagcactcaaagagtccctgcagatgtccctgagtcttcttcctccagatgctctggtgggtctgatcacatttggcaggatggtgcaggttcatgaactaagctgtgaaggaatctccaaaagttatgtcttccgagggaccaaggatttaactgcaaagcaaatacaggatatgttgggcctgaccaagccagccatgcccatgcagcaagcacgacctgtgcaaccacaggagcacccttttgcttcaaccagatttctgcagcctgttcacaagattgatatgaacctcactgatcttcttggggagctacagagggacccatggccagtaactcaggggaagagacctttgcgatccactggcgttgctttgtccattgctgttggcttgctggagggcacttttccaaacacgggagccaggatcatgctgtttactggaggtccccctacccaagggcctggcatggtggttggagatgaattaaagattcctattcgttcttggcatgatattgagaaagataatgcacgattcatgaaaaaggcaacgaagcactatgagatgcttgctaatcgaacagctgcaaatggtcactgcattgatatttatgcttgtgcccttgatcaaactggacttttggagatgaaatgttgtgcaaatcttactggaggctacatggtaatgggagattctttcaacacttctctcttcaagcagacattccaaagaatctttactaaagatttcaatggagatttccgaatggcatttggtgctactttggacgtaaagacctctcgggaactgaagattgcaggagccattggtccatgcgtatctctgaatgtgaaaggaccgtgtgtgtcagaaaatgaacttggtgttggtggcacgagtcagtggaaaatctgtggcctagatcctacatctacacttggcatctattttgaagttgtcaatcagcacaacgccccgatcccccaaggaggcagaggagcgatccaatttgtcacgcattatcagcactccagcacccagagacgcatccgcgtgaccaccatcgcccgaaattgggcagatgtacagagtcagctcaggcacatagaagcagcatttgaccaggaggctgcagcagtcttgatggcacggcttggggtgttccgagcggagtcagaggagggacctgatgtgctccggtggctggaccgacaactcatccgactgtgtcaaaagtttggacagtataacaaagaagaccccacttcttttaggttatcagattccttttctctgtatcctcagttcatgttccatctgagaagatctccatttcttcaagtgtttaacaatagtcctgatgagtcgtcatattacagacatcattttgcccggcaggacctgacccagtccctcatcatgatccagcccattctctactcttattcctttcatgggccaccagagccagtactcttggatagcagcagcattctagctgacagaattttgctgatggatactttctttcaaattgtcatttatcttggtgagaccatagcccaatggcgtaaagctggctaccaggacatgcccgagtacgaaaacttcaagcaccttctgcaggcaccactggatgatgctcaagaaattctgcaagcacgcttcccgatgccacgttacattaacacggagcatggaggcagtcaggctcgattccttttgtccaaagtgaacccatctcagacacacaataacctctatgcttggggccaggaaactggagcacccatcctaactgatgatgttagcctgcaggtgttcatggaccatttgaagaagctggctgtctccagtgcctgctaagctgaggatgcaaccaggaaattgaagagaacggtgtcagatcgtgttcaaaatgtctagaaaggcttaataacattcctgttacttttctagcagattttaacaaataatcaaggaaattttgtatgtaactctttagattataatttatttgtattcctgtctttgtcctttttcttgcactataaaattataaggtcataaatgttttggtaaaaaaaaaaaaaaaa

SEQ ID NO: 4083 - DNA, 731 bp, Macaca Fascicularis
  misc_feature (1)...(731): n = A,T,C or G
ggtgggaggtgtcagggagcagcgagagcagctggatagatcagatgagactgtgctctctggggcctggaagtcgggcacacgggttggactggactctagagggactcgggggccgttaaaggtgaagaattaatgnnnnnnnnnnnnnnnnnnnnnnnnnnnnnnnnnnnntcaggttgcacaagctcacagtcactgattagttgccggagtttgctgggtggcagtgggaggtacagnnnnnnnnnnnnnnnnnnnnnnnggctggggacccggtaggagatcactaggcaaatgctagcggggtgaggaagcacactgttgtttccaggtttctcagttccatccctcatgcgacacacccttatatcgctaactacacttccttttgttctggttcctcccnnnnnnnnnnnnnnnnnnnnnnnnnnnnnnnnnnnnncatctacnnnnnnnnnnnnnnnnncagctgaaccctcaacttcttcagaagacgagaccccctgcctaggtgatctggcctgacacccctgtggaggccccccacaagcagcaaccaagccagaaaaagctgagaccagacccgctgtccctagagatggggcccagaatgtcggggtgaagctgtaggaacagggtgaaagctggtgggcaaagagaccagctatggggtggtcaggggattccgggaggtgcatgnnnnnnnnnnnnnnnnnnnnnnnacaagg

SEQ ID NO: 4084 - DNA, 2089 bp, Macaca Fascicularis
  misc_feature (1)...(2089): n = A,T,C or G
taaatatccaaaatcttcttacattctcatttctgagcaatagttctgtcaagaacttaaaattaacatctaactgtattcacattcttttaaaacccagttaatcagcagcataatttatacttatgcctggacaaagcctcgtatgattattactttaaagataactctttactcacaattaaccagtacatataatgaatgtagggttttcttgttgctgttatcagaacacacctggataccttactagctctagttttgcagcattatcacaagtaactaattttctttttttttttttttttgnnnnnnnnnnnnnnnnnnnnnnnnnnnnnnnnnnnnnnnnagctgagatcacaccattgactccggcccctgggcaacaagagagaaattctgtctctgataaaagaccatttgtgaagtcaaaagggtggagtggtagaaaactaaagtgcaacaataatgctgaacatcaaaaagcatggaatatattattttagaagatcatcactgtgaaagttgacataagcagccaaggatataaaaaagggaaaaaaggtaaaattgtccatgtcctcaaaaaattaaaagttgagggagtttccttgtgataggacaaagatgtagaaaggctgataaaagatgggataattcttagtggatgggaacttcgagcaagggtgatgcaatagtggattgaatgtggcacccaaatatttgttgaatgaatagatggtgggtagatgtgtaaatgatggaacaccgaatctcattttatttcataaccctcaaggaaaatggtgtcagaggaaaatcaattttcccttaagatgaacagattggtagaatgaagactcaagagttagaaactttggaggggcttattctaaataaagcatagatgctattgagcacaattggtccagaatatgggcacataaagatagaattgaattgaggaaggcaggcccgacccagattgaggaggtgttttgagagttcatagcagagggttttataccatggagttgcagaaactattagagatactcatattaggaggacagaaatacattttttgtagtgtttatagcattaactccacccacctccccaattggaatataggtataatgtctaaatttatatcttcattgctaagttactattgatttacctcatatctaaggggaaaataatttctttgcaaattgcccatccaataggtcatctttagttaatgtttatataactactctaccatttttagtaatattttactatttgaataaatggaaaactagaaaatgtcaataagtcaaataaaagcatggcttatattactgtcttttttctcttaagtacatttattcaaaccacatatacttattgagtatttattatgaagcatattttatagtaggttttggagacaggaagataaatatcacaaaattcatgccttcaagaatctcatgtgttgataggagaaataaacgtgtaacaaattaatatataacttgtgatgtgagcaacaagagaagaaataataagatacagaggtagtacatttaatttaccttgctaaatatagtgaagtaagtgtcacagagtaacactatatagaaagtagccaggtgaactagagagcgatgccatttcagaaggtgcaagggacgtgtgaaaatacatgggaatcggaagtatcatgttgtgttcaagacacaacatgggatttgttatttctgaaaagtggatgtgaggagagtagcaaaagatgttactcaatacagcaggcaaaaaacagaaacatctttcatgctatgccaaggagattgggctctttcttgcaggtgtctagaggctagtaaggaaacaactgttcattggatgaaaagggcatcattgaaggattttaagcaggaaagtttcatggccatatctgttactgtgtttgttttcaatcatcatgtctgcaacgaagagaagtttgagaaaagcactaagaactaatggcaataaggctaacatttgatggctggaaactaaaccaacagggtccagggaaaaaaaaaaaaaaaaa

SEQ ID NO: 4085 - DNA, 1107 bp, Macaca Fascicularis
  misc_feature (1)...(1107): n = A,T,C or G
tcatagttattggggttagggaggtgnnnaagagataatctttctgattacctgttttgtctggatggctggttttgaggttttaaacctgacttgaaatagtaacaccaaacatgattatacaggaatattttaataagtgtatcaacatgcagatgtagaagagagcgaaagtgattgtgtttttctttagattgaatatttgaatcttatgtgtaacaaaaagaagtgggttttagttctttctgtgccctgatattttgtatattaatgaattatccaagatttgatgggatttatcagtgtgtagatagctctataatgcttgaattgtacacttctaagtgtgcagtgcaagagcttgtttatatttcatactttttatactttgaggaaaaaaagtcaaagaaaaattgtatttgagggaaaaaaccatgaccaagtaaaggataaattcaaaaaatagcctcatgagacttggcatacacactcatgggattccagttattatggagtgcttccatccctctccaccccttcccccgaaaaggttttctttgcaagtgcttttggaactaagagctagtatcttggattaactgatgcctgctagtgctttctgattacttgcattctgtttcttgctttaaaagaagagtaaagacaagagtgttggaccagtattgcagttctgtagtgttgtttcttataaaaaaacaaaacaacaacaataatttatcaaaattggcatatttaaagcctaacaacattctaataaaggcacaaatttctttttaatacttgtttcaggctctttaatctctttataagttaactaataaatctattttcttcaaacttctgcaatagttctttaaaatcacaacagttgttagcaagctgacttttttaatgtgctcaatacaaatacttgtgaacttttaatatgttgagtgctttcattttgataactggatctccatttgatattttcatttgtataactcatttgcagtctgaaaattttttttagtgccagtccctgaacataccattgaaaattaattttctttgcattttaaaatatctggattagaagaaaaagtg

SEQ ID NO: 4086 - DNA, 703 bp, Macaca Fascicularis
  misc_feature (1)...(703): n = A,T,C or G
agctgagagatgtgatttgtgtttcgtggctttctataaagacacaaggacttttcaaagacagtttctatctttccaaggcaggaaactttgcatttgcaatctcagtattgtgtccccttctgatttcaaatacatcacacctgccttcctgttttgggagcaaagatgtaattttgattccctgtgctaccatccttatttaaattatttccattctaagagatttttgttattttttttaaatgtaatctgagcactttttttgtattctaaaagatagatgctatcagataaatatattgttcatttgattaaaattatttagataaatattactatgttgacttttaaatagctttatcctattcattcattttgcaactatttgttgtgtgtagtttcttaacatgtcagagtctattatgtaaaagaaccttttcagatttctgaacagtatatgctttgattttataggctttatattatttcagtatgaataaagataaggaatatgatggacagttaactaaaatgtatctgtcgttgctaacttgaaagaaatgaagtagaaacaattggaaaatgaattagaaattattcaagtgcacatcttttctaaaaaccaatgactataaggcaaacaagtttgattgcatgtggtattttttgctctcnnnatatgctttttgaacaagttatt

SEQ ID NO: 4087 - DNA, 697 bp, Macaca Fascicularis
  misc_feature (1)...(697): n = A,T,C or G
gccccagagcccagctggcnnncaagnnnnncggcccccgagcagcaagaggacgaggacagcctggaggaagactcgcctcgggccctgggctcgggtnnnnnnnnnnnnnnnnnnnnnnnnnnnnnnnnnnnnnnnnacgagcaggacatcttggctcctcagaccgcgcagtgtccagcccaggccccagcaggcagcagtgaggagaccatcgccaaagccaagcagagtcgcagtgagaagaaggcccgaaaggcaatgtcaaagctgggcttgcggcagattcagggagtcaccaggatcaccatccagaagtccaagaacatcctctttgtcatcgccaagcctgatgtcttcaagagcccagcctcagacacttatgtggtctttggcgaggccaagattgaggacctgtcccagcaagtgcacaaagctgcagcggagaagtttaaggtgccctcagagccctcggccttggtccctgagtcagcacccaggccccgggtgaggctggagtgcaaggaagaggaagaggaggaggaggaagaggtggacgaggcggggctggaactgcgtgacattgagctggtgnnnnnnnnnnnnnnngtgtccagggccaaggccgtgcgggctctgagagacaaccacagtgacnnnnnnnnnnnnnnnnnnnnactgaccatgtagccactga

SEQ ID NO: 4088 - DNA, 605 bp, Macaca Fascicularis
  misc_feature (1)...(605): n = A,T,C or G
cagcttaccttcctccccttctctcctgatgaagtgtgaggttcttaaggcctttcctttctcccctcccccttagcactaaacatagggcttagaaactaacagatgttcattaaataaatcttttgaacaaatacctgaaattttgaacaaagctcctcttgcaatgaggctcttttaaaatcatggtgaaatacacataaagttagcatcgtcaccatttctcagtgtacagttccgtggcattgaggacattcctactgctgtgctgtcgtcgctaccatccagctgcagaagctcttcatcttgccagacaaactctatacacgttaaatgacaactccccgttctcctctcccattaaactcctggcggccaccacttcttttctgtttctgttaaattgactaggtacctcatataagtggaatcatacagtgtttatccttttgtgactggcttatttcactcagcataatgtccccaaggctcatccatgttgtagcatgtgtcagaaatttnnnnnnnnnnnnnnnnnnnnnnatattccattgtgtgtataagccacgttttgttgacccactcatccatcgatagacacgcaa

SEQ ID NO: 4089 - DNA, 709 bp, Macaca Fascicularis
  misc_feature (1)...(709): n = A,T,C or G
caacctacttaggagctggttttggtcttccnnnnnnnnnnnnnnnnnnnnnnnnnnnnnnnnnnnnnnnnnnnnaagttacaagtacagctggttctggttaatccannnnnntcctgatacagagctgtggtnnnnnnnnnnnnnnngtccctagccccaaggctggagggagcttaagtgagaatctggttgctctgcctccaactgctctcaagcccagcgtcctacttgttggtcactgctcatgtacataggactgatctgcttgagaggcattaggatttacagcataggaagcccaggaagggtcagaggtggccacaccctcccttcctctgttctttttctcaagtggtaaaagtgttttggcacatgtgacacaccctttgggcacctacccaagagaagctctcaataatgaacagtgatctcgattagtcttaatttagcatctgacccagctgccctcacctcctttgtacttaaatagctcctttcatccagcaagttcaaagctgtctaacaaaataaacccacttattcttgcaccatgnnnnnnnnnnnnngcattgtccttcccatttaagggagagagagaaggtgagtcattcagtggttgagggattctgctggtgacataaagtgagtcagtggggtcccagggtgattgacctgtgtttcttaagttcacatcccagtgctctct

SEQ ID NO: 4090 - DNA, 417 bp, Macaca Fascicularis
  misc_feature (1)...(417): n = A,T,C or G
ggctggcttggcgagaggctctacagagtgaaggtttaaatccaagnnnnnnnnnnnnnnnnngnnnnnnnnnnnnnnnnnnnnnatggtacaggaagggaacgtggaaggtgcatacaggatcctaaacagaatnnnnnnnnnnnnnnngctcattgaggannnnnnnnnnnnnnnnnnnnnngagaagccatgccgccggcgacagagggaaagctatgaaaggtgccagcggatctacaacatggaaatggctcgcaagatnnnnnnnnnnnnnnnaaagaatcgggnnnnnnnnnnnnnnngctgctgaggcctgtggatgggacacccagtgcgaaaccctcatccagttttgtctccatctcttttctttgtacaatcccatttcctaaactcaaatcacagnctgcaaaa

SEQ ID NO: 4091 - DNA, 2352 bp, Macaca Fascicularis
ctctggttgagccatgttctttctccttgcccttctcactgagcttggaaggctgcaagcccacgtaggttctgaaggaatatttctgcatgtcacagttccaaggaagattttgtcaaatgacagtgaagtttcagagaggaagatgatttacatcattacaattgatggacaaccttacactctacatctcagaaaacaatcatttttaccccagaactttttggtttatacatataatgaagctggatctttgcattctgagtctccatattttatgatgcattgccattaccaaggatatgctgccgaatttccaaattcatttgtgaccctcagtatatgttctggtctcaggggatttctccagtttgaaaatgtcagttatggaattgaaccattagaatcttcagcaagatttgagcatataatttatcaaatgaaaaataatgatccaaatgtatcaattttagcagaaaattacagtcatatttggcagaaagaccagtcctacaaagttcctttaaactcacagaaaaaaaatctttcaaaactattacctcaatatctggaaatatacattatagtggaaaaagctttgtatgattatatgggatctgaaatgatggctgtaacacaaaaaattgtccaggttattgggcttgtcaacactatgtttacccagttcagattgactgttacactgtcttccttggaactgtggtcaaatgaaaaccagatttccaccagtggggatgctgatgatatattacaaagatttttggcgtggaaacgggactatctcatcctacggccccatgatatagcatacttacttgtttacaggaaacatcctaaatatgtgggagcaacatttccaggcaccatatgcaatgaaagctatgacgcaggtattgctatgtatccagatgcaatagatttggagggattttcggttattatagctcaactgcttggccttaatgtaggattaacatatgatgacatcactcagtgtttctgtctgagagctacatgcatcatgaatcatgaagcaatgagtgccagaggtataaagatttttagcaactgcagcatgcatgactatagatattttgtttcaaaatttgaggctaaatgccttcagaagctttcaaatttgcaaccattacatcaaaatcaaccagtgtgtggtaatgggattttggaatccaatgaagaatgtgactgtggtaataaaaaggaatgtcaatttaagaagtgctgtgattataacacatgtaaactgaagggctcagtaaaatgtggttctggaccatgttgtacatcaaagtgtgagttgtcaatagtgggcactccatgtagaaagagtgttgatccagagtgtgattttacagagtactgcaatggaacctctagtgattgtgttcctgacacttatgcattgaatggccatttgtgcaagttgggaactgcctattgctataatggacaatgtcaaactactgataaccagtgtgccaagatatttggaaaaggtgctcaaggtgctccatttgcctgttttaaagaagttaattctctgcatgaaacatctgaaaactgtggttttaaaaattcacaaccattaccatgtgaaaggaaggatgttctctgtggaaaattagcttgtgttcagccgcataaaaatgcttataaaagtgacattcaatatacagtttattcatatattcaagatcatgtctgtgtatctatagccactgggtcctccatgagatcagatggaacagacaatgcctatgtggctgatggcaccatgtgtggtccagaaatgtactgtgtaaataaaacctgcagaaaagttcatttaacgggatataactgtaataccaccacaaaatgcaaagggaaagggatatgtaataattttggtaattgtcaatgcttccctggacataaacctccagattgtaaattccagtttggttccccagggggtagtattgatgatggaaattttcagaaatctgatgaattttatactgaaaaaggctacaatgcacactggaacaactggtttattctgagtttctacattgttctgccgtttttcataattttcaccattgtgatctttaagagaaatgaaataaggaaattatgcaacagagagaatacagagttaattcatccgctgtatcagaaagctatgatgtggaacattaatattgcacagaacttccgtagcaaataaactaaaggaacaaatgtgctttataaccttatgttatccccgaatgcattgtaaatgctaaacttttggaaaataaagcctgcgtgccttccaaaaaa

SEQ ID NO: 4092 - DNA, 766 bp, Macaca Fascicularis
  misc_feature (1)...(766): n = A,T,C or G
tggacaaccgcatgcagctggccagannnngctatgacccagattttgagaaactgaagccagaatacctggagggacttcctgaaatgctgaagctctactcacagtttctggggaagcagccatggtttcttggggacaagatcacctttgtggatttcatcgcttatgatgtccttgagagaaaccaagtatttgagcccagctgcctggatgccttcccaaacctgaaggacttcatctcccgatttgagggcttggagaagatctctgcctacatgaagtccagccgcttcctcccaagacctgtgttcacaaagatggctgtctggggcaacaagtaatgcctggaaggccaggaggtgggagtgaggtgcccatactcagccctctgcccaggctgtggagcgcagctggactctgcatcccagcacctgcctccccattgctttctcctgtttattcccatctttacccccaagactttattatccccacttcacttcccctaaacccctgtcccatgcaggccctttaaagcctcagctacccacttttcttcatgaacatctccctcccaacattacccttcgcggcactaaagccagcctgaacttccttcctgttagtggttgtgtctgctttgaggggcctgcctagcccctcgcctgtggagctcagccccaagctgtacccgtgctgcatgatagagcagcattgactggtttacaggccctgctcctgtaacatggcccctgccttaggc

SEQ ID NO: 4093 - DNA, 724 bp, Macaca Fascicularis
  misc_feature (1)...(724): n = A,T,C or G
ttgccnnnnnnnnnnnnnnnnnnnnnnnnnnnnnnnnnnnnnnnnnggaccgggagaaccccctgtacagccatggcttcatnnnnnnnnnnnnnnnnacggagctgaatgatgaccgcaccccatnnnnnnnnnnnntnnnnnnnnnnnnnnnnnnnnnnnnnnnnnnnnnnnnnnnnnnngccccggagttcaacagctccgagtacagcgtggccatcactgagctggcacaggtcggctttgcccttccactcttcatccaggtggtggacaaggatgagaattnnnnnnnnnncagcatgtttgaggtgtatctggtggggaacaactcccaccacttcatcatctccccaacctccgtccaagggaaggcggacattcgtattcgggtggccatcccacnnnnnnnnnnnaccgtggaccgctacgactttgatctctttgccaatgagnnnnnnnnnnnnnnnnnnnnnnnnnccaaggtgaagatcactctcatcaatnnnnnnnnnnnnnnnnnnnnnnnnnnnnnnnnnnnnnnnnnnnnnnnnnnnnnnnnnnnnnnnnnnnnnnggacctctgtgctgacagtcttggtgagtccccgctctcccacagggctactgagctctccggggcnnnnnnnnnnnnnnnnnncagagggattttgtccaagggacctgggcaatcagggaaggaggcgcccccaaatccctgagct

SEQ ID NO: 4094 - DNA, 885 bp, Macaca Fascicularis
  misc_feature (1)...(885): n = A,T,C or G
atgggaatcctgtcattcttacctgtccttgctactgagagtgactgggctgactgcaagtcctcccagccttggggccacatgcttctgtggacagctgtgctattcctggctcctgttgctgggacacctgcagctcccccgaaggctgtgctgaaactcgagcccccgtggatcaacgtgctccgggaggactctgtgactctgacgtgcgggggcgctcacagccctgacagcgactccactcagtggttccacaatgggaatctcatccccacccacacgcagcccagctacaggttcaaggccaacaacaatgatagcggggagtacaggtgccagactggccggaccagcctcagcgaccctgttcatctgactgtgctttctgagtggctggcgctccagacccctcacctggagttccgggagggagaaaccatcttgctgaggtgccacagctggaaggacaagcctctgatcaaggtcacattcttccagaatggaatatccaagaaattttcccatatgaatcccaacttctccatcccacaagcaaaccacagtcacagtggtgattaccactgcacaggaaacataggctacacaccatactcatccaaacctgtgaccatcactgtccaagtgcccagcatgggcagctcttcaccgatagggatcattgtggctgtggtcactgggattgctgtagcggccattgttgctgctgtagtggccttgatctactgcaggaaaaagcggatttcagccaatcccactaatcctgacgaggctgacaaagttggggctgagaacacaatcacctattcacttctcatgcatccggacgctctggaagagcctgatgaccaaaaccgngtttag

SEQ ID NO: 4095 - DNA, 617 bp, Macaca Fascicularis
  misc_feature (1)...(617): n = A,T,C or G
acttggagttannncagctannntnnntctgaagaaatgcttgtgaaacacggcttctcagcaccctgctaaaacatctccgttttcaagtcctggtctgtccccaacagtaccatcgtgacgatgcagcctccaagcagctttgacgtcagagccagcgttcctgtgggcctgggggcagggggtcgtggtgctcacggtgtcctggctgctccacaagaaagacacaagcagcacacagctcacactgcgctctctcggaaggaggagaccttacctgtgggaaaaatggagccacagcagccacatgacagggcgagcattctggttgacaggggccagaccgtacttactgctagggtctggtgacctggggacagagaacaggctggagccctcccaaaattaggcactctgtgaggaaaagaaaatgaaactgtcccttccacaaggctacaaggacatctctctccaaaaaccatcttcttccccccagggaaatattttggtggaaaccctgccagggagcaacattctctagcagtaaccagagggccctgggaggcacccgaagtcattcgcaccaggagccaggattccttagagagagctgcaca

SEQ ID NO: 4096 - DNA, 721 bp, Macaca Fascicularis
  misc_feature (1)...(721): n = A,T,C or G
cgcaccaaaggcacatcgcgctgtctccccgctacctgaacaggaaacgcactggcannnnnnnnnnnnnnnnnnnnnnnnnnnnnnnnnnnnnnnnnngccttttaggtgtccctattgcatatgataacatcaaagttgtgggagaacttggagatatttatgatgatcaaggacacattcatcttaacattgaagctgattttgttattttctgccctgaaccggggcaaaagcttatgggtatagttaataaagtgtcttctagccacattggctgtttagtacacgggtnnnnnnnnnnnnnnnnnnnnnnnnnnnnnnnnnnnnnnnctgagcagtggctaaccatggagataaacatgggtgatgaactagannnnnnnnnnnnnnnnnnnnnnnnnnnnnnnnnnnnnnnnnnnnncattcggggaaaactaaatatcacaannnnnnnnnnnnnnnnnnnnnnnnnnnnnnnnnnnnnnnnnnnnnnnnnnnnnnnnnnngctgctaaaaaacctaagaagaagaaaaagaagaaagacccagagacatatgaagtggacagtggtactacaaagctagcagatgatgcagatgacactccaatggaagagtcagccctgcagaatactaataatgtgaatggcctctgggaggaggagccaaagaaaaagaaaaggaagaaaaagcaccaggaagttcaggaccaggaccc

SEQ ID NO: 4097 - DNA, 675 bp, Macaca Fascicularis
cacacctgaagtttctgctatgattagcgcccctccatgttatctgaaaagtctatcactaagcaaaaactgacagtacttcaagtagtaattgacaaatttgtgatcagagtgggagctttaacttgtctttcttagtaattgatagatcgaacagccaaaaaattcagtaaagttataaagatttgaacaagattattaacaagtttgatataaaagacttatgtagagcactgcactcaaccactgaggaataaacattcttttgaaaatcacgttacctttacaaaaactaattgtgaattagggcataaagcaaatatcaaatctcaacaaagtcacagaataagtatcatgagaccacaacacaattaagttagaaacaagttaaaattataattaaaaatcttcttatatttagaaatttaaaacacatcgcttaaaaatccatatagacagaaagcagactggtggttacaaggggctgggaggagaggggaattactgcttaatgagtcgagggttttcttttggcgtgatgaaaatgggttagaactggatacaggtggtagatacataacattgtgaatgtacttaattccactaaagtatgaattatatattataatccgattcactctatgctatgtactatgatactggatttctccctta

SEQ ID NO: 4098 - DNA, 763 bp, Macaca Fascicularis
  misc_feature (1)...(763): n = A,T,C or G
tagaggaaatgccattatggacccaannnnnnnnnnnnnnnnnnnnnngtttnnnnnnnnnnnnnnnnnnnnnnnnnnnnnnnnnnnnnnnnnnnnnnnnnnnnnnnnnnnnnnnnnnnnnnnaatggatgcactgaccctgaagattaaggccagaggggcagactgactagaannnnnnnnnnnnnnnnnnaatgccatggtgcccacctatgaaaccctgaggtcgcaggacaagaagaacagcattctagagggcttnnnnnnnnnnnnnnnnnnnnacctgtagtgatagagaaatgtactctccgagaagtgcttactcacccttttccaaaggagcagaggtgttgnnnnnnnnnnnnnnnnnnnnnnnnnnnnnnnnnnnnnnnnnnnnnnnnnnnnnnnnnnnnnnnnnnnnnnnnnttgagggtatctgctgccgggtgccctcagggtaggagagtgggaagtacacgccaagctggaaagtgnnnnnnnnnnnnnttcctcnnnnnnnnnnnnnnnnncattgcaaccttgtatgtgaattctaatgggtttgaatgggggtcaggggtgcatggggaagttgttctgtggacctgtgggacacagggatcttggactcactggcagagaatccattnnnnnnnnnnnnnnntgtcaactgcgttgttgaggacatttcttgatgtgtgagtgtagtctgggtggnnnnnnnnnnnnnnnnnnnnnnnncgtttgactatgtagtggacca

SEQ ID NO: 4099 - DNA, 753 bp, Macaca Fascicularis
  misc_feature (1)...(753): n = A,T,C or G
caaaataccagttttattccaaaaataaagagaacaaaccccagaatatgaagtgcagattgtaacatggagctatttttttcctaatccagtaatacagctcctaacagttgtgcgggatttgtgttacgtaaacagccatgtgaattctgcaagaaacaccagggaaagtttagagatttgtggcaatggaccgaagaacaggccaggaagtcctccgatttcctttggtctttccaggagattggactacatattgtaaagactgggtttcagctagtcaaaaagcactttcttctgttttcaatgcctgatcaatttgtgcttctgtgcttgtcggagagatggccagggtggcagccctcatgcaggttgaagtacatgtaaccccagcctgatattcttggtgtgaaggtcgaaaagaaaatcgaaaaccattggcctgggtgagggtgtggccaccaagacataagtgttgtgcccctgtgctcaccctgtgtatttatactgtatatgtagagtctagatttatatactgcaatgtaaaatatatatatatatatatatatatttaccttttttaaagacaatggaaatcccaagtagctaaaacttagcctcatttatttaatgccactttaaattgtcttaaatttgtttcctggtggacagccngggtaatgcttttagctgctcgcatgcttgtctttctgcatctccatcatctgtttaccttttggttaaactaataaa

SEQ ID NO: 4100 - DNA, 2014 bp, Macaca Fascicularis
  misc_feature (1)...(2014): n = A,T,C or G
ttggggatgcggaactggagatgaggttctttctaaaagagatgccacagaaaacagtggttgcatttattcctgtcaccaaggaaagatttcacatgacatagtttaggtagagactgacatggatgtatttggaagtgtcaacacccaaggggataaggtaatcagccctgtccaagagagctttctgatgacaatgatccgtatctgcactggctacgtgtggctaccaagtgcttgaattatggccagtgcagtgtaagaacagaatttttaattgtatttaatttaagttgatttaaatatacatagccacatatatttacatggtgtctgatgataactatatcatacagcacagttgtagacaaccgacttttccctatggcacttcgtttgggaagagaatagtttgggaagagaatattttggggagctgtgtttcagacatgatgctatgtgctttctcttacagaataatcttgtttaatctccacgagtttgaggactaaactgggtgccagagagaagttaagtaacttgctgaggttgtgtcagtaacaagggagcagggaagagattcaagctcaggtatggcccacccaagtactgcttgtgcattccacaactggggagactctaatttacttaagggtttagattacggcggcaaagtgaattaagggccaggaaatgtggctttgtgattaggtaagttgagatatttcacttcaagagaagaatactgaagaagtcactcgatatttagaactatattcaaagatcatttccttttcttttttttttctttggatggagtctcgcactccatctaaagtcgcccgggctggagtgcagtggtgtgatcttggctcannnnnnnnnnnnnnnnnnnnnnnnnnnnnnnnnnnnnnnnnnnnnnnnnnnnnnnnnnnnnnnnnnnnnnnnnnnnnnnnnnnnnnnnnnnnnnnnnnnnnnnnnnnnnnnnnnnnnnnnnnnnnnnnnnnnncaaactcctgacctcaggtaatccacctgcctgcctcggcctcccaaagtgttgggattacaggcgtgagccatcatgcctggcctcaaagatcatttcttagagaagaacagctggctgtctctgtcaccattaatgaaagcttcactttattctggtttacgtaggggctatggaagaatgtgataaagtcttgtttctgacatgggcatttctcttcacatctcagggagcctggttggacttcaggcccctgtgaggctgactctgtagtcctggagaaactcaacagccaggaacttaggaccatttgtgtgtggcatttgggctaaccagattggtggcttctaaagaagatggaaagcatcaagtttcctatatttaaattatttggtgatctcaatactggttgttagccaaagtacacaatggagacagcctatttgctctactacttttgatgtagaaatattactaagcttgagctgattaatagaactgttacacatttctgtgctccccttaccggtagcatgaaacaattcttttaaaacctgccatgtgttcacatttaaaactaaaagtaatttagattacatggatttgagaagcgcatgttgacacataattgccaacagatgggttttcaaatgtaatgaagtaaaaatggtcagtaccccatgtgttggattttgcaattttccaaagtaagccctcagttttggcatgtcatgctagttaagaacacaatgtatttatagctcaattatacattttctgatgaatttggcatggtattttgtttttccatcagtcacttaagacaggacatttgccattccaagaatgaattaacactcttctaagtgatctataaactgagatgtaaaataaattacaaattgggactgttttagttttccaagcaaagggtatttaaataaagcttgaaatcataaaccttaaaaaaaaaaaaaaaaaaaaaaaaaaaaaaaaaaaaaaaaa

SEQ ID NO: 4101 - DNA, 748 bp, Macaca Fascicularis
  misc_feature (1)...(748): n = A,T,C or G
gctcactgcaacctccnnnnnncgagttcgagcgatcctcctgnnncagccccccgagtagctgggactacaagcgcccgcgnnnnnnnnnnnnnnnnnnnnnnnnnnnnnnnnnnnnnnnnnnnnnnnnnnnnnnnnnnnnnnnnnnnnnnnnnnnnnnnnnnnnnnnnnnnnnnnnnnnnnnnnnnnnnnnnnnnnnnnnnnnnnnnnagctcatatcttaatgtcttagtccatttgggctcctataagaacatactgtaaaccggtcgggcccggtcatcctgccctgtgactggatgacctcccaaatgccccacctaataccatccccttgcaggtgaggacttgagcaggtgggttttgggggcacgtgttcaggccacagcagggtggatgaagagccagtgagccttactgagctccnnnnnnnnnnnnnnnatgacactaagcccagcattgaagatcaaggcaggtgtggctttgggatgtgaagtgggttctgacgcagggccccacagacctgtccccgagtgagccgcctgcaggcccgtgtcattcctcagctgcgtgcaaagtctctggctcagagagcctccccgctgtgcccagttctctctgccagggcagggcttggggcagcaccaggctggggcagaggatgaaagcaagaggaccgaacttctggaagggcagtggagggcggctgaggatttccccnntgtannnngtgtgtgttcatctaccc

SEQ ID NO: 4102 - DNA, 715 bp, Macaca Fascicularis
  misc_feature (1)...(715): n = A,T,C or G
ccnnnnnnnnnnnnnntacaggcacgagcaccaatgcctggnctcattcacattatgtggaatcatgggataggactaatggctttcatctctccatatggatctacttgatgaaaggcaagataagtaaagaagaaattcagccctccaaagggaggggctggattcagaaaaaaaaagggggcaaaaaacccaaaggagtgaagacataaagnnnnnnnnnnnnnnnaacaaaaacagtaggaaaaacttatcattgatacccttggacattgctcactgtgacccaggtccttgcatcaaatgttttcacaatatttgacatctaatgaacaatcaggggccaagagaaatcttaacaaaaaagaattnnnnnnnnnnnngtatcaaatgttatttttgttgttttgnnnnnnnnnnnnnnnnnnnnnnnnnnnnnnnnnnnnnnnnnnnnnnnnnnnnnnnnnnnnnnnnnnnnnnnnnnnnnnnnnnnnnnnnnnnnnnnnnnnnnnnnnnnnnnnnnnnnnnnnnnnnnnnnnnnnnnnnnnnnnnnnnnnnnnnnnnnnnnnnnnnnnnnnnnnnnnnnnnnnnnnnnnnnnnnnnnnnnnnnnnnnnnnnnnnnnnnnnnnnnnnnnnnnnnnnnnnnnnnnnnnnnnnnnnnnnnnnnnnnnnnnnnnnnncgtgcccagcctcaaaacgttacattggtaataac

SEQ ID NO: 4103 - DNA, 2022 bp, Macaca Fascicularis
agatccggggggtgcagataaatggccgtaggcaggtggcggcgtgatgtcgcgttttgctgttggcgtaggtgtgcgtccgacagcgtctcggtcccagtgtcgaggttctttttgctttgctacccggagccgactacgaaggaggacacctgcgtttctgtctcctccatctgttaccgcagctgcctgggtcccgcacgagagctaggtgatacttaactctgccctcagcgttttgagcactgttctcataatggagtttcctgatttggggaagcattgctcagaaaaaacttgcaagcagccaggactcctctcacccacagggttcccctcacccacaggacgccccacccacaggactccccacccacagaaccccactcacccacatggcagtgaggacaggcgggctgggcagtgctcacaacaggctcagggccctcacctgtgctgagcctgcaatcttcagacctgggcctgcacattgatggaggcatctgggcttgactgccctgcctgaccctggaaacacgtgtctgggagggggtctctggactaaaccctgcctggccctgccctagccacagcgccggcttcgctccgtccggcagctgcctgatgtccacaggccccagtgcaggagcaaggttggggcggggcggttgtggtcccagggagccgcccctctggcagccgggagctgctcatccccaggcccactgcccccttgtgagggcctggacttaggagtgttcctcaccatcttcccattttcatacggaaagtacatcgtcaattaagttgctccgtttcttcccagagaaactcgtttcatcctccctcccctgtaaaatccgtgtgacccgtggggcgggggagcccatggggacttgggggcagtcgtgagccgtggggtggccacggtaagagtggcgtccacgagcttcctgggcaggcagcagcagggcctagggttgtggctcctcaccttgggcaggggaggggctccaaaaacccccttcacccgaggccttggtgtttagcgcctggtggggctccgtctcctgagatgaggcgtcccagatctgtcagggcagacaggcacccaggagtcttctgcccagcaccctgagatgtttgtcttcctttccctagatgggcccaaaagcacaagaactggaggtttcagaagacaaggcagacgtggctcctgctccacatgtatgacagagacaaggttccggatgagcacttctccaccatgctggcctacctggaggggctgcagggccgggcccgcgagctgacggtccagaaggcagaagctctgatgcgggagctggacgaggaggaccccgatcccctcctgccggggagggtccagcgcatccggcaggtgctgcagctgctctcctagcgggttcagcgcgggacggggccactgcccagcgcagggcggcctcggaccacacagggtgcagctcctccggcagtgggggccaggatcaccagcaccagagcctcacaagggccccttctgtcctccagaccctccttggccggagacagttgtgacagtgacgacgggttcagtgccttcagcacagagcgtggacgctctggaatcacccagatacctggccttggaggggccctggagccctgggaatctgcttgggagggaaatgtctatttttccagcaggaatattttagagattgggccacgctggctcctcctgccagctgcaaacctgcaccttccgcctgattccccatccccctgcgtgggctgcattcctggtcccctgcccgcgtccatccaggggcctggctgttgcctgttttcctttgaccccacacagcctcagtgctggtcatggggagtccctgctgggggcttgtggagtcagatcacatacctgtgcagaaaccgtctctgtggccgcatttgaaataaaacacgacccaccaggggccgtgggtcctgctcaaaaaaaaaaaaaaaaaaaaaaaa

SEQ ID NO: 4104 - DNA, 710 bp, Macaca Fascicularis
  misc_feature (1)...(710): n = A,T,C or G
atgggaaatagtccatatgcannncagagacccttgaagtggcatccgaggaggcgtggtcacggggcaggcgaccgacaccagtgagtccagaaggccagcgtgtgcgccgctgcatgtctccagaaacttcaggaaacagacaccatgcccgagnnnnnnnnnnnnnnnnnnnnnnnnnnnnnnnnnnnnnnnnnnnnnnnnnnnnnnnnnnnnnnnnnnnnnnnnnnnnnnnnnnnnnnnnnnnnnnnnnnnnnnnnnnnnnnnnnnnnnnnnnnnnnnnnnnnnnnnnnnnnnnnnnnnnnnnnnnnnnnnnnnnnnnnnnnnnnnnnnnnnnnnnnnnnnnnnnnnnnnnnnnnnnnnnnnnnnnnnnnnnnnnnnnnnnnnnnnnnnnnnnnnnnnnnnnnnnnnnnnnnnnnncatgcccagcttattttattctcttctatgctattgtaaatgggatgtctttatttatttattggattgttcactgtttacggaaacacaactnnnnnnnnnnnnnnnnnnnnnnnnnnnnnnnnnnnnnnnnnntcatttattagttttaacattttgtggaattttgagggtttcttaacatatgagttcatgttctctgctaacaggtaacattttacttcttttccagtctggatggctttttatttctttttcttgcatattttttctggctaggacttaagaac

SEQ ID NO: 4105 - DNA, 726 bp, Macaca Fascicularis
  misc_feature (1)...(726): n = A,T,C or G
agggaggcatgaaaggaagaggaatgaggattgagacatgtgaagacattatgcattttatcaatgtgcattcctgtatttcagtaaggtacatgcagtagtctaaagaaccagagtcattactctagtggcttacatttactgtctccaacattttagccaagtgacacttgaggtttttatctaggcatttcacttaaatgaacaaatcatggctgttatattaacttgaaataaaatatatttaaacatgtagttaacatgcgctttctcatcatgaaatataaaggtgcccaaattatgggtatcttaagttgatttttttttgaaaaattggttgtgtgaatccagctcttgcttatggctgagaatgttcctaaagttcatttcactatcccttaatcctcaatagctacacatagcccctcgcctagtgttgcactgctttacaactcttaggcaaattacctaccataagctccacagaagagttttttaaaacttaaaatccctgtcccaccagctgtgnnnnnnnnnnnnnnnnnnnnnnnnnnnnnnnnnnnnnnnnnnnnnnnnnnnnnnnnnnnnnnnnnnnnnnnnnnnnnnnnnnnnnnnnnnnnnnnnnnnnnnnnnnnnnnnnnnnnnnnnnnnnnnnnnncatgctctactaanaataaaaatcagccaggtgtgaaggtacacacctgtaagatcccagctactact

SEQ ID NO: 4106 - DNA, 414 bp, Macaca Fascicularis
cccgggaccccgggaccaggaccgctttccttgcccttgtaaatgtttataaattaactcttcccagtccgaactatgctgccagtgtgcgcggggaggcgcgccggcgctgagttagccgcgagtcgccagggccgcccgggttgccgctccatgcccttgttccaaggtttgcaacttcgattttgcacaccgctccaccgtgacccccagcgcacacccgttcacactcacgccaacactctcgctgaacacttttataattgttaggcgtggccgttgggacttggggcgcagcgcagctgctgctgctgctgcgtctggaggattgatatttatttttgcattgagatgactgaaggcgtttatttaacgatctttttacctggatatatgtctgtgaggctcctgaaa

SEQ ID NO: 4107 - DNA, 748 bp, Macaca Fascicularis
  misc_feature (1)...(748): n = A,T,C or G
acatgtctgctgagaaatcattttaatacanttagcttcattttaaaaatattagtattagtaaaaaatggtatttaggtagaaggtccaaccatttttaataagtagctttcaactctgagtccatttcctccagtaacatggctaagtatgaacttaacagtattttggggggtgtaaaagaactgaaatgacaggaaaataagaaatgagatgccaagatttgcctgtgagaaagaactgagtattactattcgaaacagcctttttctcacaggaagacaaataccacgtgatctcacttatatgtggcatctaggagagttgatctcatagcagtagacagtagaatggcagttaccagaggctgggaagggaaaaggtggggaggcaaagatggggagaggatggtctcaagggatacaaagttagttagatgaactaagaaaagtgctgatgttctattacatagtggggcgactacagataataacaatgtattatatttcaagataatttcaaaagtgggccttgaatgttatcaccataaagaaatcgtaaagatttaagacaaaggacatgctaactaccatgattttatcattatacaatgtacacatgtactgaagcatcacactgtaccctaataaacatgtacaattattatgtgtcaattgttttttaaaaaacggtgnaaaaaaaatctagcttgtttctgataccattagaactggaattttattattct

SEQ ID NO: 4108 - DNA, 2315 bp, Macaca Fascicularis
acgattgcctcaaatcttttttaaaactggtgtttatatatcaaatcatcagtttgctaaactcaactttttccacattagatgcatctgtacctcatctaaaagcataccatactcaacatgtcaatttagcctgaatggtatagaaaaggctaaaaaattgagttcccactaggtacttcagagcattttaaattcatattacttcatattctaatggttcaatcttccaatacttaagccattatattttcagcactaacaacagttaaaatggtatgagtaaattaaatcccgagggggtcccacctgcttattatattgaatggatatagataaaatacctactcaacgtgatccttgtgcttgttagacaaaaggttagtgcaatgtttaaaaaaagaaaaaacagcttgagttttactttcaattcaaaacaaacatagcagggacctcagtggcctccaagtatgtctgataaactggataaaacatgtcttcaactgctttggacttgaaatggacaaagtgaaccacaaagtgaccaatacaaaaacctaatactttttaagccctcttgatattccaagactgccaaagggtattccactctcattgtctagatcagcatcacagtagacctgttcattaaaaatcaccctatctagaattgatgcaagttactgcaatgaataatttgtagtgcatttagggtgaagagtgcttggtgcatgattagaatactcagtgaccgttaacttggcaagtgttcagacatacgatagtgcttctaaatcacaaatcacttggtcctctcccccaggagaggccatagggagacctcattctcaaacttgactggcctagggaagctatagaaagagaccaagttaccttgcagccatagttgtgaacacactggagacatacttgaaaactggcaatgaacaggacaacagagagaattcattgctaagacaacattaatggcaaagttgtctttaatttaaaacattccaaaatgagtttaagattacaaaataaatgcaatcactggaggaaggggttattttatttatacactcgatcttagatttagcaacttttagttttgagtcagaattcattgactaacttaagatgggctagtttctgccaacagggcaagagtgtgcaatctcagagtcccacccaaccttgccaaagcaaatgacttctgcattaactggaagtcatccccaaaggacttgcccttcatgttttccccattttgcccacttacttgcacaaaaggtgtacactttgtcttaaaagttccctagtttgatgtttaggcagaagagcaaatcctcggttattattctgcaaataattttacatttcctttattccaaaaatgtagctactaagttaaatgtatcatgaaccacaaggggtaaaagttagatacgaacttccaatagctagggcatgtttcctgaaacactatggttcattaggttcattagtacattattcaagaagttatcgtaaccccaaagaatctaagaagggcactgtgtaattcttcaggtcacaatgccagcacgactgtggagtctgttacaggtaagacaaccacaagtaacaattctgtgattccaaatactttggggatgcagaaaatgtgcttaactgggcagcgtgaattagctaagcaacacagtgctatgatggaagaggttcaagatgattcatactttcattccagaccagaagtcacaagcccacatagcagcaactctgacagctagccaaagtagaaagtatttctaaaaagcagcctggggacattttaattaattggcctggaaaattaggtcagaattacaaagttcctcatcctcatgaagaagaaaatgtgatagtatgtcttttatatggaaatttctttgtatatatgtataaacttggtatggccttaatgctgcagttaaggatttgtttggctaccaccttaagcagcgtgttaagcaatcgcttccttaatgtaacatttttacttcttactggacactcaaccttcaacaactaattcccttttgccccttactcttccccttctttttttgcatgaagtcataaaagttatggcagttattttttggcttgtaaaaaaagaaatctatttctgcagtctgaagatggaatgtaaaatttctgtgaaacatgtatataacagtatatttattgaaccatccatatacacatatccatgctgattccaatggaaaaaaattaaagttttctgaaatttaaaaaaaaaaaaaaaaaaa

SEQ ID NO: 4109 - DNA, 732 bp, Macaca Fascicularis
  misc_feature (1)...(732): n = A,T,C or G
tgagggtggagtggtttggcannnctgttttaaataaacatttaagctcttaatcagtactgtgcctcnnnnnnnnnnnnnntggaccttagtctctggggataaaacatccagattctaggcctccgtgaatctttgattctatgagtctttatataaataatgttcttggaacagaaacaatgcaagggacatttgcacagaaatagtctttgcttctctccagtttcttattcttgccagcagaatcatttctactgctacagcttttttcccaaaaatgtcnnnnnnnnnnnnnnnnnnnnagggagggannnnnnnnnnnnnnnnnnnnnnnnnnnnnnnnnntacctacctcctcagtctcagtgggggccttnnnnnnnnnnnnnnnnagtttatggtttgtaaaacttttccctcaaagagattgaactgaatttggtctcccnnnnnnnnnnnnnnnnnnnnnnnnnnnnnnnnnnnnnnnnnnnnnnnnnnnnnnnnnnnnnnnnnnnnnnnnnntttcatttcatttgccatatgttcacaaacattcataatagaacaattcaggggcaagaatgcattttaaataaattcattcagatgaaatccctaaacctccaaagaagtattcatgatnnnnnnnnnnnnnnnnnnnnnnnnnnnnnctataaaacnnnnnnnnnnnnnnnnnnnnnnnnnnaatcatttatgtttcaatgataa

SEQ ID NO: 4110 - DNA, 734 bp, Macaca Fascicularis
  misc_feature (1)...(734): n = A,T,C or G
ggccaccaggcccctgcaggagagagaggccaccctggagctccagggccttcagggagccctggcttgcctggtgtgcctggctccatgggagacatggtgaattatgatgaaatcaagaggttcatcagacaagagatcattaaaatgtttgatgagagaatggcttactacacctccaggatgcagttccccatggagatggcggcggctccgggacgaccagggcccccagggaaggatggtgctcccggcaggccaggcgctccagggtcacctgggctccctggtcagattggcagagaaggacggcagggcttgccaggaatgagaggactgcctggtaccaaaggtgaaaagggggacattggtgttggcattgcaggagaaaacggtcttcccggccccccaggtcctcaaggtcctccnnnnnnnggcaagatgggcgcaacaggaccaatgggccagcaaggcatccctggcattcctgggcccccgggtcccatgggccagccaggcaaggctggccactgtagtccctctgactgctttggggccatgccgatggagcagcagtacccacccatgaaaaccatgaaggnnnnnnnnnnnnnnnnnnnnnacctgcctttggatgaaggactccgttgggaataaacggccaaagcttataggactctgtgacaggttgtgaatgtttttgttgttggtgttatttttaattgctgttaata

SEQ ID NO: 4111 - DNA, 590 bp, Macaca Fascicularis
  misc_feature (1)...(590): n = A,T,C or G
cactctccccctacccaccaatggagcccccaagatagagctgggtgnnnnnnnnnnnnnnnnnnnnnnncagttctcactcctaggagagccagcctcggcttgtaggctggtgccccacagctacctgagacgggcatcgcnnnnnnnnnnnnnnnnnnnnnnnnnnnnnnnnnnnnnnnnnnnnnnnnnnnnnnnnnnnnnnnnnnnnnnnnnnnnnnnnnntcctccctcaggggctgtaagggaaaacccaccccaactcttaccannnnnnnnnnnnnnnnnnnnnnnnnnnnnnnnnggccccgcccactgggccttgcccaccccaggccacatcccnnnnnnnnnnnnnnnnnnnnnnnnnnnnnnnnnnnnnnnnnnnnnnnnnnnnnnnagagctagtgccttgggnnnnnnnnnnnnnnnntcacaactgggagagagaggagggggatatgaccaccnnnnnnnnnnnnnnnnnnnnnnnnnnnnnnnnnnnnnnnnnnnnnnnnnnnnnnnnnnnnnntcccagactgtggggttgggacgcctggcctctgtgtcctagaagggaccctcctgtg

SEQ ID NO: 4112 - DNA, 2056 bp, Macaca Fascicularis
tgtgaaacatttaaagcatacagaagaaaacaggaagttatataactgatacctacattcgcattaccagttaaacaggtgttaacattttgcaatgtgtgtgtttctttcagaaataaagcattacagaggttaccaaaattcccctatcccacacctggatatcccactttcacctagagatcaccactcttgaaggtggtgttcatgttttgtattatatattgtatgtatgtttgaatctttgagtatattgaattatttggggtatgtaagtgtataacttgtaataaaatgtaacatatgtctgcacttgtaaattgttttaaatgcagcattgtgttttacattgataaacgtggatctagtgtattttaaatccttgtatttgatgatagaaattaaataagatttatttatctccctactaatagtcattgcttctttcattattacaagtaatgctgctataaacattctttacatgtcttcttgttcacactcacatcagcttttctggggtagatatcttgaagtgaaattgcatggtcgtaggatatccttcttccactgaattacttttgcatctttgtcaaaaatcatttgaccttgtgtaggttgctcacttttctgaaaatcaagttatttatgtttgtcattgatttggatgatattctggatatgagcttattgttagaaatatgtattttaaatattttctattatgtgcttgcctttttactctcttaatggtgtcttttggtgaaacaagttgtgaaatttaacaaatctactttgtcaatatttcttttgctggctaatactattagtgttttgtttcagaaatatttgtgccgaagatatgaagattcttggatgtgttcttgtagaagcttgattgttttagctctcacattatgtcactgatgcattttgaattaatatttgtgtatggaatggaggccaagttcaaaatttcctacatgaatatccagttgaccacttattgaaatgaccatccttgccacacaatattgctgtgctgcctttattgtaaatcaaatggccatatatttgtgcctctgtatcttgactctttaatgtattccactagtctacttgtgtgtatttgccaatgctacactgctttaattactgtagaattaaagctaagttaaattatgtcttaatatctggtaatagaagaccttcattgtcatgcttcttcaggagtgccttggctattatattttcagataaccctctagaatcaacttttcagttttaacctacaaacctgctggatttttgatggagattgcactgaatcactagatcatttgtggggagaattgacaacaacatttagctttccaaagttatgaacatgggcagccctctatttatttagagggctttggtttctctatttatttagagggctttggtttctctctcgtattttgtagttttcagtgttgagctcttgcaaatattttttatttctgagtaaatgatgtttttgatctttaatttttagtagttttttgctagtatgtacaaacagttgattgttatataccttgtgtcccacagcctttctaaatttgtttactgtatccaattgtatatagattttttggggggagattgtatataataattttctttttcaactttaacatctttcatttatttttcttacctttgtgcattggctaacaccagcagtcagtgtttcttttaaaaaagcaggcatagtagatatatgtctattcctaactttagggagaaagtgtttactgtttcaccatttagtatgttagctctgtgattttatagatatccattgtcagactaaagaagcatcctacaattctaattttgctgagaatttttaccatgaatggatactgaattttatcaaatgcttttccctgaatttgttattgttttcttctttattttgttaatgtgatttttgaatgttaaactaaggctgcactgccaaaataaactccatttgatcatgatgtaaaaaaaaaaaaaaaaaaaa

SEQ ID NO: 4113 - DNA, 734 bp, Macaca Fascicularis
  misc_feature (1)...(734): n = A,T,C or G
tcaaacattttgagtgaactannnntttttattaaagacatttgttgtatttatggttgtaactgtacatgcttatcaggaagaggctgaaggtagggcaaaaatggttgaatctattttcagatagttcatacttgagtgaagtgtctgtctacattatgaagcctgtatgtatccagtaccaagtaggtgggttaaatgtggttattttagttcagtgtcttaccctgaagagaaagttgtagtttggctgttgaaattcattccttagataccatcagtttgattgcccggctttattgcctttacaggaatgtgatactcagggcttactctactatatgcaccagtgagtcttctttgatcctaagaccaccactgaagttgtttaggttcttttggacaaacatgataaacttcttcagatactttttttttcctttggcaggaaggtgtcttgctgcaggtaactaatgaagaagtggtcaaccacagagtcttcaagaaataagaaattctgtaccatctgaaagtagttcttgttggtgccttcatttaaaaagcactctttaaaataaaagggaaatgttttctgataaaacatttagttcaggttcttgatataaaacaattaaaaaatgagtattgtttgtaaaactaacatcaaattggctagagagagaaatgtatcatgttttaaattaggttttgtgagtagacagattacaattcta

SEQ ID NO: 4114 - DNA, 774 bp, Macaca Fascicularis
  misc_feature (1)...(774): n = A,T,C or G
cagccagtcacnnnnnnnattttgtgaagccttgttgtgccacagagtgtagccagttcccctgcagctagtcctagtgaacctcaccccgaggccctgcatgggccagcccctccatctgtacttggtcnnnnnnnnnnnnnnnnnnngtgactggttatcacaccatcgctggcccctttgggccctgcatgtagtgtgggaggctcctgttagctcctcactgtggtaaatgccacacacctttaagtagataagcagacgataattatctgttcttttgacttaatctcatttggtttgattttccctctactaaggctttcctaccttcttcaggctgcctaagacatgtaaagaaacacatcgataattgtccatgaggagaaaaaaagcatgtgtcatgcatgaaggaaactgagctttaggtggcctccttgcttgttacatacctgggtatgtgtaggcagtttagtgcatctttgcctctcagttgaaacctgtataatcctgttacaaagctgtgttgttgcttctnnnnnnnnnnnnnnnnnnnngtttttccccaattaattgctattgtgttactttactacttctctctgtattttttttcttgcattgacattatagacattgaggacctcatcagaacaatttaaaaatgagtgtgaagggggaacaagtcaaaatatttttaaaagatcttcaaaaataatgcctctgtctagcatgccaacaagaatgcattgatattgtgaacatttgtgatat

SEQ ID NO: 4115 - DNA, 731 bp, Macaca Fascicularis
  misc_feature (1)...(731): n = A,T,C or G
tgttttcagttttcttttttantttggttatgcttaaatatgaatgtattaccaaaagatttagaagtgcatgtgctttggaggatttgtattgagcttttacagtattcatttttcaactcaaggcaatggctttctacaccaactctaatccataaacgggtcttatgacatccatgaagtagtagcaagacatgcttagtgtgtatttctctctttgagacactgtaatttctaccagaaatttccagagcattatgtaggtagaaaaaaatgcaagcaagctgttaaagatcttggatcccattataaagtatgtatagttgaaatctgtaattcaatcactttttctcttttatcctctaaccaaaaaattgtttaattttgcatcccaaatgtttttaatctttgtatattttttaaaaatccttttctcctcatcattgccttttttgtggttgtaaatagacttacttgcactttnnnnnnnnnnnnnnnnnnnnnnnnnnnnnnnnnnntgatatggtaattttcataacagatgtcagttttgaaccaagaattggtgatttgtttataagaaaaaaactggcttcatttctgtgaaattgctctttgaaaatttctttttacacgtgtaagccaactgagataccgtgatggtgttgatttcttnnnnnnnnnnnnnnnntctattttagccactgagccttttattatttgtctatttg

SEQ ID NO: 4116 - DNA, 696 bp, Macaca Fascicularis
  misc_feature (1)...(696): n = A,T,C or G
caaannnnnnnnnnnnnnttccccccaacccatatagatattaaggaaggtgtacttaaaaaagtgtttggactactnnnnnnnnnnnnnnnnnnnnnnnnnnnnnnnnnnnnnnnnnnnnnnnnnnnnnnnnnnnnnnnnnnnnnannnnnnnnnatttggtggaagtagagagtaactcgtattctatcaattcaagtattcttactatggttgctttccctatttgttcaatagactgataatactggaatctatagagtttgagccattacaacttttgtgnnnnnnnnnnnnnnnnnnnnnnnnnnnnnnnnnnnnnnnnnnnnnnnnnnnnnnnnaataatcttctagaccgctcnnnnnnnnnnnnnnnnnnnnnnnnnnncttgagaaatttgtttttattatgccatttgacatttcaaatcagtgctcatatacagtaagcttgtgatagaaattgtattttcttgctttttggagtataattcatataaatataattacttgaatattgttnnnnnnnnttaacatgtcagggcagttcccactgatttagatggtccaatataatctcattcaggaggcttgaaacattnnnnnnnnnnnnnnntgaattttaacagttctctgtcatcatttaacaaaannnnnnnnnnnnnnnnnnnnnnnnnnnntggtttcagtctctgc

SEQ ID NO: 4117 - DNA, 708 bp, Macaca Fascicularis
  misc_feature (1)...(708): n = A,T,C or G
caaagctgtgttcnnntgnnnnnagtggggcgagatggacgggtggnnnnngggctcccctaggaggatccttaaactgatctgnnnctgcctgtcccacagctgtgctggccctcaagttcnnnnnnnnnnnnnnnnnnnnnnncctcctgtggcttctttgtgagtcccatgctgaaccctgacccactgccaccccaatgccctgccctgcccnnnnnnnnnnnnnnnagggctggggtgtacaggtcttgtcctcagggagagctgggaaggagctgggctgatgggcctctccatcctctgcagacagagctgctgcctcggtgtggggaagtagagtctgtgggaaaggtggtacaggaagannnnnnnnnnnnnnnnnnnnnnnnnnnngaggccattgggggccaggcctcccgcagcctcatggactgctnnnnnnnnnnnnnnnnnnnnnnnnnnnnnnactgcttcagcctccnnnnnnnnnnnnnnaaggaggccctgcagccacctggttttccctctgcccgcctcagccctgaacagaaggataccnnnnnnnnnnnnnnnnnncgcgagcgagtgaacaagaggcgggtgaaggnnnnnnnnnnnnnnnnnnnnnnnnnnnnnnnnnnnnnnnnnnnnnnnnnnnnnnnnnnnnnntactgaggggtgcccccatcccacccaccccttctc

SEQ ID NO: 4118 - DNA, 1053 bp, Macaca Fascicularis
  misc_feature (1)...(1053): n = A,T,C or G
gccgcggcagctgggatttagcagaggaaggggcgagggaaggtagggagcaaacctatgaagaaacatcgcgttgtcattggaacttccaagcctttgctgttaagagccaggttcttaaatcaacccgtcccacacacatgttgcttacatgctgcgttttctcacggtaagtaagtaggcatcagaagagagctcagaaagggaaaaataaacgtggagagacctaacaagggagggggaaaaaagcaacaacccagtgacacaccctagatcacattttattgatatttcatttaaagtgcttttcactctctctctagaacctgggttaatttataacctagggtgtagaaacagaccattttaaatctcaacttgctaacctgacttcgaagcattaatgatccattattagcaatgtaaacagatttaagaatgaaatattgatttttctgaccctgaaaaaaaaaaaaagaatcctagagtgactgaaccagaggattggaaagaacattttctggnnnnnnnnnnnnnnnnnnnnnncactgttttgttttatttttgtttttctctgtcttttaggtctgttttgcctgaacccatcaagagctgggagattaatcaaccacactgaaaatgtggagagatttatgggggagagggttgaaatgtggatgtttgaaacaaaagtgtataaataaatgaattgttgataacttagttattgacctggagactggtagcttattaaagaaactccatgttactcattcctggagttggaggtttctgtaggcactttatttctccactttcaannnnnnnnnnnnnnnnnnnnnnnnnnnnngcccaattctgtctctattaccaatttaaatctnnnnnnnnnnnnnnnnnactgaaaatcaaatctattccctttaaaaagaaggaggagaagaagcaaaaaagcaaaaacaaacaaacaaacaacaacaacaaaaaaacttattagaagccctagtcattttttggctttctgttttgttgctgtccattgaagacttgaac

SEQ ID NO: 4119 - DNA, 694 bp, Macaca Fascicularis
  misc_feature (1)...(694): n = A,T,C or G
gcagacatgtagataacaatagtttaatgtcctctgaaaagataaaaattccataaatcattgcaaacaatttntagcaatattgtttattgctaccacagccaagaatgggtatttcaaagccacgggttgttttgttttgttctgttttggttttggctacacttttttggggaggacctttttatttgggaagaaactgctgagtatacttttctttcacaaccattgcaaaaccaggtagccctggagtttttttctcgtcatcattgtttttatggttcaagacttttgcaatacatgaattaaaaataagcagttctttaaagcatagtgctctaaaaactattcttagtttatacacttaaaagttgggtctttcatgaaatgcagtgggttgaatatgaacaccaatagcattcttgtgcgttgttagggtaagagagttttatagaataatctccagaagaagcagtcctcaaaaggcgtttcccaatgatacttttaatattcatgtttttatttaatgatgtcagatagaattaataaactactaaggaaataagccaatctggttattgtactcaatttcatttttcttttagaaatgtgtattgacttactaaagtcactgacagaaatgttactcatgacttaagttctaatttaaaaaattattttcctctttcctaaa

SEQ ID NO: 4120 - DNA, 721 bp, Macaca Fascicularis
  misc_feature (1)...(721): n = A,T,C or G
gcatggggatgaagacagaccctttccagactttgacccctggtggacaaaggactgtgagcagaatgannnnnnnnnnnnnnnnnnnnnnnnnnnnnnnnnnnnncaaaaaccnnnnnnnnnnnnnnnnnnnnnnnnnnccccaaggaaatttgagagnnnnnnnnnnnnnnnnnnnnnnnngggaaagcccctgtcgtcggaggagannnnnnnnnnnnnnnnnnngtaccctgaggtgatagaagnnnnnnnnnnnnnnnnnnnnnnnnnnnnnnnnnnctgctttcctgaacggtggttcccatttccttatccatggagaagacctctgaacagatnnnnnnnnnnnnnnnnnnnttttcctgttttcactcacctgccatttcnnnnnnnnnnnnnnttaaacaagtgcttccttcttcacccggaacctgttgtggggagtaagatgcatgagatgcgtgacctatttatcatgggcagcggcgaggccatgttgcagcttatccctnnnnnnnnnnnnnnnnnnnnnnnnnnnnnnnnnnnnnnnnnnnnnnnnncnnnnnnnnnnnnnnnnnnnnnnnnnnnnnnnnnnnnngtctacattatagccagaggggtccagcctttggtcatctnnnnnnnnnnnnnnnnctcagaactataggaaagagannnnnnnnnnnnnnnnnnnnnnnnnnnnnaaaaccaggtgaaa

SEQ ID NO: 4121 - DNA, 1661 bp, Macaca Fascicularis
aacaacaccgcgggcggcagcgaccacggtggcccaggaatcccgaccgtgtaaccagggcacctccccgaacccggcagctgcaagacccctgctcacaggaactcccgcccccaaccctcataactcagtcaatggtgcccgcctctcggccgcgagaccccaactctccacacccgtaactcgggcacctcccccaccgcgcccaaccgccacgatgccccctgccgacaagaaaccacccccctcttccacccccagactccaaagcctgtaactccggcacgtcgccggcctagttgcctcgagacctacgccccgagggagcccctgcccctacccccgctccggggccgcgaatgcagccccaggactctccactctcaacccacaccacaccgcacgacaccccgcagctcacgctccccatccgcggctggctgactcttactcaggggagcgggctccctgagaccgggagacgaacagtgctctacaggatcgtcgcgaaccgaaaagtcaccattactttaagtactgcaaaatctcggcattggctctactgaagacggtgatgcatgccagatcaggaggcaacttggaagtgatgggtctgatgctaggaaaggtggatggtgaaaccatgatcattatggacagctttgctttgcctgtggagggcactgaaactcgagtaaatgctcaggctgctgcatatgaatacatggctgcatacatagaaaatgccaaacaggttggccgccttgaaaatgcaatcgggtggtatcatagccatcctggctatggctgctggctttctgggattgatgttagtactcagatgctcaatcagcagttccaggaaccatttgtagcagtggtgattgatccaacaagaacaatatctgcagggaaagtgaatcttggcgcctttaggacatacccaaagggctacaaacctcctgatgaaggaccttctgagtaccagactatcccacttaataaaatagaagattttggtgtacactgcaaacaatattatgccttagaagtctcatattttaaatcctctttggatcgcaaattgctcgagctgttgtggaataaatattgggtgaatacgttgagttcctctagcttgcttactaggcaagtatactaatagcagccagaagtgacacctgatggcaaggggagaaaacactgtaagaccagagcagtctgaacctttgtataagaatgcagactataccactggtcaggtctttgatttgtctgaaaagttagagcagtcagaagcccagctgggacgagggagtttcatgctgggtttggaaacgcatgacagaaaatcagaagacaaacttgccaaagctacgagagacagctgtaaaactaccatagaagctatccatggattgatgtctcaggttattaaggataaactgtttaatcaaattaacatctcttaaacggtctctgagaagtactttacctgaaagacagtatgagaaaaatattcaagtaacactttaaaaccagttacccaaaatctgattagaagtataaggtgctctgaagtgtcctaaatattaacatcctgtaataaaactctttaaaatgaaaaaaaaaaaaaaaaaaaaaaaaaaaaaaaaaaaaaa

SEQ ID NO: 4122 - DNA, 714 bp, Macaca Fascicularis
  misc_feature (1)...(714): n = A,T,C or G
ctgaacatgagagctctaagagggagaggacaggtaagaattgaggacgcaattcctcaatgagtgaaatcatccatttgctaactcaaacagttactgagtctgtcaacttcctgacctttgtaagtctcctggcccctctcttgtcctttcccctgaaattcctcttcttgttcttcctagttgtttcccctcttgtccctgaagacactgggctgggaggagccttgggattactctgtgtcacaccactcacctgcctgtcccatctttttcctcttaagccgcatttccatttcccaaaccagctctgatttcccagctggagcgaggggaagcaccctggtgctcggttccttggggagctctggatggagaggacccaaggagcatctcctcagagggtgtgttgaagaggaagaaagaagattttattctgaaggaggaaattcttgaggaagcacaggacctcatggtcctatcaagtggaccccggtggtgtggatcccaggaattatggtttgggaaaacctgtgaagagaaaagcaggggagattctcaagcttccaggtgctaccatatggagcctgaggattaaagccaataccaaagaagacagtgattaaacagagagaaactaggttcttggtgacatcttttgagccactagaccnnnnnnnnnnnnnnncagacctacctcagaactttcagcta

SEQ ID NO: 4123 - DNA, 682 bp, Macaca Fascicularis
  misc_feature (1)...(682): n = A,T,C or G
agcagcagagtganngaaatatgnnnnncnnncaggagaacacagagcttgcagaaaagctgaaaagcannnnnnnnnnnnnnnngctcagagaggagcatctggacaaaatatttannnnnnnnnnnnnnnnnnnnnnnnnnnnnnnnnnaaagcttgagcaggcccaagaaatgatgaaggaagcagaggagcgacacaaacgannnnnnnnnnnnnnnnnnnnnnnnnnnnnnnnntggaagcttnnnnnnnnnnnnnnnaaggagcaggagacagtcctannnnnnnnnnnnnnnnnnnnnnnnnnnnnnnnnnnnnnnnnnnnnnnnnnnnnnnnnnnnnnnnnnnnnnnnnnngccactttcaaacaggaaatggacaaagtgagtattgcttatcaccaacaaaatatnnnnnnnnnnnnnnnnnnnnnnnnnnnnnnnnnnggtttcctttttctctcactaggatattttggtgcatttcacaaagtaatgaaatgtttataagtaggaatgaggtttgggttgtattttttaattggtaagtatctagtgtattaatcttagcaggagtacaaaaattctaggttacattttcactctgagaaagaatagttcttttnnnnnnnnnnnnnnnnnnnaaaaaaaaaaaaaaacagagctagcaatttaacatt

SEQ ID NO: 4124 - DNA, 2805 bp, Macaca Fascicularis
  misc_feature (1)...(2805): n = A,T,C or G
tattacagcattagataatgtggaagccaggagatatgtagacagtcgttgcttagcaaatctaaggcctctcttagattctggaacaatgggcactaaggggcacactgaagttattgtaccacatttgactgaatcttacaatagtcatcgggatcccccagaagaggaaataccattttgtactctaaaatcctttccagctgctattgaacataccatacagtgggcaagagataagtttgaaagttccttttcccacaaaccttcattgtttaacaaattttggcaaacctattcatctgcagaagaagtcttacagaagatacagagtggacacagtttagaaggctgttttcaagttataaagttacttagcagaagacctagaaattggtcccagtgtgtagaattagcaagattaaagtttgaaaaatattttaaccataaggctcttcagcttcttcactgtttccctctggacatacgattaaaagatggtagtttgttttggcaatcaccaaagaggccaccctctccaataaaatttgatttaaacgaacctttgcacctcagtttccttcagaatgctgcaaaactatatgctacagtatattgtattccatttacagaagaggacttatcagcagatgccctcttgaatattctttcagaagtaaagattcaggaattcaaaccttccaataaggttgttcaaactgatgaaactgcaaggaaaccggaccacgttcctattagcagtgaagatgagaggaatgcaattttccaactagaaaaggctattttatctaatgaagccaccaaaagtgaccttcagatggcagtgctttcatttgaaaaagatgacgatcataatggacacatagatttcatcacagctgcatcaaatcttcgtgccaaaatgtacagcattgaaccagctgaccgttttaaaacaaaacgcgtagctggtaaaattatacctgctattgcaacaaccactgctacagtttctggcttggttgccttggagatgatcaaagtaactggtggctatccatttgaagcttacaaaaattgttttcttaacttagccattccaattatagtatttacagagacatctgaagtaaggaaaactaaaatcagaaatgaaatatcatttacaatttgggatcgatggactgtacatggaaaagaagatttcaccctcttggatttcataaatgcagtcaaagagaagtatggaattgagccaacaatggtggtacagggagtcaaaatgctttatgttcctgtaatgcctggtcatgcaaaaagattgaagttaacaatgcataaacttgtaaaaccttctactgaaaagaaatatgtggatcttactgtgtcatttgctccagacattgatggagatgaagatttgcctggacctccagtaagatactacttcagtcatgacactgattaatacaggttgtcttaatgttactccaggaccacttaattttggaaagagtgcatttaattcagaagctaaaaaaaatcagctcatgatactatggatttctctttcattaagccttaattttaagggaaacatcagtaagaaactgcactgaagaattataaaacattttggggcatagtatacacttgtctaacggttcacacatggctatgatcacaagcaactttgaactggaatgccgtttacgaaagttttgtgtattaatctgtgtattaatctctctggataaaaagaaggaaaaaatatgtatgaccagaacagatatggatgaagaaattgaaagcaacaaatgcaactatccaaaaagttttattttatttcatgaatttcttttttgtttagtcttgaagactgattttctgtacaaatagtgtttggcaccctgcacctctcatatgattaggctttgagaatttaatgccactgggaagaagaggtatggtagtggtggatgaagggtggacattttaaattgtgcagttacagtttatcgtcctgttacctctgctggtttaaccagagtttgttatatcactgtgtcccccaaatcaggattttgttgatagcatcagtgttgtaggagcagtaggtcagatgagacatattaacttagactaaatgtgaacagtattatatggactcacacaacgctcttagagaatccgtgaatatgaacagacaaatgtggctaaccatttgattcttcagtatgccttctaatgtgggtattttatttatgtgagactctaaacctgattgttctaatatataaaactaaaagattttataaagggagtgtctttagaaatagatgaaaagtagaatgttnnnnnnnnnnnnnnnnnnnnnnnnnnnnnnnnnnnnnnnnnnnnnnnnnnnnnnnnnnnnnnnnnnnnnnnnnnnnnnnnnnnnnnnnnnnnnnnnnnnnnnnnnnnnnnnnnnnnnnnnnnnnnnnnnnnnnnnnnnnnnnnnnnnnnnnnnnnnnnnnnnnnnnnnnnnnnnnnnnnnnnnnnnnnnnnnnnnnnnnnnnnnnnnnnnnnnnnnnnnnnnnnnnnnnnnnnnnnnnnnnnnnnnnnnnnnnnnnnnnnnnnnnnnnnnnnnnnnnnnnnnnnnnnnnnnnnnnnnnnnnnnnnnnnnnnnnnnnnnnnnnnnnnnnnnnnnnnnnnnnnnnnnnnnnnnnnnnnnnnnnnnnnnnnnnnnnnnnnnnnnnnnnnnnnnnnnnnnnnnnnnnnnnnnnnnnnnnnnnnnnnnnnnnnnnnaaaaaaaaaaaaaaaaaa

SEQ ID NO: 4125 - DNA, 746 bp, Macaca Fascicularis
  misc_feature (1)...(746): n = A,T,C or G
antnnncagaaataatgcanntcttgcatnnnacaatgtactatatccacgtcagtatatatatacatatgtgtatgtgtatatgtacataaattctccttaaatctctgggaagaattgtgcttaaaaaaagaactatgttttgtgctgtggctcatacctatatcagtgggagtctatgtctcctagtttgagaaaactgaatattaactttttattaacatgaaacatggtggcaaactgaatcctacaagtataggacccagaacatatctatgttattgtcgtttacaagaagaaatatgtgtttgatctttcttcctattcctggtgcagagctcctaaaacctttgggacctcccaagtgatgtgtctggtagtatgcaaatgagatgactgatggttagtggcttctgannnnnnnnngaatggggtctggttgccaggggaaccatccatgtgtttagagggttggaactttcaggcccacttccagaccttggggaagggagaggggctgaaggttgagtcgctcacaaatggataatgatttaatcaatcatnnnnnnnnnnnnnnnnnnnnnnnnnnatccaaaggacagggttcagagagcttctgcgttgctcaatacatgaggggtggtgtgcccaaagggaccgtggaagcgcctatgccccttctgccaaacctgttcctgtgcatctcttccatctgaccgtttctgagttatattcttttatgatag

SEQ ID NO: 4126 - DNA, 599 bp, Macaca Fascicularis
aatcaagacctcccattgctgaacccacgaaccagggctaccaaggagcctgaccctgccagagtccatggctgtactgctgcccagacactagctgaacccaaggacactggtgcccaaggacagcttctggaggaggctggcccagcaggaaggtctgtgagcagggccccattcaccctgcagtagacgggcaccatactggccacgggccgatgctggccacacttccccctccgagggccagccaggcacagcaggcatgaaagtgaacagagatacagcagcgagttccttggaaagggcagggactccgcccactttgtgttcagataagggccagtgcatgtccctgaaggtcaggccagccgggggaggggcccatgctgcgaaaattcagcctgcaaaggctcctctccccacctggtcaggcctggaccagccgggggtcggtgctggcctttattgcaggggacaagggcccacccagaccttggaacataagcaccaggcccagctctgcctctgcacaccctcatgtcaccacacctgggatggagacatcggtggcccagcgagagatggagcactgagcctga

SEQ ID NO: 4127 - DNA, 738 bp, Macaca Fascicularis
  misc_feature (1)...(738): n = A,T,C or G
accgtatttcaaatactnnnnatcttcattccagagcatannnnnnnnnnnnnnnnnnnnnntgattccttcttccccatacatgatgaaatatgttaccgtgggaaatgtnnnnnnnnnnnnnnnnaaacttggggtctatagagnnnnnnnnnnnnnnnnnnnnnnagagagacttggccttgttgtacacaggcttcccatctaccagagatctctcatatgttggctgcttttttcnnnnnnnnnnnnnnnnnnnnnnnnnnnaaactccctgttttaatgctgtcacatgtgggtggagtgaagagagcatttagagttgggttgacatcccagcctttcttccttaagggatgttccttagtggctgtaaacctggaagatcctgtagggcacctaagtctttgtccccatggtgtccccactatgctagnnnnnnnnnnnnnnnnnnnnnnttcatctctgcaaaatggagatattataagcannnnnnnnnnnnnnnatgaagcaannnnnnnnnnnnnnnnnnnnnnnnnnnnnnnnnnnnnnnnnnnngttgggcagcatactgtaaagacgaggggcgctgcctctggggccacactgcctgggttcttttcctgacnnnnnnnnnnnnnnnttgggggagtaacaggcgcggtggcnnnnnnnnnnnnnnnnnnnnnnnnnngaggccgaggcgggtgatcagaagtcaggagtttgagactagcc

SEQ ID NO: 4128 - DNA, 715 bp, Macaca Fascicularis
  misc_feature (1)...(715): n = A,T,C or G
atggggaggaccagacccaggacatggagtttgtggagaccaggcntgcaggagctgtcttcccagcccaccatnnnnncatcgtgggcatcgttgctggcctggttctccttggagctgtggtcaccggagctgtggtcgctgctgtaatgtggaggaagaaaagctcagttatcatcatgtgaggaaatgggcgactggtccaccactgccaccagaaccaccaccccacactgacctgtgctgtcttcctcagtcaagtttcttgtttcagcagagatctctcgtnnnnnnnnnnnnnnnnnnntcctgggcacagatgctactacttatacctctgataccctgatggtggacaccgggccctgtggcgaggactgctctcaccgctgctccnnnnnnnnnnnnnnnnatctttaccaaaattagtcttcactgtcccagcctccctgtgccatctcgtcccggttagaagcccacgtgtggtcatctaaattnnnnnnnnnnnnnnnnnnnnnnagtgtttaggtgcaataatgttggagaaagtgaatttttctcttttgtagaaggaggtagtccctnnnnnnnnnnnnnnnnnnnnnnnnnnnnnnnnnnnnnnnnnnnnnnnagaggggtgagggatggaaaaacaatgacaaatttcaattcctagaatcatgatctgagcctagaactttatctagtacattgc

SEQ ID NO: 4129 - DNA, 773 bp, Macaca Fascicularis
  misc_feature (1)...(773): n = A,T,C or G
ccggtagcccggacaagtacataagtaggatcagaaacccaagtcgaaagtaagtcnnnnnnnnnnnnnnnnnnnnnnnnnnnnnnnnnnnnnnnnnnnnnnnnnnnnnnnnnnnnnnnnnntaccttaaaaaatcagagaaagtgaaagtattgtgttatgttacgaacaatgcaggctccttcctcatttaacttttcaaccttgcgaagtggggccagaagatcgatttcgagttggnnnnnnnnnnngtaaaagcctgtaatgggcattnnnnnnnnnnnnnnnnncttcgtggtttgcctcgatcctctctaagcttctatcctgnnnnnnnnnnctcaaagataattggtctcagagttcaagccatatcctcagaccttatttccatcttctcataattctgccatcatacctttgcttctccannnnnnnnnnnnnnnnnnnnnnnnnnnnttcattgtgaaatgcttctgaaagagcctaaaaaaggctcatctgaaagaaatggagagctctgtttcgacccaagcctgtttgaaaatgtgttagtctgatctttgatcatgtatttccatgtaatggaaatgaaaaaaaaaacaacaagttttttataatttttttataatgtttctaatgttttattgaaaaacctatggacctccttctttctcaacatctactttcttactgctttttgaaaataatgtgcaaccaaattnnnttcttaatatcacataattaagtaataaaattcaaaagaaatgtgc

SEQ ID NO: 4130 - DNA, 724 bp, Macaca Fascicularis
  misc_feature (1)...(724): n = A,T,C or G
gnngagtcaatgagggaagatgactggcgtttcttctgtctaaatgggaggatgccagagggctggctgggactaggatgtataactaagatttcagtttgaatctgttcacagcgatagcaaagtaggtgnnnnnnnnnnnnnnnngnnnnnnnnnnnnnnnnnnnnnntgaaaggaaaagaaaccgaagccagtattttaataattgctttttctgtgtattttgtattgggctgggggatagcatcaaaggttgaacttttcgagnnnnnnnnnnnaaaccccaggaccttctttctttggccatttctgtggaaatgcgatgtcagatggatggtaatggtgccctccagtggctgtgagacctcattgcgcattgtctactggagctttagtcttctgagacggaggaaaactgctgaatactctcgattcatctatgtctacaatgttgcatttatgaaaaactacactgtgcnnnnnnnnnnnnnnnnnnnnnntatgacaacaccctctttcaccgggtgtttctgtagcaagttttcatattttcaaacaatggtttctctgcgttaattattgaagaaaaaaaaacgatggggtaagaaaactacccatgcatgatgtagagagctgttgatttgtttctgttttttaaaggaaaactattnnnnnnnnnnnnnnnnnnnnnnnnnnnnnnacacttcagagacctgtagtaaa

SEQ ID NO: 4131 - DNA, 765 bp, Macaca Fascicularis
  misc_feature (1)...(765): n = A,T,C or G
aatgtggaagagnnnncagcttggatttattcttactttgtatgttgtgttgttgtccccagtgttctgcaaactaatgtatttgtgcnnnnnnnnnnnnnnnnnnatgatgacgttttctcaccttcaaagtcttataaacatgttgactcttgttcctgctgagttactagttcgaagcttannnnnnnnnnnnnnnnnnnnnnnnnnctgnnnnnnnnnnnnnnnnnnngtcatacattcttatatattgaattctggttaattttgagtaactaattctgtggctgttgtgagtcttcagcaccctcccacgtaccttatatccctnnnnnnnncagaacagctccaatannnnnnnnnnnnnnnnnnnnnnnnnnntctgtgtggattctgtaannnnnnnnnnnnnnnnnnnnacatcctaacttgctnnnnnnnnnnnnnnnnnctacgccaaatatttctggtttnnnnnnnnnnnnnnnnnnnnatttatttttgtgataggagggatatttannnnnnnnnnnnnnnnnnnnnttaagttgaatggtgtgctctaaaataatgaaaaacaatagcccatatacctatgtatttgtttttgatgggttgtttactctgaaannnnnnnnnnnnnnnnntttaaaggaagttttaaagtacctattttgagtcannnnnnnnngaaaagaatgtcaagcttgttaaaatgacatgtagcaaaaatgtattttgatttgtattncnnnaaaccaaaaa

SEQ ID NO: 4132 - DNA, 671 bp, Macaca Fascicularis
  misc_feature (1)...(671): n = A,T,C or G
gannnnnnnnnnnnnnnngatgtttgggctatannnnnnnnnnnnnnnnnnnnnnnnnnnntgaatgctacacaggtcctcatccagcatcttcgagggctccagacaggaagaagcacagagaggaacgtgtcagtggaagccctggcctctgctctgcagctgttagccagggagcagcaaagcacaggaagggtccggcgctccctcccnnnnnnnnnnnnnnnnaatgagaaggagcaaggtatgcacaatnnnnnnnnnnnnnnnnnnnnngtgggaaccttctacaacctgggcacagctttgtattannnnnnnnnnnnnnnnnnnnncaaggccagggaacgaggccgagatggggccatagatnnnnnnnnnnnnnnnnnnnnnnnnnnnnnnnnnnnnnnnnnnnnnnnnnnnnnnnnnnnnnnnnnnnnnnnnnnnnnnnnnnnnnnnnnnnnnnnngttcannnnnnnnnnnagtattaccaagatcggaaagacgcaaacatctctcagccagagaccnnnnnnnnnnnnnnnnnnnnnnnnnnnnnnnnnnnnnnnnnnnnnnnnacaactaccctggcttctttcatatcagaagtagtaagttcagctccctactgggggtgggccatannnnnnnnnnnnnacttagatcctgg

SEQ ID NO: 4133 - DNA, 1303 bp, Macaca Fascicularis
gaattcatggagctgagctatggactctttatctgccttctgctctggggtagtaccgagctgtgctacccccaacccttctggctcttgcagggtggagccagtcgtgctgagacgtccgtacagcccgtactggtggagtgtcgggaggccaccctgctggtcacggtcagcaaagacctttttggcactgggaagctcatcagggctgctgacctcaccttgggcccggaggcctgtgagcctctggtctccatggacaccgaggatgtggtcaggtttgaggttggactccacgagtgtggcagcagcatgcaggtgactgacgatgccctggtgtacagcaccttcctgctccacaacccccgccctgtgggaaacctgtccatcgtgaggactaaccgtgcagagattcccattgagtgccgctaccccaggcagggcaatgtgagcagccaggccatcctgcccacctggttgcccttcaggaccacggtattctcggaggagaagctgactttctctctgcgtctgatggaggagaactggaacgctgagaagaggtcccctaccttccacctgggagatgcagcccacctccaggcagaaatccacactggcagccacgtgccactgcggttgtttgtggaccactgcgtggccacaccaacaccagaccagaatgcctccccttatcacaccatcgtggacttccatggctgtcttgtcgatggtctcactgatgcctcttctgcgttcaaagttcctcgacccgggccagatacactccagttcacagtggatgtcttccactttgctaatgactccagaaacatgatatacatcacctgccacctgaaggccatcccagctgagcaggaaccagacgaactcaacaaagcctgttccttcagcaagtcttccaacagctggttcccagtggaaggcccagctgacatctgtcaatgctgtagcaagggtgactgtggcactccaagccattccaggaggcagccccatgtcgtgagccagtggtccaggtctgcttctcgtaaccgcaggcatgtgacagaagaagcagatatcaccgtggggccactgatcttcctggacaggagtgctgactatgaagtagaacagtgggccttgccgactgacacctccgtgctgctgctgggcataggcctggccgtggtggcatctctgactctgaccgctgttatcctgattttcaccaggaggtggcgcactgcctcccgccctgtgtctgtttcccaataaaagaagaaagcagtaaaaaaaa

SEQ ID NO: 4134 - DNA, 696 bp, Macaca Fascicularis
  misc_feature (1)...(696): n = A,T,C or G
ggctagggctnnnnaaaacaagaagannnnnnnnnnnnnnntaccagaaagtaagacatttatcaaagaataatgggggcggttaaaaggacaggggccagcttgnnnnnnnnnnnnnnnnnnnnnnnnnnnatagaacaacaaagtgatgaaaataatataatcaattgaataaggatccatgagtccaaactcatataaatatataagtggatgaaaagggaaannnnnnnnnnnnnnnnnntgccaactaaaatataagaggagtgctagaattagaaagtcactgtttgttaaccgttgtaatagtaattgatttagtcagtaatcattaatnnnnnnnnnnnnnnnnnggtgaaaagtttgaggaaataattggatagttaaatggtctcaaagtgtgtacccataataattacagaggaaaaaggaataactttacagtgtagaaacttggcaggtagctccttacctaggtaatagaannnnnnnnnnnnnnnnggacaaattgccatgtgcctcttgatgtggtacaccgaagacgtaacatcacttctagggtattcctgccaaaannnnnnnnnnnnnnnnnnnnnnnnnnnnnncaccagaccaacccaaatgggggagcattttgcannnnnnnnnnnnnnnactctttaaaatgtcaaggtaatgaaagaaaaaagagagaag

SEQ ID NO: 4135 - DNA, 747 bp, Macaca Fascicularis
  misc_feature (1)...(747): n = A,T,C or G
acaggaaaagatannnnnacacaggcaaaatatgcacatanttcactggagcagccacaaagccagaataagtgaactagttcannnnaaacaaaagccaacccaaacannnnnnnnnnnnnnnnnnnnnnnnnnngttgaaaagagcagaaaggtatgaagaaggaggtacaacatgcactggggagccctgtttcacactctgnnnnnnnnnnnnnnnnnnnnnnnnnnnnnnnnnncacagtggtcccgggggcttcgggcgctaactcttccccactgtctcactgacgatggtgggcgcccnnnnnnnnnnnnnnnnnnnnnnncccaacactctcctttccttcacccagagcctggagagctaaaccctatnnnnnnnnngcccaaggctcnnnnnnngattagtatctgccaagcaaattcccccctggaagggttgatttcagagcggagttaaagggaacaagannnnnnnnnnnnnnnnnnnnnnnnnnnnggtgcgggnnnnnnnnnnaaagatcactgttccatgtggtgagcagctgcannnnnnnnnnnnnnnnnnnnnntttcttggaggcagctttccccgcgcatctctgcagactatagtgctagccacggcttcccgattcnnnnnnnnnnnnnnnnnnnnnnnnnnnnnnnnnnnnnnnnnnnnnnnnnnnnnctgcaatgtggctttggannnnnnnnnnnnnnnnnnnnnnnnnnnnnnnnnnc

SEQ ID NO: 4136 - DNA, 750 bp, Macaca Fascicularis
  misc_feature (1)...(750): n = A,T,C or G
gacagtgaccaagacactaannnnnnnntgagagctgatcannntgttagggaggcactcaagatgaaaactacttcaactaaaagccaactcacttgaacagcagaaccagaagagtgtgttaattgcacagatgaatgccgagtgcttggtcattctgnnnnnnnnnnnnnnnnnnnnnnnnnnnnnnnnnnnnnnnnnnnnnnnnnnnnnnnnnnnnnnaatctctttgtacctacagttgaagctaatgttgagactgagacttacgaaactgtgaatcccactgggaaaaagactttttgtacatttggaaaagacaagcgagagcacactattctcattgccaacgttaaaccttatttaaaagccaaacgtgccctgagccctctcctccaagaggtcccctcagcatcaagcagcccaaccaaggcatgcatcgagccttgcacctcaacaaaaggctccctggatagctgtgaagcaaaaccaggagccctggctgaagcaagcacgtcagtacttgcccactgacagtcagtnnnnnnnnnnnnnnnnnnnnncaagagaccctcccttcatggcttnnnnnnnnnnnnnnngggtctttgcggatgtgcattccagagccagccgggattccactgagacgggtgctgttcttgagcagcttcaccaccccaacagggatctgggcagagagtccgtggatgcagaggaagttgtgagagaaattgataagctttgcaa

SEQ ID NO: 4137 - DNA, 2048 bp, Macaca Fascicularis
cataaatgctgaaaaaatggttctcaaatttggaagaaagaccagaaaatttgcaacttacgtagttgctgctggactccagtatggagcagaaggaggcatgttacacacattttttaagatggcttggctgggtgagattcccgcattaccagtttttggcgatggaacaaatgtaattccaacaatccacgttcttgatctagcaggagtgatacaaaacgtcatagatcacacgccaaagcctcactacctggttgctgtggatgagtctgttcataccctggaagatatagtcaagtgtatcagtaaaaatactggccctgggaaaatccagaaaatacccagagaaaatgcatacctaaccaaggacttaacgcaagattgtctcgaccacttactggtcaacttgagaatggaagcgctctttgtgaaggaaaattttaatatccggtgggtggcccaaacaggatttgtggaaaatatcaacagtatcctcaaagagtacaagcaaagcagaggattaatgccagtcaagatctgcattctcggtccccctgctgtgggaaaatccagtattgctgaagaattggccaagtactacaaactgcatcacatccagctgaaggatgttatttctgaagccatagcaaaactggagacgattgttgcccctaaggatataggggaaggaaaagaagaagtcgaagaggaagaggaggaggagaatgtggaagatgcacaggagctcctagatggcatcaaggagagcatggagcagaacgcaggtcaactagacgatcaatatataattagatttatgaaagaaaagctaaaatcaatgccttgcaggaatcaaggttacattttggatggattcccaaagacctatgatcaagcaaaagacctgttcaatcaggaagatgaggaggaggaagatgaagtcagaggcagaatgtttccctttgataaattaattatacctgaattcgtttgtgcactggatgcttcggatgagtttctgaaggagcgtgtgataaaccttcctgagaggatcgtggccgggacccactatagccaagaccgattcctccgggctctgagcaactaccgggacatcaatatcgaagatgagactgtcttcaactattttgatgaaattgaaattcacccgatacatattgatgtaggaaaacttgaagatgctcagaatagacttgctatcaaacagctcatcaaagagattggggagcctcgaaattatggtttaacagacgaagaaaaggcagaagaggagcggaaggctgcggaggagcggctggccagggaggctgctgaggaagcagaacgcgagcaccaggaggccgtggagatggcagagaagatagctcgctgggaggagtggaataaacgactagaggaagtgaaaagagaagaaagagaattactggaggctcaatcaattcccctgagaaactatttaatgacctacgtgatgccaactcttattcagggcctgaatgaatgttgcaacgtccgacccgaagaccctgttgattttctggcagaatatctcttcaagaacaatcctgaagcgcagtgaaactttaaagatctagtattatctacctttacagaaccacagatcacttattgtactttgaaaaactgctttgaaaaatgcttttccagttcttagaaaattctttttttgtagacaaatatactatcaactagaatccctattaaaagctatatgacatgaatgactacgtcattaaaactgtatttgaaatgtaaattgataaagacatttgtgcatagctcatgagacaaataccaattgaacattttattcgcttctgtacactaatgtttataggtatttatagcatgaagaaaatcagactatatattgtagactatatattattctaacatgtaggctaatttacatgacttgttattgccccagtaacaatgttattagaaacggaaataaactgaagtggtttatgcctgttgactcacaaaaaaaaaaaaaaaaa

SEQ ID NO: 4138 - DNA, 2005 bp, Macaca Fascicularis
atttcctgagaaataagcattacttacaccaataatcacatttccaaaaatcagcaggccctggaagcaacgaacagtggagtcgtctttggccatcttcaggatttcccacaagctgaaggcacagttgaaagcattaccaaataactgctacagtttctgtaacatgagtaaaccatgccattgcatattgcctccttgttcccaaatgaaccaaaccaaagccatataatccttgagcaatgaaggacatttgattattgagcttagtaatcacataacttttatagagaaggaaaagaatatagccttccagagcctggttagtgcctttcaggagttctttcaggcaaggagtgtgcagaatgcatccttctgagtggtagactgagccccgcaaggtggaaagcacaaggggtggacctgaggtggtgattgggcagggccaaagcacactgagggtcactggcatagccctcactgcccttggccatgacaagtggaaacctgaagggtaaactcatggctacagttagtggttggttcccatgtggactgcaggttgcttttaaaaactatcattttctgaatattttattatcttcaaagaaatagttggcaaatagaaaagtgccctgttgtatatgaggggaagtgaaaaacggggactagcatttacttccttgtaccaggtgtgtgccactctaccaggtgctttgcatgcacacatctaattctcataacccaattaggtagaaaatactcatcaggccacccccaggtgtctcccctttggcttctctgtactggagtcttctggacttgcaatagtggagggcatttttgcctccacgtggacaatttcactgcagggaaagtgttcccctcctcacccctcatctggtacttgctgctcccccactgaaagccaaatctttgctcagtaaagaagaaagaatccattaaaattggctcagggagacaactccagagaaatctgaggtcttaccgccagaagaattttcctgctggacttcatgatgcctacgatgccaagaacggacaggcagaagaggcagatgcccacaaatatgccgatccaggcagccccatagatgtcatcattgtcagtggcttcaagcagtgggtagaggctgtgttggtcagatacaaagaaaatgcactccgcggtcagggcaatgccgcaacactgggggcaaatgaagggtaggctccatcagaagtgcagctttgggaaagggggtggagggcggcgaaggtaagagactggctccctttcctgcacagactttatgcaactaatctaaactccccattgccacaaaatcaaacaactacttccatcctactaactggttgcatacaccccttcacacgttattctgtctatttagaaacagacccacacaatttcagaccatccacaatgtccttggggcatgaatcactcaaacaatgccttctggtatgagaatgatctccccctgcccccatgtcatgacccacacttctgggttgtaatatttgagctggtcctggtcatatttatcaatgacagctgggaggaaccttgctgcttatctttgccaacacccacattttatagatgaggaaactaaagcttaaattggtcaattaagttccctggggtcacacaaccagtaagtggcagagctaggctagagaccttggtgtgtgtggactccagatactctagagtccacgcgcttcaccacagcccacaatgactcccagaaactattgatagactttggtgccatacacagctgaacatgggtctttcacctccctgagggttttctggaaggaacacaaaggtaagcatgtgggtcaatcacttgggcttctgcactcgaagcaccttgagaaaagcaatctacagctctcaacatttaattcatcaattcatgcattcctgctgtaaataaaaagtgtattaaatggttcaaaaaaaaaaaaaaaa

SEQ ID NO: 4139 - DNA, 744 bp, Macaca Fascicularis
  misc_feature (1)...(744): n = A,T,C or G
acacacacacatacannnnnnnnnnnnnnnnnnnnnnnnnnnnnnnnnnnnnnnnnntctggacacacgcacacatgcagatacgctgtccggacacannnnnnnnnnnnnnnnnnnnnnnnnnnnnnnnnnnnnnnnnnnnnnnnnnnnnnnctggacacgagcagnnatgctgtccggacacgcacacacatgtgnnnnnnnnnnnnnnnnnnnnatgcggactgaggtgcttttcagagggtgtgctgcgaggcccgcagtgcgtgtgcagtgaggctcatagttgatgaaggactctccctgctccaccgtcactcccccacccctgcccgcctctgccctcgcctggccttcgcggctatttttgccacctgtcttgggtgtccaggagtcccctactgctgtaggctggggctgggggcacagcagccccaagcctgagaggctggagcccatggcactcccaccgcattctccccatgccagcgagaaggagccttggtatttatatttaagaaatgaagataatattaataatgatggagggagggctgggttgcagggactgtggtctcttctggggcccgggacccacctggtctttcagacacgatgatgcgtgcaccccgtccaggccaggcaccaccccccaccccactgtcgtggtggccccnngatctctgtaattttatgtagagtttgagctgaagccccgtatatttaannnnttgtaaacagaaa

SEQ ID NO: 4140 - DNA, 727 bp, Macaca Fascicularis
  misc_feature (1)...(727): n = A,T,C or G
ggcatccttcccgagnnnnnnnnnnnnnnnnnnnnnntgtgggatgcttgctgggattgagtgtggctcagtggtcccaggagcannncctccaaccaagtgtcttagctggcgccctgtatgtggggagctggctgggcttccatgtgctgggagggtgagagcaggcnnctggcagacgaagcaagggagggagtgtagctttgaggaacaactaacacggaagaggaggtgtcccaaatgaccctgannnnnnnnnnnnnnnnnnnagaagtcacattgtgggtggatgggcagtgcctggaggagtctctcaagcctcagggggccgggcatgttcgctggctgcacgggtgtgctggactggtaaacgtcagctctctgcacagctctctgcacatgagaccgttgcatggccactgttctgtagttacgtgtgtttcagcacaaagctgaaaaggaagccttctctgggtccagcaggctgtgaagggacagcagctgtgaggtggctggggggcactgccccgggtagcttcaggatgcatgtgccagggaacagggaccacacctgtgggacgnacgggttagtgccacggactagactgaggcggtggcttcttcagggagacctgggaagcaggaagacaagaagcagtctgtggagcaattttacataacgattggtttttgttgttgttgttttgttttcttttctttttgagat

SEQ ID NO: 4141 - DNA, 716 bp, Macaca Fascicularis
  misc_feature (1)...(716): n = A,T,C or G
accgcagacccannnnnnnnnnnnnnnnnnnnnngctgacagnnngcagcagaannngcagcgggactacgaccgggccatgagctggaagtacagccacagccgcggagctggccttggtttctccactgcccccaacaagatcttttacattgacaggaacgcttccaagtcagtcaagctggaagattaaactctagagttttgtcccccaaaaactgccacaattgctttgattattacatttatgctggagattatatttctttttgtgaaaaannnnnnnnnnnnnnnnnnnnngagcagcaggatataaataactcccataagctcagcgttccagtaatggaacactaggcataaatggtttattcagttgtgcaaatgaaagccatctgacagttggctcacattgaacacctgtggagattaaggacaaggacaactatcttgatgggcttggatgaactggggtggggcagctcatatttcgggagccannnnnnnnnnnnnnnnnnnnnnnnnnnnnnnnnnctgtgttaaacattccgtccctgtttgagacgtcgatatgtacagttaacctttgttgagtgtttagcagagtgctaggcaaatactagtgttttccataacgtatttaatcttcataattatgaaatgggtgctattattagccccgtcttatagatgaggcaagtgaggttcagggataa

SEQ ID NO: 4142 - DNA, 477 bp, Macaca Fascicularis
  misc_feature (1)...(477): n = A,T,C or G
gnnnnnnnnnnnnnnnntgaagagttaaaaatagtacagaaatgtgaagtttggtagctctaaatgtgttgtacttgacttnnngttttatattnntatttttttattttttattttttattttttgactacttagaattttcacaattctaataagattgcttccaagtctctcatgtgcaagctttaaaggatgcactcttgccattttatgtacaggaagatcattggtcagaagaatattgtgtctgacaaaaacgtaaactgtataaactgaggaacctcagctaatcagtattactttgtagatcaccatgcccaccacatttcaaactcgaactatctgtagatttcaaaatccattgtgtttgagtttgtttgcagttccctcagcttgtcttgtaactgtggcgttttgttttctgttttgtgttcaatgcaaatgtgatgtaatattcttattttctttggatcaaa

SEQ ID NO: 4143 - DNA, 1504 bp, Macaca Fascicularis
aactaaacaaatttgtcttctttgctagcgaaccaacacagactaagtttacattctgagtacgtattatctgtagcaagtgacttcctgtattttatgcattttcatacgtagtctttgaatgagaataatgtctaattgatacctgtaatgaaaaggacttgagggcttttgattttttttaaatggacttttatgtcaggaatgtgttttgatcctttcacattcaaattttgcctctccagaaacttgtgctggggttcagtgttgctacagctagaatttaaatagcccttgcttttaacatggaattctgtcttctctagtgccacagaagggctcttttagtcactaattagctaacagaaactgtatctgccatttcccttttctttttaaagctataaaaggggcatgtctggacacatattaaggggcaagggaaaaactaatttaatggaagtgacctagggacactacatttaattgacatttctatgtttcaaagctttacaaacattgctctatatcccccttcattgagaaacacttccgtctttggttccttctatctctgtgtggcttcactgaagaccagcccattgactctgtctccttctctctacaggccgtttttactatctgatccaccccaccaaactgacctatgatgaagcggtacaagcttgtctcaatgatggtgctcagattgcaaaagtgggccagatatttgctgcctggaaacttcttggatatgaccgctgtgatgcgggctggttggcggatggcagcgtccgctaccctatctctaggccaagaaggcgctgcagtcctactgaggctgcagtgcgcttcgtgggtttcccagataaaaagcataagctgtatggtgtctactgcttcagagcatacaactgaatgtgcccctagagcacatcagttttaaagtcataaagaacatgtgaaaggtgttttttttttccaatatgaactcatgcaagttaccaaaactgtgattacccttttttacttactgtaaagagtcattttcataaagatcaattcattgatttgttttttgtaaagctatcattcaatatatattataaattaatataaacttaagggaagctctacgtaaggagacttagagccaaactctttaagctgtatcatcccaataaagtatcctttcatgaacggggcatgcaatagcttgagaattgctaggattaaattaaggaaagtaaagctactcagagcagcaggttttacaagcacaaactttacacatttttacaattttaaaatgcactacaataaacaaattagagcaacaaatttgaaatacaggcttctttacataaactgagaggttatacaaaactcagtttcacaagggaacaatctatacctttctaaaagttaatatttcaagtctccaatagacagaatattttactctttaaaatcctgcctttttgaccaaaaaaaaaaaaaaaaa

SEQ ID NO: 4144 - DNA, 759 bp, Macaca Fascicularis
  misc_feature (1)...(759): n = A,T,C or G
gannnnnnnnnnnnnnnnnnnncatcacccttacccgnnnncgnnnnnctggnngtgtgccactgattggctttgctgtgccccatgacccctgatgacatacatggttgagggtggnnnnnnnnnnnnnnnggttcaggccaagcgctggctcnatcagagacctcaggctagtcaccagctgcttcgcatcctcactgatgctctggtcccatatctggtaggacaagtggcggctggtgcccaggcattgcagctgtttgagtcccatgcagggcatcttggcccacagcttttcaacaagtttgcactgccctacatccgtgatgtggccannnnnnnnnnnnnnnnnnnnnnnnnnnnnnnnnnnnnnnnnnnnnnnnnnnnnnnnnnnnnnnnnnnnnnnnnnnnnnnnnnggaggagctgtcccaggctggctatgaggtggttgggcttgactggacagtggccccaaagaaagcccgggagtgtgtggggaagacggtgacattgcagggcaacctggacccctgtgccctgtatgcatcagaggaggagattgggcagctnnnnnnnnnnnnnnnnnnnnnnnnnnnnnnnnnnnnnnnnnnnnnnnnnctgggccatgggctttatcctgacatggacccagaacatgtgggtgccnnnnnnnnnnnnnnnnnnnnnnnnnnnnnnnnnnnnnnnnnnnactgagtgtacacgttnnnnctcnngtaccactaacagatgattgatca

SEQ ID NO: 4145 - DNA, 723 bp, Macaca Fascicularis
  misc_feature (1)...(723): n = A,T,C or G
agtagtttcaaagtcccagtgatggcactggctcacttcctcagctgtgataatttgnctgggactcactggccaatgagaatcctctttcctctttaccaacccccataatcagatgattcctccaatatgaaggccgctactgcaagggatgggagcttctccaactagggcatgttggaataggaacattccccattaattatgggagacaggggtgtcaggtcttactgggcttctgtgctacagctcccactctcctaggcagaggagaaagagtcctcccacccctcatctctctgagcttcttccatttgtgaatgctaggagtagggtctctggggctatgtaggcctgagaatatggatcttaaagttactgttggctccaaaacctcagagaaaactcagtatgaaggagcacttccttgccatcaaaatcttcaagtaaaattaaaaaatagggctgggcgtggtggctcatgcctgtaatcccagcacttcgggaggccaaggcaggtggatcatgaggtcaggagattgagactgnnnnnnnnnnnnnnnnnnnnnnnnnnnnnnnnnnnnnnnnnnnnnnnnnnnnnnnnnnnnnnnnnnnnnnnnnnnnnnnnnnnnnnnnnnnnnnnnnnnnnnnnnnnnnnnnnnnnnnnnnnnnnnnnnnnnnnnnnnnnnnnnnnnnnnnnnnnnnnnnnnnnnnnnnnnnnna

SEQ ID NO: 4146 - DNA, 769 bp, Macaca Fascicularis
  misc_feature (1)...(769): n = A,T,C or G
gagttcagttttgtcggangtctgcagttnnncttaaggatgtgataagaatgtagcaacacatttgtatctttgaattttgaaaaggaaccaaattttaaaatttagtttagtttagttttgtttgagacacnnnnnnnnnnnnnnnnnnnnnnnnnnnnnnnnnnnnnnnnnnnnnnnnnnnnnnnnnnnnnnnnnnnnnnnnnnnnnnnnnnnnnnnnnnnnnnnnnnnnnnnnnnnagctggggctacaggcaggtgttttttaaaaacggaattcttaatacattaaaaaaatgaaatccctttaaaaaagcactagaggaaattctgtgtttaaagatttacnnnnnnnnnnnnnnnnnnnnnnnnntatttcctaacataacttttgcaaatctgaatttttataaaaagatttttaaattaaaaatttttaattatactaagttttactttttaagtaattttgagtaggtaatatttttataaagacatttgtatggttcgaagaaaatatatgaaaggtgttcaagaagagttttgcccccaattctgtccactgtatacccagtcctccccacttctacatacatatttcagataggtatttctcgaaagaaagaacttatgctgtgaaacttatatgtctacttaggtctcattttnnnnnnnnnnnnnnnnnnnnnnnnnnnnnnnnnnnnnnnnnnngaatggaaataactttgtgagattttgagctgagtactgtaaatagtaaaatggacta

SEQ ID NO: 4147 - DNA, 728 bp, Macaca Fascicularis
  misc_feature (1)...(728): n = A,T,C or G
gctgttgttgcagtgattcatgagcagtaagctggagttcgggtggaagaggggtttaccaaaatcaaaattctnnnnnnnnnnnnnnnacttacagggtttctttgagaggcttaaacatttcaaaagttttatttaagccactctaactctgcatgaaaaattggagttagaaannnnnnnnnnnnnnnnnnnnnnnnnnnnnnnaagcttctgagtatgtttctaattactttatgccctgctttatttagcctcggtatatgtaacgcatggattattttttccctctagtttttaactgtatcctagataaaaactagcatatactaagaatgtttttacattctgtttcctcctgtgatctttgggaannnnnnnnnnnnnnnnnactctgatgctttttagtatgaacaatgatagttttctgaaatctgaaaatcggtatctgagcatgtgatgtggcaatgcattcttttagataagcactaaacaaagtatggaccctccatttgtgtctttaagatttaaagtgaagtaaatttctaaggaactgtgtcctttcctagcaggaataaacagacagtgaaaatttggtaagtatgtaactttannnnnnnnnnnnnnnnnnnnnnnnnnnnnnnnnnnnnnatagcataagataatgtttaaaagtgagcaataattattgcatctcttttgtgacttaatgtatatatgtttaacat

SEQ ID NO: 4148 - DNA, 699 bp, Macaca Fascicularis
tttctgcataatgttgttcccctttttcctctgtctccaaactgaaacttaaatagcagcttgatttgcttctggtcaaacatttttaggaagaacacttcctaggtatgtaatacgttccgtacacacaggaggcatataatggcaggttgttcttttattagtgatgctacatttgatcactggttagggtagtgactgccagatctctccattgtaaaggtatgttattttctttgcaattagtaagtaattgggtgataatttgcacctccttttgcaaatttacaatcatctacatgtataatacaagtcatggattaaactggaaatcaaaagttaaatattgatttaacagaaagcaatgatattgaaatgcctgcatattgaaatctgtaggatgtggccaaggctctacacagtggtaaattaacatcccttaatgcatacagaaaacgacgatttggggatagaacattttgttctctgtatcctcaacactactgtgatgccttttgcatagtaggcacttgataaaactcgagaaaaaaataagtattcaactcaagaaacaaaaagaggtaccaaataaagcagatgctaaaagaaggaactaattcatgcaattaaaattagaaattaagtaataagaataagcagattatggatttattcaattttccaaaaaaaaaaaaaaaa

SEQ ID NO: 4149 - DNA, 2822 bp, Macaca Fascicularis
  misc_feature (1)...(2822): n = A,T,C or G
agttccttctagccggggcctctggactccaccatccccactgtggttttccttccctggcctcttatcttcatcatcgctgtacatccacgaacatttcctgagctcctgtgtgtagagcgttgtgctcggtgctgtttgcaggggaatcaaagaagtaggagataatacttcctcttcttgacggccttatggttaaggtgagtagctaaactgtatatatgaaaaagaaatgatagtgtaaaatgacaggaagggcactaggatttcaagagagagtcatccctgaggctggctttcctaaaatgtgatctaaggactgtctgcttcagatcacttgtggtggtggtagtagaggatggggacagggatgggggggggtgaagaatgttatttataatgcacattcccagggcccacactacacttcgtattcacaatcataaggaatgcagcttacaaactgtatatttagcaagcagccatcccaggtgaatcttgtgctccttaaggtttaggaatcactcgtctagggtgaaagtctcaggggaaggtttcgccgaggtgtttggccttgcagaaaggggagtgaggacttggggggtgaagaaaggaagaggatggaagcccactgaggagtctgggcaggcaggggaagggtgaagacccagggatctgctcacaaacagtacctttctcatccagtctcctgtctcggggaggatctgtccacctgtcccagcgcccccactgccactgctcctcctcggattgcctccctctgcctctcttattgctgatcaactgactgtatgtacccaggcctccccttcttggtgcaatattataatgatgaggtagcccagcggaggggctggaggtgcttagccagatgcgaaggaggccactgtgcgctgcggtgctccttgggctccagccagcttatcttctcactgctgttgttctgccgagaaggggctggagagggtttggtgtgtgtgttttgccagcctcctctctcctcttccgcagcccttgagctttcaaatgctcatttgtaaagaaataaaagttggagcgttagaggaatctctcagtggcagaattagtcaccaacacctgcagattggctttctgctttaagctttaacccttccaggggcagctgccaccaggtagaaggttcagtgagccgtgactaggggcttgctctgagaggttcagggggctttgggtacctgcgcaggaggggatgctctcgtcaaccttgcttctggagttggggatggcattttttttcccccaacataattccccctttaaaaacactcatcacgttaaattgtaactatttgcttacttatgcctctcccatgggtgcatgtctgtctccttatgtgactccatctagcgtgtcccctcatgtagtgcccgacttgataaatatttgttgttaaagtgaatgaacccaggatcactgttcttctgttgagtttgcagagttgccagctggctgtacgcacttggacatagtctgaagggccacacaggatccaccataacactgggcacctcctggcacgtttacaagtgggaggtgatgactagaaatagaggaacggttcagtgatagggcaagagcacagtcagaagctccgggcctgtcatttactagccgtgtgacactgggtaagtctctgtttctctgagctccagctcctcatatgtaaaatgggagatggcagataatccctcccctaccctacagggttgctgagtaagtagataatccagatgtgttttgtaatctaaaagtaaccgtatagatgccataccctcacatacacataggtacttgcaatatgtctatctacgtctgtctgaagagcaaaatggtcttccgggggctaaaatagtttatgaaatgcctgagtgttcaacctagagggagccctctgacatgccattccctccttgaagttgagctacagaggacagtctgcattccctgagactggctgcagcactatttttctaggtgtttggaggcagaagttacccaattcttgtagactttttatgaatgtaagttggcaggccattttctatacagatctgtgacatctcagctgaaattttgtctgctaaattcccactgaaagaagtttaccctttgccttcttctcagcaaagctcagagcgtctttatttttccgtttccagggccagtgactctattcctgttttgtggagggagatgttttggctcagaggcacagtgctttggcctgaggaatgataggcagaatcaagacaaagagggctttctgccctagagacctttcctaggctgcaagaatagccatgctctgtcggccagtatgacaagatgaagaggtgcctgtcagatttggaagggcttgccccttgggcgagatctttagaagttaaagctgggccaggaggattggaaagagcaagaatttgaaaaaggatttactaggccnnnnnnnnnnnnnnnnnnnnnnnnnnnnnnnnnnnnnnnnnnnnnnnnnnnnnnnnnnnnnnnnnnnnnnnnnnnnnnnnnnnnnnnnnnnnnnnnnnnnnnnnnnnnnnnnnnnnnnnnnnnnnnnnnnnnnnnnnnnnnnnnnnnnnnnnnnnnnnnnnnncagctacctgggaggctaaggctggagaattgcttgaactggagagacagaggttgcagtgagccaagattgtgccactgcactcgagcctgggtaacacagcaagactctgtctcaaaaaaaaaaaaaaaaaaaaaaaaaaaaaaaaaaaaa

SEQ ID NO: 4150 - DNA, 750 bp, Macaca Fascicularis
  misc_feature (1)...(750): n = A,T,C or G
taattcatgagggatgannnnnngtcagaggtatnctggggaatagaacttaaacgccacaagtatatttttaaatgaagttcattgggttgtgttggtcatctttaagggctcttaagataatagagggtgtagggaaggagagtggtgctannnnnnnnnnnnnnnnnnnttttannnnnnnnnnnaataccttcccaaggtttatatacatgaataactttttaaaatgaaaataaataggactttgataaactctttgctaagaatgcattttaagnnnnnnnnnnnnnnnnnnnnnnnnnnnttactcgattcgaatgttcacatcttaagttgatcagtgaaattttatattgaagctgaagaattgttgggtggtttattttttgaaaaattactgcatttcagtaaagctgcccacttacctttttgtgctatttatgtttttnnnnnnnnnnnnnnnnntgttaattttttaaaggcctggtactgtgnnnnnnnnnnnnnnnngacgttatcagaagtnnnnnnnnnnnnnnnnnnnnnnacttccctnnnnnnnnnnnnnnnnnnnnnnnnnnnnnnnnnnnnaaacagatnnnnnnnnnnnnnnngcagctattggtgnnnnnnnnnnnnnnnnnnnggcctatctggttggcctttttgaagacaccaacctgtgtgctatccatgccaaannnnnnnnnnnnnnnnnaaaagacatccagctagcacgccgcatac

SEQ ID NO: 4151 - DNA, 509 bp, Macaca Fascicularis
  misc_feature (1)...(509): n = A,T,C or G
caaaaaaaaaaaaaaaaacaaagtgccccccctgatgtgccccggcccggtccccagagcaccaacttccaggagccggtgcagccgctgacacagcaccannnnnnnnnnnnnnnnntgaagtactacannnnnnnnnnnnnnnnnnnnnnnnnnnnnnnnnnnnnnnnnnnnnnnnnnnnnnnnnnnnnnnnnnnnnnnnnnnnnnnnnnnnnnnnnnnnnnnnnnnnnnnnnnnnnnnnnnnnnnnnnnnnnnnnnnnnnnnnnnnnnnnnnnnnnnnnnnnnncaccgcggatgccacccaggacctcggaccttggagcctgcagggtgcctcggcccctctagccctgggccagacctcctcccggctctcgcccaccaaccaagtgttacaagccccagaatgctgcccggcctgccctgctaggcggactgtctgtgtgtctgtctctctggcgttccacctccaagnnnnnnnnnnnnnnnnnnnnnnccatctctctgc

SEQ ID NO: 4152 - DNA, 777 bp, Macaca Fascicularis
  misc_feature (1)...(777): n = A,T,C or G
gatgcaagtgtatggaccactgtgcnngnnnnnnnnnnnnnnnnnnnnnnnnnnnnnnnnnnnnnnnnnnnnnnnnnnnnnnnnncacttggatggggcctgctactgctatgtaggaactgcaggcacagatcnnctgatacttcagaagaagctaatgatcttgacttgtaacacgacattcttgattactggttcaatgtgttgtaacaccaatgagcttaacaaaaatttgaggtttctggctcnnnnnnnnnnnnnnnnaggacctgtatcaagaatggttttcaacctttcttctcgcggaccctttggaaatgcaatgaatacaagtcaaaagaaaagccccggtgtgagaagatatctgcaattcatgtaactgccaaggattgatttctagactatattaaaatgaaacccaacaaaaaaccctttatgaatcaataaattaaaaacaatacaacccaatggaaaaatgggtaatagacttgaactgtactttacagaaaggacaccctaatggccaataaatgtattaaaagtgtcagatcttattaatcatcaaataaatgcaaatttagcaaaaacattgcccatacacacacctacaggactggcaaaagtgaatctacctaacaataccaacactggcgaagatgtggaagaactggcactctcatgctggtgggagtgtaaacaggtagaaacactgtgaaaaatggttggattaccaatagtcatcttgctttttaaaccttaggaggataatgatctggc

SEQ ID NO: 4153 - DNA, 2388 bp, Macaca Fascicularis
ttgggtataaattctagggtaaattccagtttatcaatactagtttttaacaggacctgcctttcagggtgtttttttgttgttttgttggggaggggtttaatcacaaagtgtgtgggtttgggttacttcttgtttttatttttctgtccagaagagctttaccaggctgtgcaaagtaaaattcttctcaggcaacatttgcttttaaaaataatcatgaagagaaggctgttaaagcaaaaaaaaattttttttaaattttttcttgtcttccaagatccgatttccccatctcccacttgccatccagcagatgccatctgtcatccaagctggtcattgctaataaacaaggagactgtctcctgacagccagcactgtgtattatcactcaggaaccagcggatctgcaaagacctacaatcaaaagcaaatccccattttccttttataaaacattctaccctcacctccaatataaacacattaagagtacaataaaaatgtttaaaatcatgtactaataaattcattgtatgttagaattgcaatagaatggagagaaacatttagctagtaatgtatctgaaaactgaatgtcctatgtgagtattagattttaatagcatgctttaaagactgatgaatataaaagcagaagttttgcgttttttactgctttcaaagctgtatcctagtttagtgatacaaatgattgcaatttttctaaatcattaaattatttggtttggtggagtgaggcatggagcaatctggcgtcttctgatttgttaaagtagtgatgggagtgaagttgtaactgaaatttaagctgatcttcctttttgatatattttccgttgtgccagctcttgagattacttgcacaatgtggctataagttttaatattttgtggagcagagggatggtttttaaatgtgcttatggaaaagacccaataaatgaatattcctaacttagtaaagtagaataatttcatggtacccattaaaaaggataaaagtcttcctcttgccccagaagtaattcttgataccaagatatgctaggagtaggatgattcaaagcggtaacccaaattcataaagcaataataatgaaaacctacatagtatgttccctcctccaaagttttaactctaaaaattgattcctaggtttaattgtacttttaatttgcttattcagtacttagaatttgtttaactggtacttttattattttttagtgaaagacttttgaaaagtgccctttccccttaagagacagttggaataccagttgactgatattataagctcttataggggggaaaaaggagcttattaaagttctttactatactttgggaaaagatgtcttgcatcagtcttactaggcataaaagtcacacttaatgactggaaaaaacttgcttattgcctttccttatataaatattgtctagaatgaaagctaatataggaacaagactcccaaatccatgagaacccttagtgaatatattcttaatcattaatattagcccattatattttcatctgtatttgccataaaaaatttatttgcatttatgcctttaggataattttgtatctttctaatcttttatcattgctacacgtttttaaaaaagaatctttcactagcacatgccagaggttcacatctgtgctgttttgtttttcaaacaggttgtagctgtatttattggccatgcaagtagaggaaatgcacagtacaaatgtttttctttagcacgtaagggacctatccttgtcttgaaagtttgttactttaaaagcaagtatctctccataaatattatggccttccattttcttcatacattttttaggatccacttgtgcatgtagttgagaccactgtctcttaaaatatagcacttttcaattctctctgaagaaatacttatgtactactatcacatgttgtaaattttcatgtaatagtgttttctgtgactaaactccattttgattggcagctaagactttttttcctgtggcttttatttatctaagaggtctttgcatatagatgaaatgtatatttgcctggcggactatttgcgttgtgtggccttagtttgtttattgacattaacaagtgttttaaaaaggtttttaatgaatagtcttaaatctaaatttgtgtgaataatccttttaacacagtgcttttttgtagctgtctaagtgtgttaaattgttaagctatttctttgtaaaataggacaatggaatgcatagttttttttttttcctgtaaagtatttttttaataaacaaagtctgatttgtcctttaaaaaaaaaaaaaaaaaaaaaaaaaaaaaaa

SEQ ID NO: 4154 - DNA, 703 bp, Macaca Fascicularis
  misc_feature (1)...(703): n = A,T,C or G
caaattgatttgcacatacggcaaaattggtaagattacnnnnnnnnnnnnnnnnnnnnnctgnnnnnnnnnnnnnnnnnnnnnngagaataagaaaatacactaaacatttattttaataaggcctagaaaccttagttatttaataaattgccatggataattggtttcagtttcaagagttgattcatctttaactccctgtgttccagaaggaatcgtgctggatgtgtagacagagccttgtggtttgagacccatctgagctatcacacatttctctgagccttttcctgtctctctgatcacaccccacttcctgccaccactcccagcatccacctgggataggtcactctgacacacacacacacacacacacacgcacacacacgcacacgcgtgcactcgcgcttattcactatccaagctgctagtctttttattggctcctccnnnnnnnnnnnnnnnnaagcctcacctccctgctgggccctgatccagctgatctgtttgtgtatgaaccttgggagtgagtggccnnnnnnnnnnnnnnnnnnnnnnnnnnncatctcggcgctgactcccacagaagaaggaagacataatgaataaatgaaaccccatgactatttcaacattcatcagcccagtactccaaacctggctgataaaattggctacctggattaaaaaaaaaaaa

SEQ ID NO: 4155 - DNA, 262 bp, Macaca Fascicularis
aggtggttcgagaggtgtgctctgaacaagccgagacggggccatgccgagcaatgatctcccgctggtactttgatgtgactgaagggaagtgtgccccattcttttacggcggatgtggcggcaaccggaacaactttgacacagaagagtactgcatggccgtgtgtggcagcgtcatgtcccaaagtttacgcaagactacccgggaacctcttacccgagatcctgttaaacttcctacaacagcagccagtacccc

SEQ ID NO: 4156 - DNA, 1264 bp, Macaca Fascicularis
  misc_feature (1)...(1264): n = A,T,C or G
tcctgccatagtggagctgnnnnnnnnnnnnnnntggagggtccggctggccatcattgagtatatgccgctgctggcaggccagctgggtgtggaattctttgatgaaaagctgaattctttatgtatggcttggcttgtggaccatgtgtacgccatccgagaagctgccaccaacaacctcatgaaactagttcagaagtttggtacagagtgggcccaaaataccatcgttcccaaagtgttagtaatggcaaatgatcctaattacttgcatagaatgaccactttattctgcattaatgcgctgtctgaggcctgtggtcaggaaataaccactannnnnnnnnnnnnnnnnnnnnnnnnnnnnnnnnnnnnnnnnnnnnnnnatgttcgcttcaatgtggccaaatctctacaaaaaattggaccaattctagatactaatgctttacagggagaagttaagccagtactacagaagttaggtcaagatgaagacatggatgtcaaatactttgcacaggaagctataagtgttcttgcattggcataatgaggagcaggagggaaaagacctttgctaaattcttatcacagatttctagtcaatgtgttcttaactgggtggagaaagaatggaaaaccttcaagatctcatccaagcaaatggcaacaacttagaagaaatcaaattttagtgacttgattctttctaaagatgaaatgggattgttttttacttgtcttctttgttaagtcattatttaagccattcttactgaccaattcctgacacttgatacttgattttctcctaatgctttatccatcaccaccggggctcctgcatcctcactgtggaatcaggccccagccacatagtgttccagacaaagcctggaagggtgtggacccaggcgtggagtggagtgattctcttgacgtttacatatatctctgtgtctctccatcattccaaagttaaatgtacatgtttagaataacttattttataaactctttgggaggcatgttgagatttgaccgtagtgaaagccacattttcctgaattatgatggtctgcatcagtctcacatgaaaggggaatgtggaagctcagggttaatgtagtggttattttggtttttatttgctcaattttgtctgtagtcatgtcattcagaaacctgaagtgtggctgcatcttgctgctaatgtgtgatgttgacacctaactgaattgaacagtcaccactgtgc

SEQ ID NO: 4157 - DNA, 2251 bp, Macaca Fascicularis
attgcagatccaaaatgactacctcttccaactgggatttggggagctgtggagggtgcaggaggaaggcatggactcggagattggctgcctcatccgcttctatgcaggaaaacctcacagcacgggtagctctgaacggattcagctctcaggaatgtataatgtccgtaaaggcaaaatgcagttgccagtgaaccgatggacaagacgccaagtcatcctgtgtgggacctgcctgatagtatcatctgtgaaagacagcttgaccggaaagatgcatgttctgccactgattggtggaaaagtagaagaagtgaaaaagcaccaacactgtttagcatttagctcctctggaccccaaagccagacttactacatttgctttgatactttcacagaatacttaaggtggctgcgacaagtctccaaggttgcatcccagcgcattagctcagtggacctctcatgttgtagcctggaacatccgcctgccaacctcttctacagccaagacctcactcatctcaatttaaaacaaaacttcctaaggcaaaaccctagccttccagctgccagggggcttaatgaactgcaaaggttcaccaagttgaagagtcttaatctttccaataatcatttaggggacttcccactagcagtctgcagtattccaaccctggcagagctgaatgtgtcctgcaatgccctgcgatcggtcccagcagccgttggagtgatgcacaacttacagacatttttgttggatggaaactttctccaaacccttcctgctgagttggagaacatgaagcagcttagttatctgggtctttctttcaatgaatttactgacattccagaagtattggagaaattgactgctgtggataaactttgtatgtccggaaactgtatggagacccttaggctacaggctttaagaaaaatgcctcacattaaacatgtggatctaaggttgaacataattaggaagctgatagcagatgaagtggactttctacagcatgttactcagcttgacctacgagacaataaacttggtgatctagatgccatgattttcaacaacattgaagttttacactgtgaaaggaatcaactggtcacattagacatctgtggctatttcctaaaagcactctatgcctcttctaatgaacttgttcaacttgatgtttacccagttccaaattatctgtcctacatggatgtttcaaggaaccgcttagaaaatgtgcctgagtgggtatgtgaaagccgaaagctagaagttttggatattggccataatcaaatatgtgaacttcctgcccgcttattttgtaacagcagtctccggaaactactggcaggacacaaccagttggcaaggcttcctgaaaggctagaaagaacctcggtggaggtcttggatgtgcaacacaaccagctccttgagctcccgcctaaccttctgatgaaggctgacagcctgagattcctgaacgcatctgcaaacaaactggaaagccttcctccagccacgctttctgaagagacaaacagtatcttacaagagttgtatttgacaaataacagcctcacagacaaatgtgtgcccttgttaacgggacacccgcatttgaagatccttcacatggcctataaccgacttcagagttttccagcaagtaaaatggcgaaactggaggaacttgaagaaattgatctcagtgggaataagctgaaagccatcccaacaacgatcatgaattgcaggcgcgtgcacactgtgattgctcactccaactgcatcgaggtctttcccgaagttatgcagctcccagagatcaagtgtgtggatctgagctgtaatgagctaagcgaagtcacattaccagaaaacctgcctcccaaactgcaggaggtagacctgaccggaaaccctcgccttgtccttgatcacaaaaccctggaactactgaataatatccgctgtttcaagattgatcagccttctacaggagacgcttctggagccccagctgtttggagtcatggttacactgaagcttcgggggtaaaaaacaagttgtgtgtcgcagccctgtcggtgaataacttctgtgacaaccgcgaagccctctacggtgtgtttgatggagaccggaatgtggaggtgccctaccttctccagtgcaccatgagtgacattttggctgaagagctgcaaaaaaaaaaaaaaaaa

SEQ ID NO: 4158 - DNA, 640 bp, Macaca Fascicularis
tactgtgatattcttaatgtcttaggccatggatcctttcaattatctggtgaatgcctatggattcccttttcagaataatgactttaaatgcataaaataaaataaatagaattacaaaataaatccattatctcgatatatactcatgaaaatattttttaaaactcacatttgtgatattgtaatacagttgacccttgaacaacactgctttgaactgcatgggtccacttatgtgtgaattttcttgtacctctgccacccctgagacagcaagacctagccctcctcttcctcctcttcctcagcctactcaatgtgaagatgacaaggatgaagatctctatgatgatccacttccccttaatatatagtaaatatgttttctctgccttatgattttttaaataacattttcttttctctagcttactttattgtaagaacacagtgttatatatctatatacatatatgcataaaatacacatactgaatatgtgttaatccattgtttatgttatcagtaaggcttctggtcaaagtggactattagtagtttagtattggaggagtcaaaagctatatgagatttccgactacatggggtttagcgacctctaacccatgcattgctc

SEQ ID NO: 4159 - DNA, 765 bp, Macaca Fascicularis
  misc_feature (1)...(765): n = A,T,C or G
cagagaccaaggcgccccgtgggaggaagcccatctgccacctgtnncggatttgactgttgagttnnntaaactgaatttgcaaaatgtaggaagtagcgtttctaagtcaccagatgaaaatacgaaaactaaagataagatcctgactnnnnnnnnnnnnnnnnnnnnnnnnnnnntgttagagcctcctcctcccgcagaccaactcaggaccggccgcaggaggacggaaagcgaaatgtcagccaggatcgctaaaatgtccttgagtcccagcagccccgggcacgagggtcagctggaggtcacgagggaaccggccaggcggcttttcctttttggagnnnnnnnnnnnnnnnnnnnnnnnnnnnnnnnnnnnnnnnnngagtgtgcagatgtnnnnnnnnnnnnnnnnccagccgtgcacagatggaagactgctgtcctgtgctactcaccctcggacagacagagttggcccagtcccgcggtgaaaggaaagttcaagtctcggcnnnnnnnnnnnnntggccctcacagctacagtccggggagaaacagtgcagctgggagcaaccccggaaagccgggcccgggcagtcctgggcgctacagccccgcgcacgggaaccagctccgnnnnnnnnnnnnnnnnnnnnnnnttgccgccctgtaggcttagcactgggctctccgttggttcttcagttttaaagaaggaaggatcatatgtttgttgctaaactgtcacaaaggaatata

SEQ ID NO: 4160 - DNA, 2741 bp, Macaca Fascicularis
tattatttcatgaaactaatgtgaggaaagagactaggttgatgtataagtgacattataaaaatacatgagggatgatttgattagaagcagcattacacagtgataggagtaatggtttagaactagacccaggtttgaactcttagctctatcattataggcatttacttaacttttcttgtttgcttactcaactgaaaactgaagataataacacttgtttacatggttgttgtaagggtcatatgaataatgtctggcaaatagtaagaactcaagtaactgtttcattctttccagaaggagattgactgaaaaatatttggagtctcccgcagccatattccttggtcagcttctatgattctctttggagcttaattcttaatccctttattttcacttgcttgttgataacaaagaataatttatttcaaaataatttatttcaaaaataatttttgaaataatttatttcaaacgcatgtattatatttgatgggccacactaatagttataaaccaaacaacagattggggatggggaagtggatggagtgagttcagtcacatgtctgggaaaactcaatagtgaacacagtctcaatttttgtcatactggagagatgaaaacacaggtagaggatttcaaacaacagggtggatggtgagttaaaagtgctgaagttctttcctggtgtctaacttaatgcaatgtggtttatctctttgcccttttctctactattcaaatttaggataataaagattaaatgtttctaaatcttactttacaatattcaagaaaaaaggtatgcttttgtccactgaagtgcaaagcagagttatgaaaacctgctgaacacattctttattttcaacacatgttcttgtctttccatcatcaaatgcatgttttatttgtactgtagttgggtgaccacaagttaacaataagatcattcacaagacccttgccttagatgtgttcacaatgaagtaatcagccaaaatttttactttcctttgaatttttcaattcaaacacaatgtgtgcttgcttttacacaatagggttcagggattagagggttggctctttaaataccgtcagagacacaggcaatcctacaccaagtgctcagaaggaaggcgcctacgcctgggaatgtccagttgcccttggagagttgaagatggcgtttctctgagtcaggtcaaagttaacacattaccttcgcttcaaagactgcttggattcctttcggtggattagtcaagatgttttgctgactgagactaggaaatctataggagggcgggttagtttacattgttgcttgtcattgtcgctaaaacactccaaagccttccttaaaaatgcacactggactaaaaacgacagacaaggaacaaatcctgggctggtaattaggcgaagcactatctcctcttacctccttgtagattttttttccccctttaagtacgtgtcctcagatttctttgtcatccttggagttcactcacctaagcctgaaactaataaagcttggttcttttctccaacacgcagagggagcgctaaggtgaatgcatcagacccacactgccgcggaacttttcggctctctaaggctgtattttgatacatgaaaggcacattttccttcccttttcaaaatgcaccttgcaaacgtaacaggaacccagctaggatcatcggaaaaaggaggaagaggaggaaggcaggctcgggggaagctggtggcagcgagtgctgggtctggcggaccctgccgcgaaggacggtccaggaggctctccggggagccagttctgccggtggcttcttctgtcctccagcgttgccaaccgcacctaaagagcggccgcgactgtcgcccacctgcgggatgggcctggtgctgggcggtaaggacacggatctggaaggagcgcgcgcgagggagggaggctgggagtcagaatcagaaaagggaggtgcggggcggcgagggagcgaaggaggagaggaggaaggagcggccggggtgctgccgggggtgcgtagtgggtggagaaagccgctagagcaaatttgggccggaccaggcagcactcggcttttaacctgggcagtgaaggcgggggaaggagcaaaaggaaggggtggtgtgtggagtagggatgggtggggggagttggaagcaaatgacatcacagcaggtcagagaaaaagggttgagcggcaggcacccagagtaataggtcctttggcattaggagcttgagcccagtcggccctagcggggaccccagcgcccgagagaccatgcagaggtcgcctctggaaaaggccagcgttgtctccaaactttttttcaggtgagagggtggccaaccgagctttggaaagacacgtgcccacgaaagattagggcgtgtgtatgggctggatttggggaaaagaaataagcagtttttaaaaagatgcgctatcattcattgttttgaaagaaaatgtgggtattgtggaataaaacagaaagcgttaggaagaggttgaagaatgaattgaagctgattgaatagacagccacatctacttgcaactgaaaagttagaatctcaagacccaagtatgctactatgcagttattttatttgatttttctaagaaactaaaaaaacttgttaataataaatacttaagtgtggtttattggttttccccc

SEQ ID NO: 4161 - DNA, 842 bp, Macaca Fascicularis
  misc_feature (1)...(842): n = A,T,C or G
ctggnnnnnnnnnnnnnnnnncttattatnnnnnnnnnnnnnnnnnnntatttttacctactgctctggtggttgtcctcttttcggcaaagttggagtgagtgccaagctctccatctgtgnnnnnnnnagccacagagagactcaccgtagtaagggtaggagagcagctgccttattctgagtcccaaagattacttgggggtgattgtcacagaggagggacagaaaggatatctgctgaccgctggcctgcccacaccatgcccacgtctccgttcctgctcaagaatgtgtgcgtgtggcagtgctgggctggggagtccctgtctctcccagcatctagcagtattaaatggattcattttaaaaatagcttctatattttgtaacatgtctcaaacactcatactgggttccacaatccactgttagaataccgatggttagggtttctgaactaaataatgtatcgtgcctggatcattactagtgccataaccctgcttcttcaacatttcacagaacttctcttttatataaaggcaagagcataaaatgagttcagatgatcacaagcaggtgagtgtttttggagaagaaagttggagtaggagactttcacaagtatggagatagannnnnnnnnnnnnngctcaagtaagtttagggaatgattaatgtttcacttgcnnnnnnnnnnnnnnnactatatnnnnnnnnnnnnnnnnnnnnnnnnnnnnnnnnnnnnnnnnnnnnnnnnnnnnnnnnnnnnctctgtttaccaatgtcatttggctatagaaacattttctcctgctgattgtgnnnnnnnncatgta

SEQ ID NO: 4162 - DNA, 1954 bp, Macaca Fascicularis
acaagattaatacatacagcagttatttatgtatgtatcatggtcagagcattctcagtatttggcaaaaatttgttaataacaagaatacatatcagccagcaaaatattgactatagagatttaatatttattaacagctcagaacttaccttataatttcaactggcagctcaagataaatattatagccacataataggtccacagttgatggcggttgaatttttaacggaagaaagtggagaaaagttgtacactctctaggaaaaaaaaatcaagtttcttcattccaactttagcaatttctgttttgataccctacagacatgttccttcgaaagttttgaagaaagcccacttgctagaaattcacatgaggtaaaataacatatgagttattaaaaggtctttcagcagaactgggattaatttccatatccttcaggagcccatctgtactcccttatcacacaaatggaattttggtatatgggttaaaaattacttaccaaaaattaaattaaaaataactgagccatagtcaaatcagcaggctatatttgtcttatttgtttcttcattcaaaactggaagaaaagaatagaactttccaaagcagggaatttatttcatatcaccgtcatgtcaaagatacacagttgaacaccaataggcagttgcactcaaatgccctgatgtccagtggccttcaagattcttcatgattggcctccatctcccctcttcccaggctgcctctctgacttcacttcccaccaccctctcccttgtctgccctcctctggctcattgaccttgttggaatatgccaagctcactcttcttcaggactttcacatcacctttctttctgtcaaaagtacttcttccagccccatatccatgcattctttcttcgagtcctcaaatgacacaagactcccttcctctcagtataaacaagcaacactccatcttaccctgctatggcaccctgccactccctatcctcctccttaccccactttatttttcaccattttccatagtgccagctgaaatactatacatttacttattgctcatcatctgtctcttcaaacacaatacaggttttataagcaaggatgtttgcttgtgttattattgctcaataaacaatcttagaacacagcctggcatatagtaagtgctcagtaaatatttgttaaatgaataaaagctaactacagaagcaggagatatctttccttaaatgtatataaatatatgactttctgcaatttgcaatgctgcccatatgaaagtgaaagatactgtccaagtgattaaatgaaaggattaaaaagagactccttccttatatttcatatttaaatgtattgttgttttcattttttgtttgtttttacattgtcaaacgctctccactaaatggtaacaaattatatgctggttgcaacatcacagtctgacatttttccgtctaaaccatcttctatgaaataaatccacaaattttgtattgatatgattaaaagagatctttgtagacaatgttagtatatggtaagcagccagaagctataggctatgatccagttaaccctttatcgtgattatcataagcattaaatatttattgactatcctgttgtgcatatcacaaggaaataaaaattcaggtctaggtagattactgtgtaggaagacagtctctcccctaattccccacacttgaaataggaacttgtatttttttttaatttatttttctccatactgctgaaggtcttatttcactccttcttgacttttaaaatttcctcctactcaattgtaaacttttgaatcatggaacattttgaatccaactattagcttttaaattctaatcaggccaaaggagatcaacaataaactcagattggaaaaaaaaaaaaaaaaaaaa

SEQ ID NO: 4163 - DNA, 667 bp, Macaca Fascicularis
  misc_feature (1)...(667): n = A,T,C or G
tgccactgtaataaaagctantntggannngncgtgtccattattagtgagattagattaatatttagaaagtgtcttcctgtcttaaagataattgtattttgaattatacaacttatgtggggcaacaaatttcatttgtttactgcttatccttcttgcaatatgatttttaagaatggcaattatgtggcacaattgccattactcttcccccttgtacccatggcagacattagtaattaatcatggccatcatttcctctaggctcagatgtgagatatcagaatccttttccatgcatgttcctggaagccactgagaattgactgggaagtggggaacacaccacatgaaacatacatgccatttctggttgggtcttttatccccaacctnnnnnnnnnnnnnnnnnnnnnnnnttgttttagccaaaactgatttatgcattgtgttttcagaacagattagggtagatttttgtgtgtgtgtgtgtgatgaaaataaccttagtaattttgtttttgttttggtaactcaggacaactcacaccccctgattgtcctgattttttatttaaatnnnnnnnnnnnnnnnnnnnnnnnnnnnnnnnnnnnnnnnnnnnnnnnactttacgtttattctattgcatgtcattgtctttt

SEQ ID NO: 4164 - DNA, 723 bp, Macaca Fascicularis
  misc_feature (1)...(723): n = A,T,C or G
cagcctggaaaataaatgtactatattaactgaaataccactctttgtgtaggtattttgtcatatgnnnaagacaaagctaaaaagaatggaaatcatatcacaataacttaagtctttcttcaaagtgcatgcagtcttttgcaatacctcattcagccaagtatttgttctcttcttcattcagtataannnnnnnnnnngtttgcttagaaggcaacattagaaggttagagttcatcagaaatacataattttaaaatgtgagttcaactgaataannnnnnnnnnnnnnnnnnnnnnnnnnnnatacctgttaaaagattgcaatatatgataattatttnnnnnnnnnnnnnnnnnnnnnnnnngattttctggaaatgaataaaatcagttctaaaaccaaagctgatttttagaaaatgtgaaaatataaatcagccctatccataatagtttctccaaaactttatcttacagannnnnnnnnnnntaatataactattcaaaaatnnnnnnnnnnnnnnnntgttttgaaataagttaaaacactctaaaatacgaatactgtagtttaaaacaaagaaactgggggaaggaaaagtagagaaataaagtccaaagctttatttgccaagttttcttagaatgacttttaccaatttatgaattcttattaacagaatgtataatggaaatactgaaagacttttgtctaaa

SEQ ID NO: 4165 - DNA, 650 bp, Macaca Fascicularis
  misc_feature (1)...(650): n = A,T,C or G
ccaaggnnnnnnnnnnnnnnnnnnnnnnnnnaaagaagcaagtgtacgttgacaaggtggagaagatgcagcaggcnnnnnnnnnnnnnnnnnnnnnnnnnnnnnnnnnnnnnnnnctagagcaccgtctccggacacgactggagagggaactggaatnnnnnnnnnnnnnnnnnnnnnnnnnnnnnnnnnnnnnnnnnnnnnnnnnnnnnnnnnnnnnnnnnnnnnnnnnnnnnnnnnnnnnnnnnnnnnnnnnnnnnnnnnnnnnnnnnnnnnnnnnnnnnnnnnnnnnggagcagaaatatttggaggannnnnnnnnnnnnnnnnnnnnnnnnnnnnnnnnnnnnnnnnnnnnnnnnnnnnnnnnnncaacagtcatcagtcactcnnnnnnnnnnnnnnnnnnnnnnnnnnnnnnnnnnnnnnnnnnnaaagaagaggaagaaatcnnnnnnnnnnnnnnnnnnnnnnnnnnnatggagggcaggnnnnnnnnnnnnnnnnnnnnnnnnnnnnnnnnnnnnnnnnnnnnnnnnnnnnnnnnnnnnnnnnnnnnnnnnnnnnnnnnnnnnnnnnnnnnnnnnnnnnnnnnnnnnnnnnnnnnnnnnnnnatgtccannnnnnnnnnnnnnnnnnnnntgctctcc

SEQ ID NO: 4166 - DNA, 765 bp, Macaca Fascicularis
gaataagccccatccttccctgcttcttggtagaagggctaatgtaccaactaagagagagaataagctataggtctggatagccacaaactaaatacacccccacaggagaatccctaagcttctatggtaattttgaaactaagagaaaataagacagtatgagaaggcattatgctgctttaaatatgacttgggaaatggtcttattttacaatcaaatataccacttgcttccatcatgtaaatattaccagtatttggtttcagattttcgtgaggtaacattgtctaaatttactgttggtctgtatacttaaatatataacattcatttgcagtatttcatttatctcaaaagattagtgtatatctcatctagaatgagacctcttatgagaataggagatgggaaagccttttgaaggcatttggcagtccagagagtctgcaatgaaattgttccactcaggaatcggtatttatgtaagatacattctgtaccatgtgtatttttttgtttatattaggattattctcaaagtcaattttaagagtgaatgaaatttttccctcaagtaaatctacccttaagtagcatcatgctcaagggcctacaccagaaagtctgccccactactctcactattataccattcactgaggaaaagctataaaaactgaggaaaatgtctacttattttttaaaacaacgagaaatgctttttgcttttcaagtagtgtggaaacatattttaataacta

SEQ ID NO: 4167 - DNA, 317 bp, Macaca Fascicularis
ctcccacccaccccgggactgataatgtgaagttcctcattttgcacaagtggcactagccccagggccaacccttccttcctcaaccaccaagggcggggagttctggagtcaagagggcgaagagccctggcctgccaggtctcccactcccgcggtgcccccttcccttcccttccctggggccccggaccatatttattgcatgcgccccggcggccccgccatcccgagcccaggttgggctgggctggaacgcggtctctttagctccctcctcttcgtttgtatatttcctaccttgtacacaacaggct

SEQ ID NO: 4168 - DNA, 2134 bp, Macaca Fascicularis
ttgatgcagtaacattttcccatgatatacaccatgatatagaatagaaacagtttcttttaagacaaggactacctttaccaaatttatagtaagaatatacagtgtgcctataagatgaaaacacgttaaattagcaaaactttgggttcaaaaaggtgtatctcacacgccagtagatgaagtacactgcctccgctcatgctgacatttttgtcaacacactctgctgattattcaggataacatttttcataattggcaaggccatgccccctgcgtggactttctcagtgagtgttgaaaattgctaaatacaatttatgtaatttatttttgtcaatgaccttattagtacttccactgccgaactgtatttgtgggtggatgtgtgtatgaaaatgcagccttgactttttcaaaaaagaagttatgtaactttacacttcataaatttaacaaccaaaatgttatctgtaaaaagtgtttcagagaagcactgttttaccactgactggtttgatgggagttgattagataatagcttttcatctgtgtgttgttactgatactggccacattccagttggctgctaaggtgtctaaatgctcccaaacaaaaattacccataaaacctgtgacagagttctctgagatcatggatacagatcactgcacatctggatgggttgttttgactgagtttataatgtcacattccttgtaaacatgatacacctgtctctgtttaacagctagtttttgaagctaaagcatttattttctcccagaactcagcaatgccacattatttaccgatattgaacctgggagtcactaaaacattccaggattccaactatttcatcttcagctacaataaccctttgcttaggtaaattagcaggaaaaaaaatctgctttattttgtcataaaaggggaagtaaaggagagacaatgagaggatcaaatagttaaaggtttccattaccttttagagattaaagacagagatttgtaactattttcatgttttacatgctgaaagttatgtttgctgttagtgttacaaagaatcaatcacaaaaaaccttctgtgaggatcaagtatatacaaggcactgtgcaacagacttacaaatctacaaagaagtgtatccctgttgtcacactgctccagaggggcttacaacccatttaggaggataggattgacacacatgaaaagatactaaactggacagtaaataggtgtcaatcatgtgcaaggtgggaataaagcagctgatgaatggcaggtgcctgggtccataggaaacaaggatgaaagctgccctttgatttaagacctgatctgctgcctgccgagtcaatcactggttgctactgtgcccctcatctcaaaatcactgacttcaaatgagccactttattagtgtagacctcaggatttatttgcagccagggccacaaaatatatatcagattttcagcttctcatccccagcgttctgctgctaagccccgactacagacttccattcccaaggtgcacacacactcacactcatctctatatttactggatatatcaatcaaaataataacattaggaaggaaacgttggtgccaatacttatatactgctagggcatttggagttggggtttgagtaattttcagaaaaaacccttgggggcgtagcttcataattatgatgtatataaagtggtgtaagacagcggcatggaagatgaacagtttctgaagaagaaaacacactcatggattttctttgtgactataagacttaactgctataattcagtattgatggattaaaaattgatcttagcgcttagatcttctcataattcattactccattccaaatacctttatccaatacctactgtatgccaggttctgtgtgtgataggcactgggaagacaaagattaacccatcagtctctgcacccaagaagcttgcagtttagtgggggagagacaagaaaataagctatggagaaggaagcatgtgattccacaggagcacagaagaagaaaggaggaaaaccaagagggaatgatgcctgagatgaatatttaaaagacaaaaaaaaaaaaaaaa

SEQ ID NO: 4169 - DNA, 723 bp, Macaca Fascicularis
  misc_feature (1)...(723): n = A,T,C or G
cacaattcttagataattatttcaaatggatattgaaacattcttgataccagatgtttggcccattccattttgatgaaacagagctgttgttttggaaatcattatttttctagaaatggtgaatcttttaaagaaaattatctaatggaaggttgtgggaaggtgttttttttcttttttttcctgttttaagggatagtaccgggtcttacttgaatgaaagtctgatatttgctnnnnnnnnnnnnnnnnttctgtaccctggttgatatgtagagtagatcgtctggtgctctcaattgtttttattgacatttgttattttgttataaagagaatgttaatatggtataaaactctgtgacaagataagcctcctgctttaacttcttggatccaactaagagatttataaactaatggcataaatgtctggagccacccttggcagttacagcaggagaacactgtcttaatatttcttttacattctttcagaaggtgaaataggattgccctgtattaatgtagaaatgtctgtaaacagagcttgtatggtttgctgggtcaaacaatgtttccaacttaaaatctatctcattgccactttaactacttttagtcatatttattaagtaatgcagtttgtactttttttattttgtaacattttgtgatttttttgtacaaacactgtatttgtacaatagagcaattccc

SEQ ID NO: 4170 - DNA, 2419 bp, Macaca Fascicularis
atatcagggctgcggggaaggcacagaaggcacagccagagaggtcggaaatctgggaaggggcaggacgcgaaagccaggagaaggttccctgggacggagagctccacagagccatggccggggtgcaggcgggagccggggcgaatacccaccagcgtgcagagccgtcgttcctgactctggactcggtggtcgtactgtcggcttgaaaccagttatgacgggagcatttacacgaggaagcagcacccaccatacgcgggttccattgaggagctgtcggcatttacagcacacaggagggccgtgtggggaaatgcctctgcgtgtggcagccatactcctgagagctgtgttggcaggaaggctgcagtgcccagtgggggtgaatcaagaacaggaaatgggagaacatgatgcagctcctgcctggccatctctcctggggctggagtttggaacccggcagccatgctgtgaggaagctcaggccaagtggaggggcaggtgctggattccgacagctcagccactgccaggagcaggtctctgccaaggccagccacaaccctcagatgtgtgagtgccgagccgtccaatgagcgcagcttcctccagcccccaccgccagtcagggtcccgggccccaggtgcagagccaaccccactgccattcggggtcccggacccaggcgcagagccaaatcttccctgtcgcgtccagcccactgacagatccctgtgctaagtggctgcttgctgtcattttcagccactgtttggctgtggtttgaatatgctggtgggtgaattgttcaccaacctgagcgcttacgatgaaggggcaagttgtccacatcatgggccaggaggaaacaggaaaaatgaatcctttgtaggataaaaaaaaaatctattttagattcactggcagcagaggcaggttagagatgaatttaacagctggactgctgggcagagccccaaccccatctcctgtaactgcgcggcctcaggccagttatggaaactccagctgcctctgcttccccatctataccacgggcatagcacagatgccccctctcgaagggctgctctgaaggtgcagagaatgcatttttgaaaagtgtctggagtggtatctggtacgctaatgccagatttgataaattgaggcaaaacctgaaacctcctaggtgaggtttttgttccacggaagagaccagcaaggaacaggcatttgaccctgttgacaagtgctgccagggaaccgggatcgcaccacagtcatcacagagctgggtcagcacccaaggggtaaacgcaatttcagctgggaggaaactcaaattctataatccctttacagtgtttttggggagaagaaaatagcagaaaatgcacccaaagtcctccatttttattataactcccttctatccccattccatcttcctctctctccctttttctctttctccctcctttactccctctctctccctgtctcacacaaacatgcatgcacacacgtacatactcaggcatacacagaggcaagcatgcacacacatgcatgcacacacgtgtacatactcaggcaaacatgcacacacgtgctcatgtgcaggcacacactcaggtacacatgtacataggcacacaggcacacatgcatgcacacacgtgtacatacttaggcacataggcacatgtgcaggcacagacatacagaagctcatgcgcacacagacacgtgcacacacatgtacatactcaggtgcacatgcacgcacatgcacaagcacacagacgcatgcgcacatgtgcacatgtgcaggtgcagacatacagaggctcatatgcacacacacatgcacacgcacatgcacacacacaggcacacacagaggcacacacacattctcaccctggcaccacttctcacatctcttcaccggctgggactcacctctttacctggagaagcgggtggtgcctcggccggtgggtttgagtcccctgcatctctccatcttcagcacactgtgaacctgcatcgccttcccaaggcctgctgtgcccatctgcagagttaatgggctgcgggccaccagctgtcacatgggggcatgcaagggtggcacccaggggcaatgaatagactgccacagacatgtctgctgtctctttaaagccacttacagttggatctgctgcctgagcccaagaagggaagacggcatttggaaaagcaggctcagaccaacgccctcctcattggtggtccaaagcttaaatcctggacgtgccacaaaggactgatcttgccaaggctaaataagcaaagtggaatgaaaattaaagttaattctgaatccaaggtccttttagaaaaaaaaaaaaaaaaaaa

SEQ ID NO: 4171 - DNA, 3647 bp, Macaca Fascicularis
ctgtctgtgaataacttcagcccacctgcaaatcatacttggtggatcactaatataagcaacttattttgtaagttaaggctttctgtgtttctggttacagtgttggcactgggttggttttaatggacattcctgcagttattatcttctagctccctacagggcaggttgactttatgaaatgagtaagaaatttggagtcctggccctgcctcttttcagctgaatggccttggacaagtagcttccatcattattagcatttaatgttcctgaacttttcttcacctttaatatttatacttgtcacagtaaataaaaagaaaaataattctacaaggctcataagaaaaaatagtaatcttccccacccctctgaacctaggattcttacttctgtgaggagtaatttcaagcctttaactctttcttttggcattttctctgtgtttccaaggaaccttttttactgctatattttcatttataattttagctgtttaatgacttggtactatgaaagatgaggggttttgctgtcttacatacaattatcatcccctcatccttccaggagtgtatatcttaattttttgttagatcagtattcagcatttatatcattaaaatggtaaatattattcacagttgagtcaggtagtgtaataagcagacttgttttttgtactgtttttttgttttcctggaaattactaattgtctcactttcatttggttttttaaacatacctaccattgattgtttctgaactctctgacacaggtgtaaatcttctgtcgttgtgtttagacatggcaagtaatctgtccattttcttttctttcatttcttttccctgtgaagacatctctcctggagcttgccattctccaatgtgcataggttgctttcaaggatatagctgtcatcatgagaactcccttcaccattattctggaagttttctgtgctcctctatttgtgtttctttgcattctctgtcaccatatttatatgtttacgtttccattttgatagagcatagttttgagatcttgtatatctgaaaataatctttattctgttttcaggcctgattggaagtttgactggctgtagaaatcagctttagaagtaaatttccctcaggatgtttacagttaaatatgaattatttcagactttaatttttggtaatggcagagtaggtaatttgggccagtccactcactgaggacaaatattacgttagatttaaaaaaattttggcttgaagcaaaatgctatcaggatggtgaacaattaccaggctgggatctgggctgggcaagaggttcagggaggtgtgtccagggtttggggccattattaactgaaagtaaagaaaacagccaagaggataaaagattgaatggtatttttgataactttaaggggctaagggtccgtgatggttctgaacgcctcctcagtttggctaaagaccctgaaaggctgcatcctaggagtaagggtggaccagaacaggccctcttgataaaaccactcagcttcaaacatctaaatccctgaaatcagtttaaattaaacttaagagtgctactgtccccaggcatctccaaagtgctagggcttccaggaacctggaagaagcaagtgtaaattttctccaaaggaaaaattaccattctaggtttcagattattcaaataattttgcaaatataatgcttggtacttgctcagaaaatagcctcagacaacatggaccaggagacaagacaacacaaatgaaaaatagtagaagcagcagaagatagaaatagacccatgataaatctagatatttgtcatcatgcacacagattacaattacaatgtttattgcgttcaaggagctgaaagataagcttgagcatttcaaaaaagaattaaaaaccgtaaaaataaattagtggaaattttagaactgaaaaatagaatgactgaaattaagggcttaaagattaagggataattagtgaactagatgatgtgacagaagaagatgtctagaataaagcacaggcaaaatgatagaaaatatggatgaaaggatatgagaaagaggatacaacaagaaagtctaatatacgtgtttttggaatccctgaaggaaaaaaaagaatgagaatgggcacaagcaatatttgaagagataactggctgagattttgccaaaggtgaggaaggccatgtatttaagaagtccaagaatctcaagcaagataagtaaaaagaaacagttaccatggttgaaaactaaagacaaagggaaaaatctgagaagcaatcaaagacaaaaaatattatctacaaatagctcttaacagttgacttgtcagccaaaaaagtgaaagccagaaaacaataaaatatgtataaagaaagaacatgactttttcctctaccgaacgagaattctgtatctagaataacggtaaaataaagacattttcagatgaacaaaaattgagagaattggtcacaagcagatctgcactaaggaaatattaaaaaatgttttttaggaagaaagagagcgatcccagattgaccctcagatctgcaggaagaaatgaaaagcagtagtaaatttatgggtgaatctaaatgaatattgattgtacaaaacaataataataaatggagttttgctatgttgcccaggctggactcaagctcctgggcttaagcagtcctacctcagcctcccaagtacctggggctacaggtgcacgtcactgtgcccagctaacggtaattgccttttgagtttaacgtatatataaaattatggtggcaatggtgttatatttaagtcaggttgggataaatggaattaaagtatttctaagtccttgggttgcctggaaattggtaaaattactaattaacattagaccttgttaagtcacaaatccatatttttatcttgaaaccattaaaaatatatattagtagagaatatcttacatgctaatagagaaaaatggaatgataaaaaaagtaatcagtcccaaagaaggcaagaaagaagagaaaaaggaacagagcttattagtacaaatattatgtaacaagatgacagctttaaatcaaaataggtttgttaaatgtaaatgcagtaactggcttaattaaaagattaaaaactgtcgaactggatcagataaacaaatcaattattatttaatgtttatagaaatacaaaaacattgaaattaaaaggtaaaatatataacatgcagtttgagtagaaagatggtataactatattcttaccagaaaaagtataattggagcagaggccaaaagcattactcaaggtgaagaaaaacacttcataatgagaaaatgtgaaatttcaggatatgtaactttagcagacattctttgtgccctgtagtatgtcctctttgcctcctgatttcattttagctattgcatataggtccttgtgcgctgccagtatgtactataacgggtttccaatcttttagcttccttgggccagattggaagaaggattgttttgggccacacataaaatacactaacactaatgctggctgataagctaaaaaaaaaaaaaaaaaaaaaaa

SEQ ID NO: 4172 - DNA, 560 bp, Macaca Fascicularis
  misc_feature (1)...(560): n = A,T,C or G
gnnnnnnnagggagatgtgaccatgctcttgtcccgccatccctagcacaagaacatggcgggacaagagtctgttatgcaagcctgtgtgccagggatgnnnnnggggtggccacccgctctccaggaaaggcacagctgaggcactgtggctnnntncggcctcaacattgcccccagccttggagctctgcagacatgatagaaaggaaattnnnnnnnnnnnnnnnnnnnnnnnnnnnnnagggttagatttttatgnngatggtgatggggtcaccaaaggaaggggaagaggccaggtgggccgctgaatgggccgtggggagaacatgtgtnnnnnnncaccccacccccgcgtccaccatgaccctcttcgccacgctgacctgtgttccctccccatttatctttcctgttccagggaggtggggctgggatatctctatctctatctcaacttcatggtgcactgagttgtaacttcttccttccctattacaattagaacctgagtataaatttactttttcaaattattatcatgagaggttgatgag

SEQ ID NO: 4173 - DNA, 719 bp, Macaca Fascicularis
  misc_feature (1)...(719): n = A,T,C or G
tgagtaggccaccnatcactaccaantgcnnnnnnnnnnnnnnnnnnnnnnnnnnnnnnnnnnnnnnnnntgaaaatggagaggcagcacctggaaaacaaaatgaagaaaaaacctataaaaagactgcatcanntnnnnnnnnnnnnnnnnnncagctgggaataggatacacggtgggcaatctcacttccaagcnnnnnnnnnnnnnnnnnnnnnnagacttttatgtggtggaaagtgtgtttctacccagaattattgtcccggcttggctctatgcccctggactcggactcccacgccannnnnnnnnnnnnnnnnnnnnnnnnnnnnnnnnnnnnnnnnnnnnnnnnnnnnnnnnnnnnnncttgtttgttaagtaacacagacacaccagatggatttacagtaaacagaagaaactagtcttgcctcagtttcatcatttggactcagtgtcttcatggatttagcaaagggatttggcccagtgtttctcaatggaggtgctattgnnnnnnnnnnnnnnnacacctctttgtgcaagannnnnnnnnnnnnnnnnnnnnnnnnnnnnnnnnnnnnnnnnnnnnnnatcctagttgctgtagcaatcaaaaaacccctacaaagtgatggataaatttagtatcttgattgtggtgatggttccacaggtggatatacacatggaaaaagtaacaaattgtatactt

SEQ ID NO: 4174 - DNA, 745 bp, Macaca Fascicularis
taaagtcaagagaagaatgtatacacatatgtgtgttgaataaataattactattggcataggtatgtgtatacacacggcgcaccaacctacagtatatatagcagagaatcagaggctaaaaatattaccccatatgttccactattagtcatggattgcaaaggcttagtaacttgagcaggagagaaaactccctcaaagtcataaatcctgagtgacaactgctggtggatgacagatcccttcacctgtgggcaacctggctgggggtggggtctgttccaccagctcacctgagcgtgtagaggtgggtcctgcaatggtctcgtgggtattactgcttgtgtctgattgtcctgtattttgtaacactttagaagaatacagaaaagtgcagtaattctctttctccatagtatttaagcagaaatattgctagtttaatattgtgtcaggtcgtcctattaaccaggagcagatgacagtaaaatttccgtgaatagcaccttgacatctacaacctaaaaatggtgattgaagcaaaatgtgtaaacttgtacggggtgatcgtgtgctttggaacagagtattgttgaagtaattagaagatatattaaggtgttcctggtaatgaaggcatgtaagttataataattgtagctttctgaataagtgtcaaactatatctttaagtgtgctgtatgctgagttacaagttaggtcatttatgaatggaatgtaa

SEQ ID NO: 4175 - DNA, 2277 bp, Macaca Fascicularis
atctgaaaagaggaatgtcacctcccctcccagggctgagtagcctgatgacaggaccctgagcaaggaaaagtgacattaactattggatgcccaacccccaaagttgtcatcctttgcctccttgaaaaaggctttggaagaagacaaagcagctccattctgcaggcctccaccctgtgcaacccccgctcacacacccttttggcatgatgcccctggcccaggctcctgttctgtgggcgtcagcagctgaaagaaatctgagcactcctgggcatgtttttttttttttttctttttgtggaaagatgtgtgactattgactttgggtgtggcggggctagttacttagatgtttttcatttttcaaaaagaagtctttaaaaatttcttgaaatgtgactgtcacttgttttcaaccaaaaactttttaagattttttaaaagaaaaatcgagatcctgtccctccccccactccccattgcctctggttttcaaaatgaaagcacaagtgcaagagtggggtgcacaggtgcctggcgtgtaaacaccacccgcacagctgcgttgagcgctggctgagggagacgcagtgctgagcagtcagccccgggaggtctctctttcaacttccaatcccactgccatgaatgtgaattccttagggtgcttccagaaacaggagtctgcctgatctgtcggacatcgcctttttggtagcccgaatatgaggaattcaggacaggaaagtgtctttttgtcaagtagtcagagccaaatggttcccctcttccggtgggtggagcatcacaacccccagccggagctgatcttttgacaaccaaatgacatcccatgagaaggaagaaaaaaaaagttaaacactgcctctagattgttattttgtccgagagagagagatcatggagagagtctcactcacggaggctctgtctttctaggagtatgcatgtgtgctgtctcatgtgtggacactcacagttgaggctgagatggatgtcttggcagtagagctgctggtctaggtggcttttcagcttgacaagtaatgaagctccatttcaggacttcaccgattcagaaacaagcacagccccccacccccctgccacggagctctactgatactaatcactacaattagctaatttaaaagtacagtaatcagactgcttgcaactatagtaaaagtccattaatttgaagcccactacttcagaacttcgagaaaatcacaactcaagacaattcacagtagctgtgattctggctacataaaaatatttgaaatattcttccctttagccaatgttcagggtcttttgtgtaagagaaatccagtttaaaatgagtacccttttcgaagaaaaggctcaagatattaaggatcccttcaccgtgccttcagctttgcggttcagcacttcttgtatgtacagggtgatctcttgttctctctccatcgcaaggatgttggatattgcagcctttcactctactcctttatttatcctgtgaataacatagtttgtgaactggactgcaatttaaactaatacacgtgatgtatctttctaaatattctgtaaagcagatgcttcactgtcagactggccgctccatcattcgcctccaaatattcaaacgtgggagcttttcctttcagactgtgggcagcgagtctctctctagcaagaatttctctgacaaacatacccaaatagcacaccctctcaagctcaatgcctcaacagttgtttcactgtactgacatctgactgctgaacagtgcctgccctttacccacccccagccttcagatcttcaggattgggacaaatcccccagctgcttttgcctctcaatccatctcccctcacagatgccactttcccaggcctgaacacatctgctatttcattctgacattgtgaatttgtgacagtggaaaccctgatatgtgcaactgagcttatagaaataattactgtgaaattgattaattttggtaccactttaaactgtgcttgtattcatgtgttaacccttgtcagctgggaaatctgtgcattctgtaatatgtcagcatttcactggagcctgggaacaacagacaaacttgcttctgatttctctctctctctttcttttccataattgttgagtttggctgttacattttgtcttcttctttacaagaaaacaataataataaagagcaaatggcatccacttaaaaaaaaaaaaaaaaa

SEQ ID NO: 4176 - DNA, 717 bp, Macaca Fascicularis
  misc_feature (1)...(717): n = A,T,C or G
ccgtaggnnnnnnnnnnggcctgacttcatgggaattcatctctcttatcatgtggagttnnnnnnnnnnnnnnnnnnnnnnnnnncatttgcatgtgtccccagatgatgttttttctttggggagtaggggtttggcttcctcattcatccctcttnnnnnnnnnnnnnnnnnnnnnnnnnnnnnnnnnnnnnnnnnnaagacaatgaaaatnnnnnnnnnnnnnnnnnnnnnnnnnnnnnnnnnnnnnnnnnntacactccactgacatcttccaagtactgcatgtgattgaataagaaacaagaaagtgaccacaccaaagcccccctggctgatgtacagggatcagttccacagtggtgcagattcaactaccacccagggagtgcttgcagagtctgcatagatgttgctgcatgcatcccatgtgtnnnnnnnnntggcttgtgtttaattctcttgaaagaaaatgatttgctcactatctccagcctcaaggagccaagggaggtcattcacatggaaggtccaggactgatcagccatctgacttttctaacacattaaattctccattaaatctcaccattggtaatggcttaagtgtaaagagccatgatgtgtatattaagctatgtgccacatatttatttttagaccctccacagcattcatnnnnnnnnnnnnnnnnngcctaaactttgtaaatattg

SEQ ID NO: 4177 - DNA, 559 bp, Macaca Fascicularis
acaatgtatttcagttattcccacaagtcaggggtccagatacaatgagggttatcagctaactgatatgctatcattgaggttcatcaatgaatttgtacatttgtagttccctttggtgaagggaaaaatgatgattttgcaagacctagattttggcttggtttcttgcgtccttttttggcagccttcatcttctcatctcccaaaccccttgagcctgtagggttttcatagtggacaaagaacttgtggtcttttaaaactgggactgatatttttttgagagagtatggtgttgaaagtgtgatgttctaccactttaccaataagtaattttaaatacacactgtcctctcgatttttggaccaaacagacgctcacagtggaggtttatcaagggttgcattggggaagaagcctctccctttagtcagcaccagatggtaaaggtgactgtacagatgtgcattttcattttggtataaatggtccacagcaataacatggataaggaattaatagtacagtatatagtcagtattattatggttcagc

SEQ ID NO: 4178 - DNA, 701 bp, Macaca Fascicularis
  misc_feature (1)...(701): n = A,T,C or G
gagtcattgggaaannnntttgttgacgtttgtagcgagaagtactattagttagttttgcttatctgggccagactaannnnnnnnnnnnnnnnnncgtacttcnnnnnnncattaaggcnnnnnnnnnnnnnnnnttcttgttaaactgaaaatgtattggaaaggctttgaagcccattgaagtgtggtacattcaaagaaagtacgtacaaagctcctagaactttatttaatcatgcttgtagtttgctttttccttggatgtgtcactccaataaatgtaacacatgctacattttcttttgtgcagagctttctgccttcatgtggagagatgatcatgtatctaagggtagaggagctctgaagaggacatagcaactgaaaagtgcgaccactcttaggaggaggtcaatattttagctaagaaccataaatgaaagactattcctgtctgggtggggtggctcacacctgtaatcccagaactttgggagnnnnnnnnnngcagatcacctgaggtcaggagtttgagaccagcctggccaacatggtgaaaccctgactgaaactacaaaaattagccgggagtggtggcatacacctgtaatcccagctactcaggaggctgaggcatgnnnnnnnnnnnnnnnnnngggtgcggaggttgcagtgagctgagatcgtgccactgcact

SEQ ID NO: 4179 - DNA, 715 bp, Macaca Fascicularis
  misc_feature (1)...(715): n = A,T,C or G
accatttcaatnntgcattataatagttcattgtataactgaaagaaaggantnnntcataagtaacattaaatatgaacattcatccaattgaatatagaaaatctttccaaaagtataagggagaaaaatcgtgtttacttcaatctttaaaaatctggcacctcttagtaactttcagtatttctaaattgctctaaaattttgtaataaatagattagggttttgcagtaatcttaatttttaagccaaaggttttctgagaccttaggttttgtagtctaaccagcttatctggttctgtaaaagaatattctttgtgtttttaaattgctatttttaaaaaagctttttattacccattttataaaatgttatactcatattnnnnnnnnnnnnnnnnnnattcctacatgaaattgtatgtattaaaaactcaatattagtggcaaatattaatactattaaaatggattttggtgctatattcnnnnnnnnnnnnnnnagtagaagtctcaagaataggtgaaatacannnnnnnnnnnnnnnngtcattaaaagaccaaataagcatttttgtattaaataaattagcagatggttagagacttcgaggagagttagtttggtcatttaattgcgacttcatgttatttgaatgaaataacccacatccttgctttgtataagagatgcactctggagaagttaca

SEQ ID NO: 4180 - DNA, 781 bp, Macaca Fascicularis
  misc_feature (1)...(781): n = A,T,C or G
acaaaaacagcaggcacagacaagatttggcccacaggcatagattcccaactcatggtggtgaaggacagaaaaaaacacctgtttacaagcttttgtaagaaattaggctaaatattacctgttttggttggaagatttctttggtttgaggaatgctttcctcttgccttggcatgccaagaggatagatgactctgaacgacgcnnnnnnnnnnnnnnnngtcatcacacgagatcaannnnnnnnnnnnnnnnnnnnnnaatccacattgtggagggaaaatatgtagtgccttagcttcactaatagttgtaaaacttcttttgaagacatcaaaggctagaggattcattttatgcagtgtgaacatctaacactctctgtgtcaaatatatattgtacattaccttaaactattgtaatagctaggtaacaatccttgtataaagaatgttttctcccacacaaagggcacagtattgagcactaatttcctaattattaaaagtacatgtatgtatctnnnnnnnnnnnnnnnnnnnnnttgtatttccatttgtgtttacttgaggaatttgaacactaacaattggtaaaatcccattgtaatnnnnnnnnnattttgactttactttcttgcagtgaattgtgttgtgtaaagatttgggctttaaaatctttattagcaagctttgttttgttttcattattgttgctgttgtaaccagatttaatttatttttagttggaggtttgacctagctaaatctggaccaa

SEQ ID NO: 4181 - DNA, 732 bp, Macaca Fascicularis
  misc_feature (1)...(732): n = A,T,C or G
tcattcactccaagaagccatcaggggtaagataccttcctttaaacatcactaagaaagaagaggcctgncnnnnnnnnnnnnnnnnnnnnnngatctaaagatgcgtcttnnnnnnnnnaaggtccggaagtggaaagcaggtgtcagggctgaggtacagggttcacctgtaggccccagggatggtctctcaggggtgctgagtgagtgcatggtaaatcaatggagcccaggggcgcctcctgccggtgtcctccaggcactcaaacctagcccttccgaagccgacctcacgtgacctcacagcccctccttagggcgcctcactgacgacggtggtgggtggaataacagccaccaaagaggtccaggttctgaactccagaacctgggannnnnnnnnnnnnnatagcaaaagggacccggcgcctctgcttnnnnnnnnnnnnnnnnnnnngggagatgaccctgggtggttgaggtgggccccgagtaatcatgggggcccttataagggaaagggagtcaggagggtctnnnnnnnnnnnnnnnnnnnnnnnnnntctgaagatggcaagaaggcccagagccaggcgatgaggtggcnnnnnnnnnnnnnnnnnnnnnnnnnngattctgccccagagcctccgtggagaaacaaagccgcactgacacagctnnnnnnnnnnnnnnntcattttggactcctgacctctagaannnnna

SEQ ID NO: 4182 - DNA, 691 bp, Macaca Fascicularis
atgcacttagcactctccagagggctctgagaatctcatttgccacgaggaagagccttgggggagctcactgggcagggggtggtctgggctgggcataagtgggattgaggccaggccaggctggtgggggcgtgggcccccaggactcggacctcaggggctggagggatgctcagggcttcctccacccgagggataacagcagagggagcctctaacctccttcctccgttggcgttgggaaacagccgtggggctcatgggcctccttggaggttctatgccactcctctatcacccatctcccgctcagcgtggggaggaaaggaccgctgagttctattatccccaaagctgaaggatgatctcgagttttatctgcgaggaaactcatttgattttaaatgattttcagcctggaagttagtagattttaggaggctcttaaataaattgcttagaaataaagatgagcttcttggtttacggtgaaacttaatctgtcctgactggaacacttgcagagatttggctcagggatgctggacctgactaggcagatcagagagacgggggtgtcctcggtgtcaaaaatggggttgtgcaaatgtgccacatgggtgacatatttactgttctttgtgcttttgcatgtttaaaggtgaactttttctgattatgtcagtac

SEQ ID NO: 4183 - DNA, 704 bp, Macaca Fascicularis
  misc_feature (1)...(704): n = A,T,C or G
gcnnnnnnnnnnnnnnnnggcannnacagcaagatgatgacgttcctgcctgggagatgggaggagggctgggagagggaggcagttgcccctcatggccccgcccccagagcccacgcataaccttggcaaccaggcagcctgagggaggggggcactgggagctgatgggggatctgtgggcagaggagtcaggctggggtgggggttccagggcatggatttccccctactcccctcccctgccggcctccttactttcatgatctcattggaagcacttgggttctgaaaggaggcaacactccattcattcattcatctattcaataattcattcattgatcatccattggctggtgggaacagtgcaggggcaggggacagtggccctggggtcccagcctgcagaggctgaattcacccagagctgcctgagcacccccatcccctccacacccctggctcccagcgtcgtccatctgcctagatagtgcccgagtaacaggccgtgcacatgagtgctttactttgtaattctctggttgggagcgtccctccctgcgattttccttttccttgcccttccttccatttctaccctttgcctgctttcttgttggggaagtcccctgtcttccacccatccccctgcctgggctggaggctttgcaagtctgctcactgtggacttgcctgcagtg

SEQ ID NO: 4184 - DNA, 581 bp, Macaca Fascicularis
  misc_feature (1)...(581): n = A,T,C or G
cggagtcgcgcggaggnnnnnnnnnnnnnnnnnnnnagattccgctnnnnnnnnnnnnnnnnnnnnnnnnnnnnnnnnnnnnnnnnnnnnnnggtgtaatggacgttaatactgctttacaagaggtgctgaagaccgccctcatccacgatggcctannnnnnnnnnnnnnnnnnnnnnnnnnagccttagacaagtacgtgtatcagtctcaatactgtgggttcttgcaaccggaacaaaactgccacccaagggaagaaggcgtggagttcatggtgttagnnnnnnnnnnnnnnntggcatccgtcctacaggaaacctaggaaaaggcgccaggcccatctttgtgtgcttgcatccaactgtgatgagcctatgtatgtcaagttggtggaggccctttgnnnnnnnnnnnngatcaacctaattaaggttgatgacaacaagaaactaggagaatgggtaggcctctgtaaaattgacagagaggggaaaccccgtaaagtggttggttgcagttgtgtagtagttaaggactatggaaaggagtcnnnnnnnnnnnnnnnnnncgaagagta

SEQ ID NO: 4185 - DNA, 1487 bp, Macaca Fascicularis
  misc_feature (1)...(1487): n = A,T,C or G
ggaagaaagcaaaaagnnnnntccaccagaaaagaaacagaacactggctcaaagaaaagcaataaaaataagagtggcaagaaccagtttaacagaggtggtggccatagaggacgtggaggattcaatatgcgtggtggaaatttcagaggaggagcccctgggaatcgtggcggatataataggaggggcaacatgccacagagaggtggtggcggcggtggaagtggtggaatcggctatccataccctcgtgcccctgtttttcctggccgtggtagttattcaaacagagggaactacaacagaggtggaatgcccaacagagggaactacaaccagaacttcagaggacgaggaaacaatcgtggctacaaaaatcaatctcagggctacaaccagtggcagcagggtcaattctggggtcagaagccatggagtcagcattatcaccaaggatattattgaatacccaaataaaacgaactgatacatatttctccaaaaccttcacaagaagtcgactgttttctttagtaggctaactttttaaacattccacaagaggaagtgcctgcgggttccttttttagaagctttgtgggttgattttttttcttttcttttttgnnnnnnnnnnnnnnnnnnnnnaaagtgaatcgtaagagaacctcagcattgtgcacgataagagaatgtgtcagtatttcagggttctacattttatctgtaaaatgtgactttttttttttttatcacaacagaagtaaaatgttgctttgtacctggtgtcttttattaagaatttactccccccatttctcacagagaataacagtcgggagtcattgtcacaatataatagaaatgttagcaaccagattcatgtaaggacnnnnnnnnnnnnnnnnnnnnnnntaagactctgtactgctcatattacactccatcctctctgtagtttgctgggtagtggagggggtaagctaaattgtagtttctgacaataactgggaaggatttttcttaaataacgatggaattggtataattgggattgaaaaccaaaacttggaactaagatagagaagatggagtgtatgtagaagggctgttaaaaatgtaaaccttggttgcattatttgtggaggctcaaacttgtgaaggttaaacaccataatttttccatttgttctgcattttgattctgaaaagaaagctggctttgcccatttcttattaaaaaaacttgttgtaaatccagttgtctaatgggatctatannnnnnnnnnnnnntctgtatgcccttctcccacaaaatactgtataactagtnnnnnnnnnnnnnnnnnnnnnnnnnnnnttgtaagctaatgaaattgtgagtcacccatttatatcttaatttttaatcatgtcagttcttgaatgggtatctccttagcctgctgatttctttttctttctaaagaaagtgggtggaga

SEQ ID NO: 4186 - DNA, 2576 bp, Macaca Fascicularis
acaccatctccagagtcgttggtggctacccatgctaagtcattagtcctctttgtttactgctggctggcagatcttgaaaatgagccaagaaaaaaatgaaatgtttgaaagtgagtggtcaaaagagagagagagagagaagcagttggcatctggtcttgacactgcagagaaggccttgaaagctgaaagtgagagtcatggacttatctctcgttttaaccccttgtcctgccatcttggaaagatctatcaggagatacaatcagcctatattttgaaaagagacctggaagaattgcaaaaatcaaagtcagagcttatatgcctttataatgaagttcacaatctcccaggggcatcagagagcagagaccattttttaatagcatgtgacctgttacgaagagagaattctgaattagaaacaaaggtcttgaagctttcacaagaatttgcacaattaaatcattttactctcagggggaaaactgcaccttctaatttaattacaagtgaaaatatctgtaaagatcctgagtctaatgaaccagttttggaaatagaaattcaaagcccaaaggaagagagagaggaactctgtcccaaattaggagaaagaaagcagaaggaaattccagaggagtcagtaaaggagggcagttttccaagagagggacagaaggaggagggctcacaacagaatcaagatatgaaagatgaagaaaaagaacagcggttgaccatgaagcctgaggaagttgtgaggcttagagaagagctgagccgtataaatcagagcctccttcagtctcagagctctggggatagttcagatgacagtggtgcccagtatccgtcatctggagataaactaaaatacaaccagcaaggggaagtacaacaacttcaccagaatttgcatcggctccagattctatgcaactcagctgaaaatgagcttcgatatgaacgagggaagaacttggacttaaagcaacataatagcttacttcaggaagaaaacattaagataaagattgagctaaagcatgcccaacagaagttattagagagtacaaagatgtgctcttcactcacggcagagtgtaagcagagtcagcagaaaatcaaggaactggagttggaagtacttaaacagactcagagcattaaatcacagaacaacctacaggaaaagctggctcaggagaaaatgaagctaaagtaaagcaacaatatcaagaagaacaacagaagaggaaactcctatatcagaacacagatgagttacacaggcaagtgagaacattacaagataaagaaaatctactggaaatgacctgttctcagcaacaatccagaattcagcaacaagaggccctacttaaacaactggaaaatgagaaaagaaaatatgatgaggatgtcaaaagcaaccaagaattgtcagagaagctgtctaagctacagcaagagaaggaagctctacgtgaagaatatttgcgattattgaagctgcttaatgtccatgtgagaaactataatgagaaacatcagcaacacaaaatcaagcttcaaaaagtcaagtatcgtttaacgaatgaagtagaactacgagataagagaattaacgaatttgaagatgaaattggaatcctgcaacataaaatagaaaaggagaaggcaatacaggaccagatcactgcccaaaatgatacccttcttctagaaaaaaggaaacttcaggagcaagtcatagagcaagaacagttgatccacagcaacaaatggacgatatcttccatccagagcagggtactttacatggataaagaaaataagcaattacaggaaaatagtcttcgtctcacacagcagattggcttcttagagcgaattataaggagcatccatattcgcagaggagagaatcttaaggagtttcctgttccaaaatggtggcatagaggcaagctggcttctctccccgcaacaaagaaacagaaagaaatatacagcactgaggtctgcacctgcaacaatgcagaactccagcatgaggatgagtcagttcccaaggccaccgagaagtggaaacactctgagcagatggaaacaacaattagtgacatccttgaatctgaagtagtgaatgaaatattgcctttatcaaactccagtttttcaggaaaaggtttggtagagtcatttgtaagtcttcaagagactgacgacattaagtcaaaagaagcaatggcaagttcaaagtcccctgaaaagtcccctgagaatcttgtgtgttcacagaattctgaggctggatacataaatgtgacttctctgaaagagacacacggtatacaagaacaagaccaaaagtcagaactataaaatcactggtgcctaaagctatactgaacaaaactgctaacttaaagcctggacaaaaggtggaccatgacattgagaagagttaccacagatcccaaatggatatcagccaagagtcttcaaaattgctgataaattcattaaagcaattctaaaatggaaaaaaaaaaaaaaaaaaa

SEQ ID NO: 4187 - DNA, 746 bp, Macaca Fascicularis
  misc_feature (1)...(746): n = A,T,C or G
ctgctactaatacagtctttatnntncataaatacaaactgattttgacttcgctgcttctaagggacattgtcccaaatcatatttcctcaaggaatccagtttctctctatttccaaatacaatatataagtgtgtgtattccctgtattcactgtgactgtggatcttgatctaaataaaattcaattataagaaatacagtgctctagtttattaaaacatggtttttaaaaatgttctctggggttgggtatttttgccatagttccttgctttgattcttgggtagatgctgaatctcccaaatttggtttctcatctgtaaaataaagtcagtatcacttgtcttgtggcattgtaaagattaaatgagctaatgtatgcatactgctcagtaaacaggaactattgttagtgctacttttgtattttttannnnnnnnnnnnnnnnnnnnnnnnnnntatatttaggaagagaagatcttgcatcacttgaaatgtttgaattaaataatccatgctagttcttggggtaaaaatagttacttaactgggctcttgtgaggtaacaatttaagtagaaaattaaaaatgttaatcattaatagtttaatattacttttcatttcaggagtggacgcttctcttgtgagccagctggagnnnnnnnnnnnnnnnnnnaaccacccaagggacctggctttggtgtacaagcaggcctttaatttatattgaactgtaaa

SEQ ID NO: 4188 - DNA, 733 bp, Macaca Fascicularis
  misc_feature (1)...(733): n = A,T,C or G
aatggagagggtgtcnnnnggcacaatgaaggagcatctgaacgggtaaattcttttgaattgtnnnnnnnnnnnnnnnnnnncaaaaaatactttttctaatgaggagagaaaatatatgtatttttatataatatctaaagttatatttcagatgtaatgttttctttgcaaagtattgtaaattatatttgtgctatagtatttgattcaaaatatttaaaaatgtcttgctgttgacatatttaatgttttaaatgtacagacatatttaactggtgcactttgtaaatcccctggnnnnnnnnnnnagctaaggagggaaaaaaaaaaaatgttgtttcctaatatcaaatgcagtatatttcttcattccttttaagttaatagatttttcagacttgtcaannnnnnnnnnnnnnattaaaatggatgccttgaataataagcaggatgttggccaccaggtgcctttcaaatttagaaactgattgactttagaaagctgacattgccaaaaaggatacataatgggctactgaaatctgtcaagagtatttatgtaattgttgaacagnnnnnnnnnnnnnnnnnnnnnnnnnnnnnnatttgttgttttttcaaaatagaaaagttattagtggtttatcagcnnnaaatccaattttaacttagtaaatgttattttatactgtacaataaaaacattgcctttgaatgttaatttttggac

SEQ ID NO: 4189 - DNA, 719 bp, Macaca Fascicularis
  misc_feature (1)...(719): n = A,T,C or G
atgtgtcattttcaatgnnnnncttcccaacttcctgccatctgcctttcatgtgtgtttttcctcacacagaacctcttcctccatcttcattcccctccttttcctgttcctccaatccccagacccaccactcctgcacatgccatacacatttagaagccaagtattcagaattagtagaaggggagcagagtgatttcttgcttcctcccttcaaagcactaccacacctagactggaaatgtgggctgggtaatttcttgctgttagcagccgagctacccttctggcagctatactttctccagtaaatgaggaaccgtaactcttcggaacaaaccaaaatatagcagatgtaagtgtatnnnnnnnnnnnnnnnnnnnnnnnnnnnnnnnnnnnnnnnnnnnnnnnnnnnnnnnnnnnntttgtataattttacttttatcatggattttacacacacttgaaacactctctctaaagaataaaaacagaaatgagaaatatgaaagatctttttcttgtggccannnnnnnnnnnnnnnnnnnnnnnnnnnnnnnnnnnnnnnatttacatttgttaactgtcatttacctgctctatgttaatctttttagaaaaaatttgaatttcagaaacaaaatcacagatatataatattaaaatattcccaaagggttttgatgttccatctatgcttgtaaaatgtagata

SEQ ID NO: 4190 - DNA, 684 bp, Macaca Fascicularis
  misc_feature (1)...(684): n = A,T,C or G
gctcactgcaacctctgcctctgggtnnnnnnnnnnnnnnnnnnnnnnnnnnnnnnnnnnnnnnnnnnnnnnnnnnnnnnnnnnnnnnnnnnnnnnnnnnnnnnnnnnnnnnnnnnnnnnnnnnnnnnnnnnnnnnnnnnnnnnnnnnnnnnnnnnnnnnnnnnnnnnnnnnnnnnnnnnnnnnnnnnnnnnnnnnnnnnnnnnnnnnnnnnnnnnnnnnnntggccgcatttatgggttttaaatatgagaatgacaacatcaggttattgggcagcaggaggtgggctggttttgaaaggcaggggaatgaggcagtgagataagttgggaggggctgcaatagttcagaaacaaggtagggtgcaagtaaatcacaggtggcaccagagatgaagaggaaggggcagtgtgacagctttggtgcacgatacaacgtgggaaatgcaggactgagaagagccagaggcaatgatgccattagcagcatgcatttagtacttatcacaacctatttacattttctgtataaacattgatctcattagactgtgaactcctagaggaacaagtcccacatcatcctcattgacaaaatgaacatggcagacacttggtaaatgtttgctagataagtgaatggaagtcaggcgagttggcgtggtgatggcagctggggtgttg

SEQ ID NO: 4191 - DNA, 763 bp, Macaca Fascicularis
  misc_feature (1)...(763): n = A,T,C or G
aaataattggcgtgaaagtnnnaggcatattnnnnctatgattgatgaaggggaaaccnnnnngaannnnnnnnnnnnnnnnnnnnnnnnnnnnnnnnnnnnnaactataatgatatcaatgatgtcaaacggctgaaacctggctacttggaagctactgtggactggtttagaaggnnnnnnnnnnnnnnnnnnnnnnnnnaaaatgagtttgcttttaatgcagaatttaaagataaggactttgcaattgatattattaaaagcactcatgaccattggaaagcattagtgactaagaaaacgaatggaaaaggaatcagttgcatgaatacaactgtgtctgagagccccttcaagtnnnnnnnnnnnnnnnnnnnnnnnnnnnnnnnnnnnnnnnnnnnnnnnnnnnnnnnnnnntgcacagtaccaacagatgtggataagtggttccatcaccagaaaaactaatgagatttctccggaatacaagctgatattggtgcattgtattcatctggatgtattagatgtaaaagtagtagcttttcaaagctttaaatttgtagaacttatctaactaaagtaaattttgctgtgaccaannnnnnatactcnnnnnnnnnnnnnnntaaagcatttttcaaatctcaactaagataacttttaacacatgcttaaatatcaaagcagttgtcatttggaagtcacttgtgaatagatgtgcaaggggagcacatattggatgtgtatgttaccata

SEQ ID NO: 4192 - DNA, 718 bp, Macaca Fascicularis
  misc_feature (1)...(718): n = A,T,C or G
agagtggcatccntgagggccagactactgtgaatcctgctgctattctgggtctagtcaccctgaggagccgccacaagccaggctggtgctggggaaagtctgcaagggattcagtgatgtgaagacacaagagctcaaagtcgctgagaagattttctgaaaatttttgtagttttatgttatttttcaatctctttataatttcccccaagaattcttactttatatatatttgtttagaatttattagtaagagtctctttttggtatgattttagaaagtatattaggtcatttttgtataactacctgagactgggtaatttataaaggaaaggggtttaattggctcatggttctgcaggctttgcaggaaggtgctggcatctccttctgatgaggccttaggaagcttacaaacatgacagaagttgaagtgagagcccacgcatcacatgcaagagcagaatcaagagaaagaggaggcggtgccacacactattaaacaaccagatcgcgtgagaactcactcattatatcgaggatagcaccaagcaatcatgaggaatcccatgacccagacacttcctatcaggccacacctccaacactggggattacatttcaacatgagatttggagaggacaaacttccagactatatcagaaagcttcttgcaaaggtagtctataaagatataacatttatgctatc

SEQ ID NO: 4193 - DNA, 673 bp, Macaca Fascicularis
  misc_feature (1)...(673): n = A,T,C or G
tgaattaaaaaaangnntgtatctgntnnttattntaatctttannnnnnnnnnnaaacctctactctgaannnnnnnnnnnnnnnnnnnnnnnnnnnnnnnnnnttccaatttctccaggaatcagttctctatctatgctccctgagaactttcccnnnnnnnnnnnnnnnnnaatcacattgactctctgtatacaagataaatagcccnnnnnnnnnnnnnnnnnnnnnnnatcccttaaaccacattnnnnnnnnnnnnnnnnnnnnnnnnnnnnnnatgtggggataagaaggtgaaaaagtggatgggtggatggacccaaagtaaaatcctattgatgattaagatttgatactcgtttgttttctctnnnnnnnnnnnnnnnnnnnnnnnnnnnnnnnnnnnannnnnnnnnnnnnnnnnnnnnnnnnntggaagaaannnnnnnnnnnnnnnnnnnnnnnnatccctgaagataatcttagctgccaaagnnnnnnnnnnnnnnnnnnnnnnnnnnnnnnnnnnnnnnnnnnnntcctctcttaggtctataattattttttaatttttctttcttaaactcctatgatgtttccattttttattccctaatgaggagtcaagagtgannnnnnnnnnnnnngctttctcccacagacaagcc

SEQ ID NO: 4194 - DNA, 759 bp, Macaca Fascicularis
  misc_feature (1)...(759): n = A,T,C or G
gctggttccctnnnagtggccatccacctgtannnnnnnnnnnnnnnnnnnnnnnnnnnnnnnnnnnnnnnnnnttacaaatgagcagagaatacggttttggtgtcctgctacaaaaagacattggtcagtaacgagcacgatgtggaaaaaggagagaggggacacattcgaccctggagagttcactggnnnnnnnagctgcttgcttttcactgctgcaaggcctttctgtgtgtgacgtgcatgggagcaacttgttcgtgggccatcgggaatactggggagaaggcttcgttgcccccagggcacttcacagagtgtgctggaggactgcgtaagaannnnnnnnnnnnnnnnnnnnnnnnnnnnnnnngccttccctgagctgggacctttagtggtggctgtttagccaccatctttgcaagttgctttgccctggtagggcagtaacattgggtcctgggtctttcatggggtgatactgggctggctccgtcttggtcttcccaggctggggctgaccttcctcacagagaggccaggcgcaggttgggaatgaagcttgctgagaggggctgtccagttcccagaagccatgtcagtctctgagggcttcctttggggctgcgaacttgcgggtttgaggataggnnnnnnnnnnnnnntccacttgtcagtttctcagctcccatttctactctcccatggcttaattcttctttcattttctgctctttttatacaaatgtctta

SEQ ID NO: 4195 - DNA, 726 bp, Macaca Fascicularis
  misc_feature (1)...(726): n = A,T,C or G
tccaaatacaaaaagaggtagaagacagagaaccaattcagactattaggaatctagaaagaagaaaataaagaagaaaatggagaaggaaatgctatcatgtggaagagaatttctcagggatgaatgaaattaattgaatgcccagcaacnnnnnnnnnnnnnnnnntcactaagacacttcatagtaatactgtatcatgtcaaggaaagggagaaagaatgtcagtgtttttagagagccaaagaaccatnnnnnnnnnnnnnnnnnnnnnncatggggagacacacacacaacactatcatttgtttagctttgtgatggcagtatgagaagtttagattgaaaatttggtgtattctgggctgtgactttctcccctttgcannnnnnnnnnnnnnnnnnnnnnngttaaaatcactattagggattttctcatcctcagtcttttcctattctctataaatctttaataaatctcacactctcaaaaggtcagagcatttgaaataaaaatcttaacagtattgaatattggtatatttcatccatacaattgaacaaatttaatagtaggaaaggaaataggtacattatatgtgtttctgtatatttatgtttatgtttttatttacatatgtatattgaatatatatttgttagcgcttacagatcacatactatgtttcaactttaagatttcattaactatgaaaatgtcattt

SEQ ID NO: 4196 - DNA, 717 bp, Macaca Fascicularis
  misc_feature (1)...(717): n = A,T,C or G
atctgtagttatgcnnnnntgaaccttctcagtggtttacatgnnnctgaaactatgtgcaatatttttggttnnnnnnnnnnnnnnnnnnnnnnnnnnnnnnnnnnnnnnnnnnnnnnnnnnnnncttccaccccaaacaagcctgccatgaggtgggatcctaggggtttggctgttcttaatccactgctcagaaagcttccattctgctgtccccagcctcgaccctcttcnnnnnnnnnnnnnnncccacccacccttttcaagtttagatagcgtttcagctgcagtcccaaagtaacgnnnnnnnnnnnnnnnnnaagtaggaagtcaatctgtgtnnnnnnnnnnnnnnnnnnnnnnnnnnnnnnnnnnnnagaggagcagaggggtttttcaatgtcttttgctttcagaaacagagaatataatattctcactaaggccttgaattgattttttttctcataagatagtctgataagctaatttttaaaaagaaatgccattaactgtgtttcattgtggtttaaaattactaacaagttgtgggaaagaaaaataatatttgattttgaatcttaaatgtttttaaaaattagacttgaatgggcacaaagtataaatattttgtttctttatggaggacatgtggaaagagtttgagggtttgggatgggagaagtattttgcagagctatcaatgtncaaataa

SEQ ID NO: 4197 - DNA, 745 bp, Macaca Fascicularis
  misc_feature (1)...(745): n = A,T,C or G
agaatgcacannnnnnnnnnnnnnnnnnnnnnnnnnnttgcccagtccagtaatttatttatattgatctatacataatatatgtttcctcagcgtaggagctatgattcactaattaaaagtggagtcaaaacgctaaatgcaatgtttgttgtgtattttcattacacaaacttaatttgtcttgttcagtaagtacagtggatcttggagtgggatttcttggtaaattatcttgcacttgaatgtctcatgattacatacgaaatcgcattgagatatctttagatagaaaaaagtagctgagtgaaggggaaattatagagctatgtggccttagggagtaggttgaaccaggtgattacctaaaattccttccagttcaaaagcagataaaactgtaaattattttatcctatctaccatttcttaagaagacattactgccaaataattaaatttaaggttttatcaggtttgcatatagaatattaaattctaataaagtttcatgttaatgtcataggatttttaaaagagctatagataatttctatataatatatctatatatattaaaatgtaattggtttcagttgaaagtattttaaagctgataaatagcattagggttcttagcaatgtggtatctagctgtattattagttttatttactttaaacattctgaaaagcttatactggcagcccagaaaaacaaacaatcaaccagttcaacggaaaat

SEQ ID NO: 4198 - DNA, 756 bp, Macaca Fascicularis
  misc_feature (1)...(756): n = A,T,C or G
tgannnnnnnnnnnnnnnnnnnnnnnnnnggctcacgntggggnnnnnnnnnnnnnnnnnnnnnnnnnnnnnnnnnnnnnncaaggggtggatgagggacctgtcctcccgcaacactgccttccctnnnnnnnnnnnnnnnnnnnnnnnnnnnnnnnnattcagggaagttggaggacagcacccacagggtggccagcctcaggcccccacctgcatcctctagtctctggggacccctagggggaagaagtctaccctgcttgtgagtcccgtctcagtgtggagaaaatggctgcccacgtgccaggaaagcagggcccaggacctggagctgcccactgtgtttatgtcggggatgggggggcagtgctggctgcctctgtcctgtgtgtgaccctgccctcgaagggtcctgtcctgtcagtcccgagggagccacaaccaaagctgcggagagaaggtggggaagggtgcagaatggccgtggggcacagcnnnnnnnnnnnnnnngtctctgctgggtctttcctagggacctggaaggccaatgttgcttccccctcactccctttcactgcaggcagcctctctgcttccccaatgccttatgcctgggcacactgccacagaatatgcaatatgtgtgggtgaccatgtcctcacgcccacacccccaccccgggcagcccctggactccaaaggccgtggctgccacagcctcccctcagctcttcctgcctatctgtctcaca

SEQ ID NO: 4199 - DNA, 166 bp, Macaca Fascicularis
aggttcttggtgaccctccggattcggcgcgcgtgcggcccgccgcgagtgagggttttcgtggttcacatcccgcggctcgcgggggagtgggcagcgccaggggcgcccgccgctgtggccctcgtgctgatgctactgaggagccagcgtctagggcagcagc

SEQ ID NO: 4200 - DNA, 736 bp, Macaca Fascicularis
  misc_feature (1)...(736): n = A,T,C or G
cagctgagcccatgcccgtgtaatgtgaaaacagnnnnngcggctcccatgctgggggtgcccactttctnnctgggcagcaccccagggtccaccgggagccagggctgggtccagtgccaacgagagctgctccctgctacagccaagagagcactcagcttcccacaccagccatcgaaggccctgagccctggactggctgcagatnnnnnnnnnnnnnnnnnncacagagcagggctgacgggcagggacagagggccctggaaggaggggtctcctgctgccacannnnnnnnnnngaactcctcacctgacccaccagggctgtgggcatcctcagactatcccagagtcatcacgagcctcaagctacagcattgcatggaaatcaagggctatgaccacggaggccattcctcgcttctgtgaagaggaaggcccccgtaccccttccacatcctgggctgcgtgagccccccactccagagtgccctgcccatcgccttccacaccctgggctgcatgagccccccaatgcagcatgccctgcccatcgccttccacaccctgggctgtgtgggcccctgccccactatcccttccccacnnnnnnnnnnnnnnnnnnnnnnnnnnnnnnnnnnnnnnnnnnnnnnnnnnnnnnnnnnnnncatgagcccccccaccccagggcaccctgccctcctacnnnnnnnnnnnnnnnnnnnnnnnnnga

SEQ ID NO: 4201 - DNA, 301 bp, Macaca Fascicularis
tgcaggggaaaagcagccacacccctctgccacaaaggaccaacagctggtcaggacgttacacgcggtgcgttgtaagaggcaagaaacacttgctgaatctgcgtgtggcttccagtggcaagcacattcctcagcaggatcaagccaaacaggaaaaactgtaccaagagaacatgaggcgggcagaaacatttagcaacagtattctgcatggctcagtgcttaagaaaatgccttctggaatatttgtaaactaaagttgtgtatgtgtaagagatgtttaaatatgttggggtcc

SEQ ID NO: 4202 - DNA, 520 bp, Macaca Fascicularis
  misc_feature (1)...(520): n = A,T,C or G
ggcattttcatgacaggacttgccaataatnntaataataataataataataataataataataaagctccaaggggtctaactggtttctcaagtcatttcaatactatcataaacgtttttgtggtacttttcctttgtctttcactgtttcgttnnnnnnnnnnnnnnnnnnnnnnnnnnnnnnnnnnnnnnnnnnnnnnnnnnnnnnnnnnnnnnnnnnnnnnnnnnnnnnnnnnnnnnnnnnnnnnnnnnnnnnnnnnnnnnnnnnnnnnnnnnnnnnnnnnnnnnnnnnnnnnnnnntgtcatctgtaaatacaattcttttttgtagtactttggnnnnnnnnnnnnnnnnnnnnnnnnnnnnnnnnnnnnnnnnnnnnaaacaagctnnnnnnnnnnnnnnnnnnnnnnnnnnnnnnnnnnnnnnnnnnnnnnnnnnnnnnnnnnnnnnnnnnnnnnnnnnnnnnnnnnnnnnnnnnnnnnnnnnnnnntgnnatagctgtatgtgtatgac

SEQ ID NO: 4203 - DNA, 755 bp, Macaca Fascicularis
  misc_feature (1)...(755): n = A,T,C or G
cagattagtaggcagtcatcaggtagagacttcgaaaaccagactacnnnnnnnnnnnnnnngaagaaaggcattgctactgtgattcacgaaaagcagnnnnnnnnnnnnnnnctaaagtttaataaagctaaccacttcccctctatcagccagccatccatctaccccctctaaattcagagaagtaaatatgtagtgctgttaatatatttttgctttttaaagttatgctttggcctggcgcggtggctcatgcctgtaatcccagcactttgtggggtcaaggcgggtggattacctgaggttaggagtnnnnnnnnnnnnnnnnnnnnnnnnnnnnnnnnnnnnnnnnnnnnaagcacaaaaggtnnnnnnnnnnnnnnnnnnnnnnnnnnnnnnnnnnnnnnnnnnnnnnnnnnnnnnnnnnnnnnnnnnnnnnnnnnnnnnnnnnnnnnnnnnnnnnnnnnnnnnnnnnnnnnnnnnnnnnnnnnnnnnnnnnnaaagcaaaactgtctcaaaaaaaaaagaaagaaaataaataaagttatgctttttcctttattcctagttaaatcacaacaggttagtaatctgtaaatgatgtgtcctgtttctctttagtagaaattatatttttggctaaccattaagaaacttgtactcctttgtcccttatgttactataaactcaaaatgatgagttttgttgtatttgacttcacaggcaaaatcaaaatactttgttgctattc

SEQ ID NO: 4204 - DNA, 1876 bp, Macaca Fascicularis
atccggcgccggcggcgggcgcccggcggtctttgctgccgcccgggggcgcagaggccgggccttttctttcagcacaaacgtcagtttgtaaaagggtggggctggagtctgaggagttttcaggcttctgtctcgaaggaagtctggcaggctcggaattgccatcttcctcaggcaaatagtttttcaccttagagccagccttggcaaggccaaaccgcccagtcacccgacttcccacagtctcagcagggaggaataaatttttttcatctataatttggaagccaagtcgtaacaaaatgaaaccagtaaagcatctgttgaccaccagtaacaaatcggcaactcttccagcattaaccagcaaaaaaggactacataatttaccactatcacctaaactgaaggaaaaacataatgcaaagttaattcatgataaaattgaaccaatggtcctgagatctccaccaacaggagaatccattgtacggtatgctttgcccattccatcgagtaagacaaagaacttactaccaggagatgaaatgattggaaaagttatcaaacatctgaagatggttgtttccactttggaagaaacctatggacactgtgatcagaatggagaagaaccatttgtaaagcgtgaaaatgaagaattatctttatctattggggatgatatgaattcattcttgacatgttgttcacaatttgcaactcagctagaaacagcacttaaagaagagcaaaatattttggaatctctttttaagtggtttcagtggcaagtcaatcagatggaagaaagcctccagaacctggcaaaacagtcactttaagtattgcacaaatagtacgccttttacaaagatttgaagaactgaagaatcgccttaaacagaggtctaaatcctcctggaaagtcatgttgtctaaaaccatggatgaagaaaatcgaccagaagcagtgaaaagttgtgaagctgtagcacagaaaattgaagaattcatagaagcccactcaactgatgaatttaaaggtgtttctgcaacagaaccacaaactgctcattcaatgactaatcgatttaataccatgttgaaagtatttgaaaaccaggcaaatatgttggagagagctgtaaatgatcaagttttgttagatgctgaatacaaacagatacaacgtgattttgagttgttatcagaagagaagttggtgctggaaaatgaactacaaaagttgaaggacacagagaaaattaagtctacaaataatcgaacaaagaaagctgcgaaaacagtgaagaaaaaagacaaaggaaaatctgaggattcagaaaagaagatgtcttcagaaaaagagtttaaaataaaagatttggatcaagtacagaaagtagcacgtctggaaattgggaacaaagtccttcaggagcaattgaaacaggctttacaggaagctgaaaaagctaagcatcaacttaactatttcctaagtcaagagaggaagttacttaaaagtgaggggaaaactgagacaaccatgcgagtgggtaatagtcaaacagaagttaaaggtgaagattcaaaaactataccactggagaaggaaacaggaaaatcactggtttcagattcaggtggacagaagacaagtgataaaatccaagaatatccacagatcactgcccaaagtggaagactgattgaaaaaagatcctaatagagtttctgaaatactttggaaaagtctcccaaaccttcagagagtggatgggagcgaagtaaggagaccccacctgagcagatacatggtattgcttacaataaagtacaattttgctctttaaaaaaaaaaaaaaaa

SEQ ID NO: 4205 - DNA, 738 bp, Macaca Fascicularis
gttagctgtcttgataggatggcatgatggtggaagcatgggtttggagacagatagcattctttattctgcttcctccaagctgtgtgacctgggcaaccagttctctgaacctcagtttcctcatctgtacagtggagataagctcacctacctccactgtttgatttgagaatgaaatgagaccaggctcagcaatgtcccctaccccgagcccagacatatggcattccctttcatccccctacctgagggcagctgccggacagtccctgactgtcctgccctgagttgtgggggcttccccgatctgaggaatactcagaatggcccgccttccataaagcctttgacagtttgctgagggctgtgacctcgttggactagaacctcctatccttgcacttcccttgcccccaggcaggacagggtccatctggaagtccaagagctggagtcagggcacctgggttcaagtcctgcttgaggaccctggtcaggtgccctaagtgctgcctgtgcatctgctaaggagggattggagccgtcccaccgggacagggtgggatggggaacttacagagagtgcccagcacactgcctggcccacgggggcctccacggcctgttgttcccctcctctcagttctcttctttgagcctcagcttcctggcaggcagaggggtgtggaagctaatgggtaatcgtgtggtcacagagacatgatggtcgttgca

SEQ ID NO: 4206 - DNA, 745 bp, Macaca Fascicularis
  misc_feature (1)...(745): n = A,T,C or G
tacagcaggcactggnnnnnnnnnnnnnnnnnnnngccaggagcagacagtgaccaatcaggaggaagccacctacatccaagagatcaccacagcagatggccagaccgtacagcacctggtgacctccgacaaccaggtgcagtatatcatctcccaggatnnnnnnnnnnnnnnnnnnnnccaggaatatgttgtggtccccgagggccatcacatccaggtacaggagggccagatcacacacatccagtatgaacaaggagccccgttccttcaggagtcccagatccagtatgtgcctgtgtccccaggccagcagcttgtcacacaggctcaacttgaggctgcagcacactcggctgtcnnnnnnnnnnnnnnnnnnnnnnnnnnccaagcccaaggcctgtttggcacagaggaggcagtgcctgaacacattcaacagctgcagcaccagggcatcgannnnnnnnnnnnnnnnnnnnnnnnnnnnnnnnncctgagggcccgacacagatcctggatttgaggccagccctcccgggggtggggggccaccaggactcacctccctcttcatttnnnnnnnnnnnnnnntggnnnnnnnnnnnnnnnnnnnnnctagggagctagacctgtgctgttggggttaggggcagccatgggccccggccaagacgtgctgggtgnnnnnnnnnnnnnnnnnnnnnnnnnnnngaaatttatttttgtttgggtggac

SEQ ID NO: 4207 - DNA, 494 bp, Macaca Fascicularis
  misc_feature (1)...(494): n = A,T,C or G
tggggcgatgtctagggtgctccanntcagccccggagcccccgtccactgtgccttcggccggtcacatctctcttccccccacgccctgatccgccctccaccttcctcccctccaggttctgggccagagaaggggcgacagccgggcaccccccgaatggacaatttttccttctgtcgacggcaggggcaggcctagtttgaccctgacaattctcccattaaggaattcctggtgactggaaggnnnnnnnnnnnnnnnnnnnnnnnnnnnnnnnnnnnnnnnnnnnnnnnnnnnnnnnnnnnnnnnnnnnccaccccagaacctgaagaggttttctagctgccgtgcatttgtcaggccgggttacccaccctacttttcctgcctgccctccagtgctgccaannnnnnnnnnnnnnnnnnnnnnnnnnnnnnnnnnnnnnnnnnnnnnnnnnnnnnnnnnnnnnnnnnnnnnnnnnnnnntaac

SEQ ID NO: 4208 - DNA, 458 bp, Macaca Fascicularis
ctcccccttggatggcccccaggttacatattttgatgacttccagggtctctctgtcggctactaataggagcatgtatcttttgtttcacgcatagatcactgctaccaaacgaaatcgaacagctccgacaggccttcacacaattcgacaaggacaaggatggctacatcaactgccgggacctgtgcaactgcatgcgcaccatgggctacatgcccactgagatggagctcatcgaactgtcccaccagatcaacatgaacctgggtggccacgtagattttgatgacttcgtggagctaatggggcctaaactcctgacagatacagcagatatgattggtgtaaaggaactgcgagatgctttccgagagtttgacaccaatggtgatggggaaataagcaccagtgagttgcgagaggcgatgaggaagctcctgtgccatcaggtggg

SEQ ID NO: 4209 - DNA, 690 bp, Macaca Fascicularis
  misc_feature (1)...(690): n = A,T,C or G
atcgatgtttttacagagaaaattatgtaatcactgaaattcagtaataatacagcaggagagaaaaaagtggaaaatgatacacacaaacaagattggccatattgttataacaagtaaagtgggggatgggtttcattaccctctctatgtttgtatatgttagaaaacacaaatgtcaaaaaaaggaagaagnnnnnnnnnnnnnnnnnnnnnnnnnggggttttctctctttgccttaatcactaactttctgcagtaggttaccttcacatgctaagaacagttggatttccaatttccaggcaagcacaagcttgcccttttctttacaagaggggctggggacataaaagacaaagagcaaaggtgcttcctcaaaagcttcagtgtctggcagcttgcttctgacttccccttcctcctccggacttcccttctctctctattctgccctcatagccatcttcnnnnnnnnnnaacccagtgctgtgtggttaggctcacttagactcagttgtattggttttccaggaagagagaagatttcactatgcagcattccccagtgcaatgtcccaccggaatcggtctttctctttcaatcctcacccgggatatttgaccccttccatgaaggtaaattggttctactggttttaatgcattacacaattccattgatttcg

SEQ ID NO: 4210 - DNA, 764 bp, Macaca Fascicularis
  misc_feature (1)...(764): n = A,T,C or G
aacaggagcaggcannntcnnnacnnnnnnccattaatgccatgtcacccctcagcaggagtagtcaaatctcgggcaaaagaattttggctagaaaagaaaatcccactttaannnnnnnnctgcagataactcannnnnnnnnnnnnnnnntaaagggcacattgagaatgttacccatttgtaaactgttccctgatgtccttgtttagacgataataagaaatagggcaactccatttgttgagggtctttgtgttcttcaacgagaaatcaaatttgagacattgacattgcggaagatgagctgcgtgctgctgcaatcaccggcttcttctcactctgtcgtagacacaccgataggaccaannnnnnnnnnnnnnnnnnnnnnnnnnnnnnnnnnnnnnnnntaaagttgcctcatgtgaatgtcgatcgtttagtccctaggtcacctttgtgccgtggtgtgcagttcagaaacggggcaccgtgacctggaatgttttgctcttatttttgcagtcttcaggcggggggccctgtctcactgggaagcccctctttataaagcattatattacctggaatggcttggtcaactgtgttcagttcataaatatgttttacatttttatctgcctgttacaaagatgaacaaaaaaaacttaatgagaaagatcacagatgcataataatttaaagtctgtagttgaatttcctaacttaaagaatagaccaaaatttctgtgtataaaacaaag

SEQ ID NO: 4211 - DNA, 687 bp, Macaca Fascicularis
  misc_feature (1)...(687): n = A,T,C or G
cgccgcgccgcggagcagccagctcactcgcccgcctgtgtnnnncacagagaggacgccgtggcgcccgggtgcaaggccagcgggcgcggcagccgcgtcacccacctcctggggtacccgacgcagaacgtcagccgctccctgcgccgcaagtacgcgcctccgccctgcggtggccccgagaacgtggccttggcgccctgcaccgccgccgcagcctgcgaagcgggcccctccccggtctacgtcaaggtcaagagcgcggagcgcggccgactgcgccgaggggccggtgcagtgcaagaacggcctcctggtgtgagcgcgcgcgccgggccgggctgcgccccggccgggaggagggcgcggggctctctgtccgcagctggggacacgtcggggctggggccgacctcgctcgccccaggctgccaggcggctgagggtgaaggtatttccataaggaaatgcgtagggaggcagagcttcctccccaaaagtgggagggggcgggcgagggcggaggaaggcgatcccgagccttctcctcacccccgggaccgaaggttcgggggagagggagggaggaggctgagtgtcctagagcggctgaggccggaggcccggagtccccagcctaagcagagggccccgggggccgggtgggtgggggtctgtctggac

SEQ ID NO: 4212 - DNA, 987 bp, Macaca Fascicularis
  misc_feature (1)...(987): n = A,T,C or G
gcagcaccccaagtannnaaaaannnnntttatgccnanntnnntgccatatgacttgaatatgctactagattggaattcatctttctccagggtcactacttattttaaagaggtgaatttacctgtgctagggttttgatactgggagtgctaccagaactaccacaaaatgaaagtggtgagcccaccactgcagagaagttttctcagagccataattgagaggaattcttctcaaaataagctccactccttttcactcattgaaaacaacttgcataatgtaacagccagccccattttaaaaagattaccaggggtaacaacaactttnnnntnnatcnnnatcnncttccgaagaaaatgatttcttaaaagaattgaacattgtaaatcaaagggcattgtcctgttttggattaacaaaacaggaaaaacaactaaaccttgtaaaattatttgaaattttcttgtttttatcatttgagtgcctatagatgcacatacaaaaacaactgccatttttgtatatnnnnnnnnnnnnnnnnnnnnnnnnnnnnnnnnnnnnnnnnnnnnnnnnnnnnnnnnnnnnnnnnnnnnnnnnnnnnnnnnnnnnnnnnnnnnnnnnnnnnnnnnnnnnnnnnnnnnnnnnnnntactactgcagtcatcttaaatttataatctcaaaaaagatgtcacaatgaacagacaaccatgtgtgaagtcattttgcatgatgtatgtaatcagaaagtgtgaaatgtctgcttactaataaagagtgttttcactgaaactcattggaaaggtttttccaattttctttgatttgtagttttgagtggctgaatagattgttttaacatgaataacatttcctgtggtttaatttcccttggtgcacctttttcagggacagagaaggaaatggtgaatttcctgttactgtttctgtttttattcnnnccnnnataaaaaggct

SEQ ID NO: 4213 - DNA, 529 bp, Macaca Fascicularis
ctgagcccaaccccacctaagaaagacaataaagatctgtgttcagagtcatactgaatagagacttctggactctatagaacccactgcctcctgatgaagtccctactgttcacccttgcagtttttatgctcctggcccaattggtctcaggtaatttgtatgtgaaaaggtgtctaaacgacattggaatttgtaagaagacgtgcaaacctgaagaggtgcgttcagaacatggttgggtaatgtgcggcaaacgtaaggcatgctgtgttccagctgacaaacgttctgcttatccttctttctgtgtccactcaaagactacgaaaacttcaacagtaacagcaagagcaacagcaacaacagcaacaacagcaacagcagcaacacctttgatgatatctaatggtttgatatctttgatgactacgatggccgctacccctgtttctcccactacttgaacattccagcctctgtctcctgctctaggatccctgactcattaaagcaaagaggcttaaa

SEQ ID NO: 4214 - DNA, 750 bp, Macaca Fascicularis
  misc_feature (1)...(750): n = A,T,C or G
ggaagataagaaaagaaaagctgctaagatgcttgaaaacattattgacttgtttaaccaggcannnnnnnntgctannnntgacatnnnnnnnnnnnnnnnnnnnnnnnnnnnnnnnnnnnnnnnnnnnnnnnagtgggatgctctctatacagatcttccaaacagacaacttaaagttcaggttgcagannnnnnnnnnnnnnnnnnnnnnnnnnnnnnnnnacannnnnnnnnnnccnnnnnnnnnnnnnnnnnnnnnnnnnnnnnnnnnnagaagtacaagctttcccgagctttnnnnnnnnnnnnnnnnnnnnnnnnnnnnnnnnnnnnnnnnnnnnnnnnngactcacaagaaagtgcagatcaccttgcacatgaagttagcttggcagtatttcagctggctggaggaattggagaaagaccccaaccaggtttctgaagataattttcatattcttgagaaactggactttttacaagtctttacgaaactgtcaataataatggccctactaagagatttataatcataatgtttacaatgcagcgtactggattgtctctagatctgattgtttttcttaaacactaccagaataattctttgtgaataggtaagccttacacttgttaaagaaatttacctctnnnnnnnnnnnnnnnnnnnnnnnnnnnnnnnnnnnnnnnnnnnnnnnnnnnnactaactgtacagttttatgtggggaacaatccatgcagac

SEQ ID NO: 4215 - DNA, 2068 bp, Macaca Fascicularis
gaatactatgtggtatcacgtagaaacgtgaatcagactcgcctgaaacgagtcttaagtggggccacccttcctgacaaactccgagacaagcttaagttgatgaaacagcgaaggaagcctcctggtttcctggccctggtgaagctcctgcgtgaggaggaggaatgggaggccactttaggtccagatagggagaacctggaggggctggaagtagctccaaggccacctgccaggatcactggggttggggcagtacctctccctgcctctggcaacagttttgatgtgaggccttcccagggctaccggcgccggaggggcagaggccaacaccgaaggggtggtgtggcaagggctggctctcgaggttcaaggaaacggaaacgccacacattctgctatagctgtggggaagacggccacatcagggtacagtgcatcaacccttccaacctgctcttggtgaagcagaagaaacaggctgcaattgagtcgggaaacgggaactgggcttgggacaagagccatcccaagtccaaggccaagtaggctcgggagaacaggtcaacatttcctaccacaggccaaggagacaaaagagatattggaaggagggtaaagagaagcccagacaaacagcagatgagttgagtggggcagagggacagggcagccagaccaaggccaagccttctcactctctgccagctggaagggacttcaacaaccaagaccaactggcaacaggctcagtgggggtcaggtctgggtcccggaagaggtgctggagaggaaagcaggcagccactgcatccagcacatgggatgcctgggcctcagatggggaccccaacgaagcagaagctgaagaagggccaccagactcctggagagatcaggcaaggagaacctgtggctgccatggccaaagcaactcaacagatgccgatgccaaggccagcgccaaccctgccacctcggggaatccagcctggaggcagcccctaagcagccagccgtggcctgggtggaggcacctgaagacgtctatcccaaactcctccgatcctgagctgggagatgacgggggaaagaggccctctcaagggtgccagctgcctgggtctcccaagagggatcccccaactcgctgttcccgggacaggctgcccccattccaggaagctcaccctcacctgtgtaggccccgtagtgacccacacatccagcagacgcccacccaccactagccgttgttcctgcgcaaagtagtgtgctgtgcgcccacccaggcggccgcctctgggcccagggcacatgctgtgagcttcctgtgagcccaggctctgctcgctgctgtcccgcaccacctctgctttccctgtgtagatctaggccagtgactgcttgttctcgtggagctgtgtgtgttcttctctgagcagctcctccccggaggcccccagcacagtcccaggagatggcgggaaggaggtgtcagggtacggcggacattcaccccgtgagcacgatggtgactgtgactgtgagaggaagaactggacccaggacggagtggggctgccctgcctgaggctcccgaggagctttgtgctttggtattccacccctgttgttacttgtgacttagtttcctcgacctgctggggtgttccctgctgttttccagtgtcctgtgactgtcctgtgagggccacagggcagggccctgccacagcagatgggcttgggaggggctccctaaagccagtggacactgtcagagtccaccgtccaggcaagaggcagaccctggggccctcaggaaggagggaggtggcagcgggggctgcagtgggagtaggggcagatgaggcatcttgctgggaaccccaggaggagggggcccgggacctgtttgggacctgtgtcctgtggtgaccgtttgcagtttctctctgtgttgtgattcccttctcttcaatgtttcagtacatgtttctcttcaataaatttcattcagtgttaaaaaaaaaaaaaaaaaaaaaaaaaaaaaaaaaaa

SEQ ID NO: 4216 - DNA, 737 bp, Macaca Fascicularis
  misc_feature (1)...(737): n = A,T,C or G
tagacactgataannnnnagctatattgttgacactcatctgttttgtcttatgcttagccatatttaaatcttgactttaatagagtctagtgaaaaaatgagtgggaagaatgaatataaaagtaataatataaggaaaaagggaaagtaaactatttagaatgtagttttgttatatttccaacatttcaatatttattagttacttgtaaattactgtggcagtgtagtttataaatgtctgtgcactatattaattagaagaccatagaacatgccagcaggttggctaatgctgtggggnnnnnnnnnnnnnnnnnnnntgtggaagaaattatttggtacattaataaaaaaaattggtaaaacatggctttatacctcagtgtgtaagaagtgcaagacaaatatgcttatttctttttctagaatataagtgatttatttgcttatgatactaacactattaatgacaggagtcagtcagcctttatagctatcaaaatataatgagatcccaatgatgatcctttcttactttgaatgttaattagtttgggactttgattgactggcaaacattttatcattgtcagaatttaatttaggtttcaaaaatagcttacaggattttaaacatggtgtggtattctaaagcctttttttaaaaaagtactttttgaaagaaacaaatgaggattgtaaagtttggggacttacctctgtagcatggaa

SEQ ID NO: 4217 - DNA, 760 bp, Macaca Fascicularis
  misc_feature (1)...(760): n = A,T,C or G
aaaaagtgatnntttnnntgtgagctgacacttgctcnttcagaccagtacccaacatctgaagaggnnnnnnnnnnnnnnnnnnnnnnnnnnnngagggcagtacatatgaaggtggaagggagaagaatttatctgtcagctgtcatcatacctcaaacatgcacgccacagggcatgaattttcttgcacttcccaaatgtaactaggtgggggctgagcagggctaccttagcaggaggtctttggcatattaataggaaaacttgggtgttggatgtgacagatgtgggataagggcacaaaggtaagtgctgttgggttggcagctgggtacaaagcaagtgaccaaaatccnnnnnnnnnagtgagactgagagccctgaagcagcacagaagacatgtctggcnnnnnnnnnnnnnnnnnnnnnnnnnnnnnnnggatcagagggtttctgtgtcttacttagaattgactgtgagaatcattcaccctatcctaatgacacacaaatctcatctnnnnnnnnnnnnnnnccctgaaactccaaactcatgtgtccaactgcctacttaatctctctccgtggacatttaacaggacatnnnnnnnnnnnnnnnnccataaaggaactcattatttctgccannnnnnnnnnnnnnnttcttccccgctgagttgctcaattccaacatctacaagttaacacttgttcttctctttccctnnnnnnnnnnnnccccctatacttaccccca

SEQ ID NO: 4218 - DNA, 3617 bp, Macaca Fascicularis
aaaaaaaaaaaaaaaagcagtacagattctgaagccgcagcgccgtcccctcctttcctcgccccagcctgagcgggaagtggcagcagctccccagagccctggcttggcagggaggggacgggcactcgggcagccatattgcagccccccgggtccctcctcctgggcagccgcgggccccgcactcacgacctcctctgggagccggatctgtcctctccatcgccgccacccgccagcctctgcgtcccttggcttctgacatcccttctggccgtccccctgtgccagtccgagcctctatttatttcctttcttactatcaatacttgaccagcagaaaaggaaagtttaaaaatgccgatcgcacagttgctggaactatggaaaaaaatcgaggtggagcctatgggaatagagaccacagaggaggatctcaacgtggatgctgaaccggccacagaagacactgcagaagaaggcaaaagtgactcagctgcctccaagacaaaggtagctggatccgcagaggaggaaggcattgtgaaggagattgacatcagccatcatgtgaaggaaggctttgagaaagcagacccttcccagtttgagttgctgaaggttttaggacaaggatcctatggaaaggtgttcctggtgaggaaggtgaaggggtccgatgctgggcagctctatgccatgaaggtccttaagaaagccactctaaaagttcgggaccgagtcagatcgaagatggagagggacatcctggcagaggtgaatcaccccttcattgtgaagctccattacgcctttcagacagaaggaaagctctacctgatcctggacttcctgcggggaggggacctcttcacccggctctccaaagaggtcatgttcacagaggaggatgtcaagttctacctggctgaactggccttggctttagaccatctccacggcctggggatcatctacagagatctgaagcctgagaacatcctcctggatgaagagggacatattaagatcacagatttcggcctgagtaaggaggccattgaccacgacaagagagcgtactccttctgcgggacaatcgagtacatggcccccgaggtggtgaaccggcgaggacacacgcagagcgccgactggtggtctttcggcgtgctcatgttcgagatgctcacggggtccctgccgttccaggggaaggataggaaggagaccatggccctcatcctcaaagccaagctggggatgccgcagttcctcagtggggaggcacagagtttgctgcgagctctcttcaaacggaacccctgcaaccggctgggtgctggcattgatggagtggaggaaattaagcgccatcccttctttgtgaccatagactggaacaagctgttccggaaggagatcaagccaccattcaaaccagcagtgggcaggcctgaggacaccttccactttgaccccgagttcacagcacggacgcccacagactctcctggtgtccccccgagtgcaaatgctcatcacctgtttagaggattcagctttgtggcctcaagcctgatccaggagccctcacagcaagatctgcacaaagtcgcagttcatccaattgtacagcagttacacgggaacaacatccacttcaccgatggctacgagatcaaggaggacatcggggtgggctcctactcagtgtgcaagcgatgtgtgcataaagccactgacacagagtacgctgtgaagatcatcgataagagcaagagagacccctcggaagagatcgagatcctgctgcggtacggccagcacccgaacatcatcaccctcaaagatgtctatgacgatggcaagttcgtgtacctggtgatggagctgatgcgtggcggggagctcctggaccgcatcctccagcagagatacttctcggagcgtgaggccagtgacgtcctgtgcaccatcaccaagaccatggactacctccattcccagggggttgttcatcgagacctgaagccgagtaacatcctgtacagggatgagtcggggagcccggaatccatccgagtctgtgacttcggctttgccaagcagctgcgcgcggggaacgggctgctcatgacgccctgctacacggccaacttcgtggccccggaggtcctgaagcgtcaaggctacgatgcggcatgtgacatctggagtttgggaatcctgttgtacaccatgctggcaggatttaccccttttgcaaatgggccagacgatacccctgaggagattttggcacggatcggcagtgggaagtatgccctttctgggggaaactgggactccatatctgacgcagccaaagacgtcgtgtccaagatgctccacgtggaccctcatcagcgcctgacagcgatgcaagtgctcaaacacccctgggtggtcaacagagagtacctgtcccaaaaccagctcagccgacaggacgtgcacctggtgaagtgcgcgatggccgccacctactttgctctaaacagagcacctcaggccccgcggctggagcccgtgctgtcgtccaacctggctcagcgcagaggcatgaagagactcacgtccacgcggttgtagcagaaccttaggaaaaagtggataatccttaggtcacagaatgtctcctcccagaaatgaacaaaagtcatcacctcttctgcttgctacgcagaagagctcatggtctttttcagtcatcccggtttgtacagacttagcttctgaactctaagaatgccaaagggaccgacgagactccccatcacagcgaactctgtccttacatatatttgatgtgcatcagcggaggagaacactggtttggccctgctctgccgagggtctatgaaatacctctactttccctcccatatgcagaacaaagtgatactggaaatccttccacaaaagtcagcctaaagaagctatggtatcatatgttaaactaagctttcaaaacccttagtgaaatagcaggtgactgctttcaagcagcagtcgacatgtaaatgaaggtgttcttagaatttgcattttaccagctcagcgcacctccacgtcaaatgaaatgctctgtatgatttgcacaaatgacatagacctccccaaaggttaattggctctccttgctcacacagatcatctcataaccaccaccccccgcccccgggtcatgaaaatcacagaacttaatacgcacactgaaccctagatctcaggcttcctgacctaccgcgagtggccccttgctggccaccctatagggtcctccttccctggcagccccctgtgtgggagaaatacctgattctcccaatctgcagtgggagagctttgctgaattccaccccaaagtcaaacatgggcaagaggtgaggatttcacttttaccctcaagtccgatttgtctgtgattttaaactaactgtgtatgtattgatgtttggaagattgtttgaattttaaagtggtaatagtacttaatgttagccagtattgttcattaaatggcgttatcctaaagctgcaaaaaaaaaaaaaaaaaaaaaaaaaaaaaa

SEQ ID NO: 4219 - DNA, 2522 bp, Macaca Fascicularis
  misc_feature (1)...(2522): n = A,T,C or G
tctcgggctggcgccggtctacctgggcaggcgtggggcctgtcgggggctttatggcggcgcggaaagctagcctgccgagaggctgagccgagcgccccaggcccaacgccctggctgacccagccccgccacgtccaacgttcccgccctctggaggaagccgcgcaatcactccgggggcggggagagatagacagctgagaggaaggaggtgccatgggcgctctctcgcgagagggccgcagagccgcctttgacgggggcgtgtgcctggagagcgacggagggactctgaagatttaaggacgaagagcagttgaaaactgaaagctgtggttaatgggagaatttcaaggatggtgaaaaaaactcagcatcattgcacccctgttcttttttgtattgtggactttttagtttagatcttgctcttgacaaaattctcagggaaaactcttcggctctggatgtctccctttttgtggatcaaacacaaagggcatcattctaaaatatatatggaaccataaaagccccaaatagccaaagaaaccctgagcagaaagaacaaagctggaagcatcatactaccagacttcaaaatttactacaaagctctgatacctaaaacaacatggtattggcattaaaaaaataggcacatagaccaatgaaacagaatagataatctggatataccaactcatctttaacaaaggtgccaagaacatacaatgaggaaaggatggtcttttcaataaatggtgtgggggaaagctagataactatatgcagaagaatgaaacaagattcctctctctcaccatacacaaaaatcaaatcaaaatggattaaagtcttaaatctaagacctgaaactacgaaactagaagaacacactggggaagtgctccaggaccttggtctgggcaaaagattttgttttgtataagacctcaaaagcacagacaacaaagcaaaaacagacaaatgagattacattaagctaaaaagtttctgcacagcaaaggaaacactcgacagagttagggagacaacccacagaatgggagaaaacattttcaaagtatccatctgacaaggaattaatgaccagaataaagagactaaacaatttaagccaaaaacaaacaacaaaaaccaaataatttaaaaagtgggcagacnnnnnnnnnnnnnnnnnnnnnnnnnnnnnnnnnnnnnnnnnnnnnnnnnnnnncagatcacaaggtcaagagatcaagaccatcctggccaacatggtgaaaccccatctctactaaaaatacaaaaaaaaattagctgggcatggtggcatgcacctgttgtcccagctacttgggaaactgaggcaggagaatcacttgaacccgggaggcagaggttgcagtgagccaagatcgtgccactgcactctggcctggtgacagagcgagactccatcttatgaggaaaaaaaaaaaaggtggacaaaagatccgaacatacttttctcaaaggacgacataaaaatggccaacaggtatatgaaaaaatgctcaatatcactaatcattagataaattcaaattaaaacaacatgttatttcaccccagttaaaatgacttgtattagaaaaacagataataacagatgctagtgaggatgtggagaaaagagaaccctcgtacactgttggtagaaatgtaaactaatacaaccactacgaagaacagtgtggaggttcttcaaaaaaactaaaaatgaattaccatatgatccagcaattccactactgagtatatatccaaaagaaagaaaatccatgtatcaaaaagatacccgcactcccatgtttattgcagcattgttcacaacagccaagatacagaatcaacctaagtgcccatcaatggatgaatggataaagtgtggtatatatgcacaatgaaatgttaatcggccataaaaaatagtgaaaccttctcatttgcagcaacatggatggtactggagactactatgttaaataagccaagtacataaagacaaatattgcatgttttcagtcatacatggcagctaaaaatgtggatttcatgatgacatagagtacattggtggttaccagaggccagaaaggaggggatggagtaggagacgaagggggaaaaaggatatatttattaccactgaactgtacacttaaaatggtaaagatgatatgttatatattacctcagtttacaaaagaaaaaacaaatggcatcaatgtcaataagtgtaaaagttgtactagggataaatctgccatttgaaagggaaattagaaatctgaaataacgagtgcagttagcctgtgaaacccttgaagaccccaaaagtctcattcagaactggtcccaaaatgaatacgtactattgtatcattgtctaattaaaggtgcttctattcaagtattagtttgcttcaaaataaatctttttatttgtactagtaaaaaaaaaaaaaaaaaaa

SEQ ID NO: 4220 - DNA, 514 bp, Macaca Fascicularis
  misc_feature (1)...(514): n = A,T,C or G
accacacccagnnnataaggaagctaaatttttttaagtgccccatatttagcacccagaagatctttaattcacagccactaaaaccttgctcttcaaggtgtgtctggagaccacagtctcaaccccacctcagacctcctaaagcaggatctgcatttttaacctgctcctgggccagcatgtgcagaggagcagagagtgagctccaaaagagcaggccctgccctgtcacctcagtatctgatatggtttggctgtgatcccacccaaatttcaccttgaattgtaatcatctttacgtgtcaagagtggggacaggtggaggtaattgaatcatggaagtggtttcccccatactgttctcgtggtagtgaataagtctcacgagatctggtggttctataaaagggagttcccctgcgtacgctcttgcctgccgccatgtaagttgtgtctttgcttctcctttgccttctgccatgattgtgaggccaccccagccatgtggaac

SEQ ID NO: 4221 - DNA, 148 bp, Macaca Fascicularis
ctttactgcctaaagtttttgcccacattgattatatcctatattcaaaatgcataataggtacatagaatgctgagattggtgggtcttaacctgtgtttgcctctggtacaagtgctttctgagacttgtagctgagctgactaga

SEQ ID NO: 4222 - DNA, 726 bp, Macaca Fascicularis
  misc_feature (1)...(726): n = A,T,C or G
acnnnaagcgtgaggcagccagaccccagtgcctgtgnnnnnnnctcaggacccgaactcaccgggacgnnnagggtgaggccggcagcgcccttggcggttcttcctgtggaacctctgccagcagaactgattcacccggcagctcttctgacacccaaaacctcatctgtaggaggggcagaccaggccctatacctggagtgtacccctggctttgtgggccaggaggaatcaggggctgcacatgcatccagtcctctgtccacgcaaaccctgagcccgtgggctcccacaggagggtcgctacccagcctggtggagattgaacaccccttcccggctggccggggggcctcaccccagcaggagctgacagggcccaccttggcccccagtgctgaaagccacaggcctcctgagcttcaggacagtgtggaggggcttcctgagaggccccacgctgagtctccatggtgactccatgggcagcagctggtaccctgctggctaggacggtcccggtgaccctcagtgacctagttgcccccaggctccnnnnnnnnnnnnnnnnnntgtggctggggacagtgttctggccggaagagcactcactcggtgcttccctgggagggtggccccccagacgcccacctccaggccgacccatcactggaagtgggatttgaaatgcagccaagaagaggagaccgtcggcaacgcccg

SEQ ID NO: 4223 - DNA, 237 bp, Macaca Fascicularis
cctgaacagacagctccttacggcctgggaaacccgccaagacgccggcgccgctccctgccaaggcgctgtcagtgctccagcgccagggacccctcctgtgccaccttctgccttcgaaggccctggactgaagcccgggcagtcccaagccggaagtccccagcagacgtgttccagactggcaagacaggggccactagaggagagcttctccaaaggctgagggacatttcc

SEQ ID NO: 4224 - DNA, 2643 bp, Macaca Fascicularis
aaaattggatcctacagaaaggttctgttggattctgaccggaacctctttgggtgtgcctttggatttcaagtgttgacatgggaagatgctccagttcctcaagctatctgaaacaagctcattacaatgctaaggaatagcgcacagtgaagacagtcagtgagaaccagagctattgttacaattgacagcagccagctcaggcggcagaggacgagagagatcgggctgcacacacatggatgaggctgacttttcagaagacacgacttataagcaggaggatttgccttatgatggggacctctctccgattaagatatgcaatgattacagttttacctcaaaaaatgatgcctttgaagtctcaagtcaaattattttcatagcagatgaccctcaagagaaggctatgcataatgagacttgtggaaatacagctatgaccatgcccctgggtaaaactactgaaaatgctgccaacaaaaaagatgagaaagagaaacaatgcactgcagctcttcatattccagcaaatgaaggagatgcttctaagtcaagcatttctgatattttacttcatcatctttccaaagagccattcttacgaggtcaaggcattgattgtgaaaccctcccagagatctcaaatgccgacagttttgaagaggaagctattattaaaagtattatttcatgttgtaataagaattcttggccaaaagaacaaaccctagaactcactgaccaactcaaccccaaaaaggatggtgaaaacagcaataaacctggttctcccaccatgacagaagaaaatacctctgatttagaagagacagtggctgctggagatagcagccatcaagaaaatgtaaacattctaactaaaaccaagggtccaggtgataaacaaaacagttatcaagggcaagcaccccagaaacagcatactgaaaaagcaagttcgggcaacaggttcaaatatggccaaggtcaagttcattaccagctccctgatttctctaagattgctcccgaagtgaaaaatcctaaaaacaacataattaataaaccacttgcaatagctaaacaagtcagcttttctaagttgagagagaaacccgctgttgtgcaagatattttagaaaccatgcctgagtcaaactgtgttgaaaaacaacatcaagagcagaaaggggaaatcactgaaccttcacaacaaatccagatggagcccacagtacatatccaccaagaacttctcacaggaatagaatctgaggcaagtatctctaagttgtcaccaacctctcagaaaggaacttcctcaagctcttcttacatatttcagaagatatcccaagggaaacagatgtgtcagaagttaaaagaacagactgatcaactgaagactaaagtacaagaattttccaaaagaataaaacaggagtctccttatcatttgcaagacaagaagctggtcctggagaaactgcagggacaccttgaactgctggagcagaactttctggccaccaaggacaagcatctgactttgcagcagcaagtccacaagcacgaatcaacaattgtcagtgactttgatccagaaagaaaagtggaaggtgaaatcttcaagttggagatgctacttgaagatgttaaagataaaatggatgaaagcaaatatacttcagctccttctcttcctgtgagttctccagttaccctagatgacttggcctccacctcctcttcactctcaaatgaggttcccgaggagcaccctggccaccctcctgggcctcgaggctcaggtgggagtgaggcgacagggacaccccaaggagggccgcaggaggcccccaaggaggagctctgtgagctgaccccgcagatgaggaccccaggtgcactccaggaaggcaggattgtgcagagacgacggcacccagtcccagctgtgccttctgtcgcaggctccttgaatggaagccaaaagtggagaaaaagggccacagaaggatccactgtggaagattttcaactgtccatgaaaaggcaccacattcagattccactcccaattctgatacaggacacagcttctgttctgattctggcactgaaatgcagggtaacaaatgtcaggactgtggcactaagattcctacctcccgaagagcctgcagaaaggaaccacctaaagaatttcattatagatacaacactccaggagagaattactcaaatcatagcaaaagaggtgcctttgtccagccccattctttacatgaaagcaaaaactcttcaccctgtaagtacatctcctgcatgaccccatccatgtcaacaacctaatgtcccaggtatgggacattcacatgacactggccactgctttcatcttggaagccctggcctctccattctgctgcccaggtcttatgtactcacctgacacttccaaatccagccctacacctggatggcaagaggctgagctggggctagaaaatatgaaatcacagtgatcaaggactttgaaagttattaaggactctaccagtgcaagttggtagcaacccataagtttgctgaacaaataaatgacttattggataaaaaaaaaaaaaaaaa

SEQ ID NO: 4225 - DNA, 758 bp, Macaca Fascicularis
  misc_feature (1)...(758): n = A,T,C or G
tcagtgcaggtcagtcatatattttatnnntttcagcgtcagcagtttcaaatcttattgtactgtgttacaaaattttagcccacatttcaggctccctaaatcatttgagccattatttttcccaacaaatggtgaattttttctttaaatgtggatatatatgttgtaatttatggttcctagttatgtatttttgtgggatcctgcagtaaaattgacttttttgtgtctttgggaaatttaaattgctctaacagtgttgcacagaaatgagttcatgccatttaacatattgtattttaattattaagttcattaatttactacgaaattgacatgccttttaactaaaatgaaattgaacattgcggttttcaaatatttttccttgttgggtctggaaaaggaattctactttgatctgcatagaaaattttgatacaattttttgagagttcttaggtgaaacatttacccattataaaggaagcagaaatactgagacatgaaaggcattatcaactaactctagactctagaacccattctagcatatctcacgtgcaatttttaaaaataagttaataattcatctcatatcaaaaaagcctttgaaacatgggttttcactagatatcacctaatgctaagataaaaaccaaaacaatatcagaattacatttatgctctaaatttgtagttgtccaatgttgtgcttagtaaatgtgtgtcattaatgctgtattctcctagct

SEQ ID NO: 4226 - DNA, 611 bp, Macaca Fascicularis
cagcagcgacttgtgagtggacagcaccaagaacacgccattttcttggctagttccaaaataggtgctttgctgaggagctgtagctgcatgttaacattggggtgttttttgggcacctggcagccagccctttcagccgtcagccctctgtaatgactcacagtggcggtgcacaccgtcgaggaagtgggtttccgtgcgtttccttctctggtgtgcttgatcccaggtgctgatagctgctgtgtgggcgccagtagcatcaaggaagagaaggtgaccctttcatgtcctgacagtatggtccagagagcacattgactttttatttttcctcattttttaatttaagtgtttttttttagagacagaaccttgctctgttgccaggactggagtgcagtggtacaatcatgactcactgcagccttgaccttaacccggggctcaagcgatcctcccacctcagccccccaagtggctgggactgcaggcgagtaccaccatgcctggctcattttttttactgtttttggagagacagggtctcactgtgttgcccagtttggtcctgaactcctggtcttaagagatctgcctcggcctcc

SEQ ID NO: 4227 - DNA, 615 bp, Macaca Fascicularis
cgtgggctgctccggtgccgctcacagccctgcgtgctcagtgggaagaggagccggcgcaaacggaggcgtgaggaggacgccaggtggacacgcccatccttggacttcctaaaaatgacccggactttaaaaaattcaaaaagcctttgctccctcaattacgaagatgacgatgaggatgacgccccagtgaagatggttgtgtcctccccgtgtgaatcccggggcctccctggcatcaccatgcctggctgcagccagaggggcctcaggaccagccctgcccaccccaacctgtgggcctcaagggagtcggtgaccggtgatggctcgagcaggagcaacggggaccccagtgatggggacagcgccggggaggagggtgtcttcctccgggcccgcggggagctggacctggagcagatcgagaacaactgaggctggcgggggctggtttgggccactgctgccgcctgcacctgccctggggcacagagtaggtttcatgtgacttggaacattgaggcataattttgattcagtttttcctaaagaagtattttgcatttttatggcttttgcagttcaggagaaagcttctctattttggat

SEQ ID NO: 4228 - DNA, 1911 bp, Macaca Fascicularis
tagagtttatttaagtcgagctgctggggtttgtttggcttggatcttgtgggtgaagcgcttcttatatctccttaacctgtgtcaggttgatgtttcataaatggagattaagtgttgtcccaaatgaaatatgaagttaaaacatcaggttagggcatgttgtaggaagggatccggtaaataattaggataactgaattatgacagtttgaaatgggagttaactctggaggtgctgtttgattaaacctttctggattctaagcggttcaataatggaggggctgattaccagcctcgagtcggaactttgcatcgggatcctaaatgtggaatacatatggattttcactgtaggtagcttttaggaatatgtcccttttgtgtgctatgaatgagagttgtggattatatttgatggcatttctcctttaaaaagctttggggtgaagcttaaaaggctcatatctattttaacattgaacaaacacaaaatgtaatagacgttgatctcccagaacttgacttttgttgctactactgttgttttaaagttttgattatgtgtttttaacctcagtctttgttgattctgtgttcattgcttctgctgctaaaatttattgctgacatgaataaactgagatttgagaaagaaaaaagaaaaaaaaaaaaccaaacccacctctaattagccaagtttctaattaaggataatagaaatccagatgatatctaagattttacctaagagatagcatagaatgtttcaattcattttaaatgtttttatgagaaaatctgaatattaaaagtacaaaattcagttaaaaaaatgctcctctggaatgatatatacaagggtgacttcaatgcctgtactaggtttggtcctagaaagaactgctatactatggcattgttgatttcagcggccacagaagggaggatattttatatatttgtctggagatcagattttttcttcccaagtttccggaccggacttgctcctcaatgtcataccctggcgtatctcctgtttgccagaccatctaatggcatcttgtgggtgcagcctatgaattcaattttatgaggacatcagaaactgctgagcagtggggagtggagaccaaatggactatgggtctgatcatacttcatcatccagagataatctccagtggaagttccctgggaagcccctgatacaggtgtggggaaacttcatttttcctcatggttaaaagaatagggaaagatgtagacaagagaaaaagacactgctgtcgaatgtttgatgtaatcgtgctggtggtagcatagtgagtttttaaaatcacatcacatgtaattttttttcaacttaagaaactttgcagaatcttgaaatagcttttctcaaattcaatctcgttttttttgtctacgtcgttttttcttgcgtgaaatttttctctgactctagctacccctaactattgaaggctgttattctgctgctgataatgatgatgatttctcaaataagtggcaagtgttgaaaagatgggccaagagaaatatgttgtctgtatcatatatgctttgcttttatttatgaaaatgacttcttccaggtgaggcgatgataaattttaagttgcggcttggctatttgcatcaccaaaccactatccttttcttagagaacaaaatagaactaaagtaagcagaaataatttcattgtaaactgttttgtagttcagcgtgctctttttaggcagatggtaatcaaagctatccttaaactatttgattcatataaatagcatttttctgaattttccagtagatgttgctggagagcaaagaaaagagcatttttttcaggaaaaaaaaaaaaaaaaaaaaaaaaggccaca

SEQ ID NO: 4229 - DNA, 1139 bp, Macaca Fascicularis
acctgccttggtgtttaccactcagatggcttcctgtctgcctttggagctgaggaaaggaggctctggcaccactgaaacaagaaaacttgacggttgctagtctattccattggactcatagatgtttgggattaccaaattggcaagagcaaagctatctccagtgccgaagaaatggctctcacacccacaaatctaaataacgagatgtctctgccgatgaagatggactgccaggaacaagagttgactgagaaaaacaatagctttttccaaaagctcaatgtgactaaaagtgtaatgcaggatttgctaaaggaaattatcaaagtggactacatcttagaccgatcagatgacgaggacgacatttcctccgaaaaccctcaaactgacttccttcacaagggtatgttggagctggaggctaagcatgaccaggacctgggtaaacaggatgagcaagaaacagatgtggatgagtaccctcaagcatctacatctctgcagttttcaaagaagaacctccttgaattcttattaaaagacatgctgaccctgaagggtcaaattgacaagctggaggaccggggccttgaccttgatcaagggacaaacactgaggtgaatgctcgtaatgaagtttatgaattaaagaagaaagtcatggaaagtctggaggacctttgcaagaacgtggaactgctgagtgcaaagctgaggatgtatcaaatggagggagagaacactgactctcacagttctgaagaaacagatatggaagagatggagaccctgcttcctcaggccccagcatcctttttagtgcagaactctcctcctcccaatacagtgtggaaatgtgcactgaggattttcatcatgttttatgtcctcaccgtcactggacttttatgttacatactattttttggtgctacatttctctttgaaagggtgcttctgagaatgcttgggtgccgcaccacatgggacctacgggagatgatagagcctttcttgaattcggaagtggaagccttgctaccctcctaaagatacagaagatactgtcaccctactggctttctccccagtaaagattgtggctgttcctgtaaaaaaaaaaaaaaaaa

SEQ ID NO: 4230 - DNA, 2790 bp, Macaca Fascicularis
  misc_feature (1)...(2790): n = A,T,C or G
annncnnnccacccnncttcctccctttaacttacccattcacttaaaacattacctggttgtctggtaagcccgggacagtagccgagtggcttttggagtcggtattgttggtaatggtggagaaagagaggccttcccgctgaggctggggtggggcggatcggtgttgcttgcctgcagagagggtggggagtgaatgtgcacccctgggtgggcctgcagccatccagctgaaagtcataaannnnnnnnnnnnnnnnnnnnttgttactatagtgttcctcatggcgagcagatggaaccgggagacatggagcccctggccagtgtgagtcctagcagtgcaggaggggagaccatggaggagagagcccgcctcaattgatgcctgcagattgaatttccagaggcttaggaggaggaagttctccaatgtcgtgtttccaggccttgctggggaagccctgtattcaggaggcaaccatttaaagttttcagatgagcttatggggggcaatcttaaaatatccacagcagatgcatccggctcgaggtgccatcagctttgaataaatgcttgttccagagcccatgaatgccagcaggcacccctcctttcctggggtnnnnnnnnnnnnnnnnnnnntcttctaaattgagcctccggtcatactagttctgtgcttggaaccttgcttcaagaagatccctaagctgtagaacatnnnnnnnnnnnnnnnnnnnnnnnnnnnnnngtcttatagatggagcttgcagatggagccccgtgacctctcacctaccccccctgtttgcctgcctgcctatgcgttgctcggannnnnnnnnnnnnnnnnnnnnnaacttggggtgttggaaagctgtttaattttaaatgccttagacgggggatgtattagaggaagcagattgtcaagagtgtcattgtgttatgctaaactctgggagggtacaaattggtcattcccaaanntgtgtgtgaaaaatggcaggtctagtttgggcattgtgattgcattgcagattactaagannnnnnnnnnnnnnnnnnnnnnnnngtgctcttttgttcttgcttcgtttttttgcacctgaacttcgttagatttcataatgctnnnnnnnnnnnnnnnnnngaggaccctgaggtgggagttgtgggagaccgggagaaggggannnnnnnnnnnnnnnnnnnnnnnnnnnnnnntgtgggggatggggnnnnnnnnnnnnnnnnnnnnnnngggagggatgaaggtgaggaaggggagagggttggttaggtatatagtgtgggtggtaggaaatgcaggttgaagggaaattctctggggctttgggaagttttgtgcggtgggtgagccaagaaaatactaattaataatagtaagtgttggttaagttgttgcttggaagtgaaaagttgcttagaaaggttagaactttaagtgcaaagaaaagaaaaaaacccaaaacaattgttttcctttgctgcaaggtggggaagactgaaaaagtgtaaccgaaaacagatgacacagagtcacccgttttcctagaacccacagggaggggtgtatgatgccatctcacaggcagggcaagtgtctttaccagcttcctcccggtgaccaaggcagcctgttttagagggttgttttgtttggggtgtgggtgttannnnnnnnnnnnnnnnnnnnnnnnnnnnnnnnnnnnnnnnnnnnnnnnnnnnnnnnnnnnnnttcgctgccccttagcaacttgggtggtcaatctgnnnnnnngaaggtgtgnnnnnnnnnnnnnnnnnnnnnnnnnnnnnaccttgtaaatgcctacattgtgggcttttgacatatttaagggaccgcttaagacgagnnnnnnnnnnnnnnnnnngatttgtnactcatttgtcacagataccttgtgattgaaaatcgtgagtgaagtgaaattgcagtgcatttcaagggaattttgtatgtaaatcgtgccttagaaacacttctgttgtcttttctgtgtttggtcgatattaataatggcaaaatttttacctacctagtatcttcaaatcgtagtctttgtaacaagaaccaaataaccttttgtggtcactgtaaaattaatacttggtagcagacagaatccatgtacctttgctaaggttagaatgaataatttattgtagttttagtttgaatgtttgtgctttataaatgatccaaggctagaggggaaactatcacttaaaatccatgtggaaaacaagagctaaaaaggaaaggggatggggattgtggggagggagtgggtgaggtgcctttactacatgtgtgatctgaaaaacctgcttggtaataagctgcggtattgaattggtaaagtaataccaaaggcctattatcatttctttcttccctttaaatttcacttaaaatttttaaaatcatggttatttttatccttgggatctttctgtcttctgggttccgttttttaaatgtttaaaaatatgttgacatggtagttcagttcttaaccagtgacttggggnnnnnnnnnnnnnnnnnnnnttgggatttagagtgtattactcatgcatgtatgggaaatagtctccggtatgctgttgtgaaattgaaactgtaaaagtagatggttaaaagtactggtgtgttgctctgtatggtaagaactaattctgttacgtcatgtacgtaattactaatcattttcttccacttacagcacaaataa

SEQ ID NO: 4231 - DNA, 616 bp, Macaca Fascicularis
gaaaaggagtggatttggtaagaatagagagttgttttattttaaccacttcccattactgaccattaaaacaaaagctcaccactagagttcctgaaaacaggggaaacctgtatgacagcccttccactttggggagccacacttttgatgtgacagtaccgcagagtgatccaccatgggggatgtaatcaccaaactgttctttggtgtgtgaattattagtggaaaagacccagctgtaattagacctccactgtgtacttagctggaagaacatgttaattctgcaatatgtctcttggttaaacattgcacagttcttacctcatttctgtaaataaagttttgtgaatctgttttgtattgtgaaaaattcataagataacattgatattttgatttgtaatatttctaattggtagatttaattgaaaagtaaaattaatttatttttatatgttcaggggaattttaaagtcaagtattttgtagataatttaaaaaatcagtgtggtttattttacttatttaacccactggttgttattctgtaacagtttgtataaatggtaaattttgaatgtgttgttattttaccatagatgtaaaattc

SEQ ID NO: 4232 - DNA, 744 bp, Macaca Fascicularis
  misc_feature (1)...(744): n = A,T,C or G
cctgtgagctganncggatgnnnnntacccctccattcacnnnctgctgaagcaaccagttgtaacctaaagcagttcaagctaaattcctcactacacactcagagttctaaaccattccctatggaagctgtatgatggctgcaatagaaaaataaaatatctaacagctacacattgatactcagtttaattcacatttaaacttttttgattttgaagtttttctagtagccaaggcacacactactatattaaatgaaattgaatgatgttttacagtgacatgctacacatgggacacagaacacattaggattgaggggaggagctatactttaacttaaagccataacaaagtcatttccatttctttcaaagttcctctctcatcttttacaatagtgattcatatccttgatctgtagcaccagactttctttccatcaatccctaaaaatttctaaaatcacattaatttcaattactgttatttagaaaactaaatgtataacattgtagtaggtgctacttcgcaatattaaaccaacagatgtgacaaatgccaatgttttcaaacgaatgttttttttgtgttttgtttcaagtgtaatgataaatgctgacaaatgccgatagatcttttcattctattgagtaacttgctttctttgctgttttgttgatattggtttttctataaagtgtttgattctggtaaatcagattgagattcattatagt

SEQ ID NO: 4233 - DNA, 728 bp, Macaca Fascicularis
  misc_feature (1)...(728): n = A,T,C or G
tgggtcccactgctgcagatgcaggaccagagtccgagaagggtgatgaggaagcctgtgagccagctgcatcccctcctcaggccacgccaacctcnnnnnnnnnnacacctccttgttctccccctccagctgccaccaactttcctgcacctccttcccgggccaggttgtccaggccagacagcggcatcctgggttatataaacgatgaaagagggcctggaggtgactgatgaaagcttctagaattcctctcnnnnnnnnnnnnnnnnnnnnnnnnnnnnnncaggcccctttggctccaacccacacgcctgaactttaaggatcattggactgtctnnnnnnnnnnnnnnnnnnnnnnnnnctgtgttcacagaatggccactgataggcacgcctctttccccacccactggaaggctcacaggcaaggtgagagannnnnnnnnnnnnnnnnnnnnnnnnnnnnnnnnnnnnnnnnnnnnnnactttgagaaattcaccctcgcaagccttccttnnnnnnnnnnnnnnngaagtgcagagnnnnnnnnnnnnnnnnnnnnnnnnnnnnnnnnnnnnnnnnagttgcnnnnnnnnnnnnnnnctcatcggtaaacagtgggggtaatgaaacccacctcacagggttgttgtgaggannnnnnnnnnnnnnntaggtaagcacctagcacnnnnnnnnnnnnnnnnnnnnnnnnnna

SEQ ID NO: 4234 - DNA, 3259 bp, Macaca Fascicularis
attttgtttcctctcgcacagtacagtcctgcattatagaatgtccttcatgatgtcgacaggaccttaaccaggggcactgaagctgaaactgaaagagaaagtcatcaagtatggaaaatttctgaaagatatgagatagacccggaagactaggcagagactcagccagaaagctgggtctttcagaggtgaaagtagcttcatgcagctggcatagatctggggctagtacctgtgtctgacggtctgcgtgtcagggagagctgctgctcatggacacaagttgcatcatcaactgattccctagggccatgtcagtgacagcctctgtgagagactctgcctccttcctgtcttctctgatgaaactccatgtggtgttgtatgaggctaggagggtgcttcagacctgggctccccagatgaaaaatttgaggctggggctagtgccaggtcaatcgtgtgtcaggctggggatgatgttgcttttggggataatttttctcccgagcatatgctgtgacatggcttcggtatattactcttcctatgaaatagtcatcccaaagcggctgatggtcaggggaagtgaagactcagtggaaaaggcaacctatttgctacttatgcaaggccagaagcacttggttcacctgaaggtgaaaagaagccattttgtgaataactttccagtctacagttaccacaatggcatcctggggcaagaatcgcctttcatctcacatgactgccactatgaaggctacatagaaggagtgtcaggttcttttgtttctgtcaacacctgtgcaggtctcaggggcatcctgattaaggaggaaaaatcttacagcattgagcccatggactcttcaagacggtttgaacatgtgttatacaccatggcacatgaagcgcgagtctcctgtggtgtcacttccagagacagccatgtggtgtccactagctggcaacaagggagcaggaagcctcatgatctacaggcgctgtcctacttgtggtcacacaccaagtacgtggagatgtttgttgttgtcaacaaccagcggttccagatgtggggcagtaacatcaatgagacggtccagagagtagtggatgtcattgctctggccaacggcttcactaggggaataaacacagaggtggtgctggccggaatggagatttggaccgagggggacctaatagatgtcgcagtggacttgcaaatcacactcaggaatttcaatcgctggagacaagagatgctcttccgtcgtgcgaagcacgatgttgcccacatgatcgtcgggcatcatcctggacagaatacgggccaggcctttctcagtggtgcctgctcaagcggttttgcggcggctgttgaatccttccatcatgaagatatgctgttgtttgcagccctgatggtccatgagctcgggcacaacctgggtattcagcacgaccactcggcctgcttttgcagagagaagcacttttgcctcatgcatgaaaatatcacaaaagaaagtggcttcagcaactgcagctctgactacttccaccagttccttcgagaacacaaaggggcctgcctatttaacaagccacggcccaggggccgcaagcgtagggattctgcctgtggaaatggcgtggtggaggacacggaggagtgtgactgtggttctgcctgtcacctcgacccatgctgtgatcccacatgtactctgaaggagcatgctgagtgcagccatggcctctgctgtctggactgcactttcagaaggaaggggtttttatgccgtcctactcaggatgagtgtgacctcccagaatattgtgacggtagctctgcagaatgccctgcagacagctacaagcaagatggcacgttgtgtgatagaattcactattgctctgggggtcagtgtaagaaccctgataaccaatgtgtgaatatatatgggtaccctgcaagatctgccccggaagactgttacatttcaatgaataccagaggagaccggtttggaaactgtggccatcccactgaggatcagcaaacatatgttacatgttcagatgataatgtattttgtgggaaactcatatgtacaggtgttcaatccttaccacgagtcaaagctcaacatacagtgatccaggtccctcatgacaatgactggtgctggagcatggatgctgataacattactgatacccctgataatggcaacgtgcacgtcggcacttcttgtgccccaaacaaagtctgcacggattactcctgcgttcatcactctatactcctgtatgactgcagaccggaggaatcgtgtcatgggaaaggagtttgcaacaatttaaggcactgccattgtgggtctggttttgctcctcctgactgtaaaaatccaggaaatggaggcagtgtggacagtggccctgctggtaagccaagtgatgaaattataagtagagaagaaaatagaaatcatattgttggtcatggtaatccccaaagaggtgacgtgagtaataataaaaacaaaagcctagggaagttagtgtacatagttcccctgttgcttttagcattatttgcaggtctaattattcttgccagtatgggagctagaaaggagatattacagaggtcacaaggtgacacagaaggaactccagaagaggttgcaccagaacagaaactaggcaaaggacaggaagaagaggcaaaaaatgagtcgtccaataaagctaacagcggatacactgggtaaggaggaggctcagtacttcagagatgaagtgggcatttatgctgctgtacttctgactaaaagtctgtaaaaatgtactaatgtggaaggagggattttttttctactttcttcattttagtaattgagtacatttagtaattgagtacctataatttaaaattatatgtaagataaactatttttatgcgatcacatttaatgaaaccattttaattaaatttttgttttgaagcattcctatcaatgtcttgtcttattaggaccaatttttgagttgcctgtttttaggtaatgccatctcccatctactttgtttaacatgcaatactatctgcatatgtacatattgcttttctagaattttatatcccaatcataactacatattatgttacaaaagttgtttatgtgatgtgttgttttaatttgccctgtgaagtttattcataaaatgatattttaac

SEQ ID NO: 4235 - DNA, 1814 bp, Macaca Fascicularis
  misc_feature (1)...(1814): n = A,T,C or G
gaaagttaggaaaaaaactttatttcttagcaagaaaaggcatttaactattgactttaaaaagtctacctcacagcttacgttatttaatatgacaaactattgtttcctctacagtgctgtgttaatagctaatactttatatagccaccttctgaagctgtggagaggcttataactttaacatttcacgttggcatttagttgaacctagtttatctggcataaagtagttgttcacaattaattactcatgaactcagctttgtatatgtctgtggtagtcagaaatctgtgggagtatgtgacttcattaaaaccgtgctttcctagtcattgctattagtttaatgctttccttgaaacaccagtcactgagagaaataatagcttctgttatggctatgcacagcagtactgaaagattttgttttcacttttcagaagtattagaaaaattgcctccatgtctgggttatctgaaggtgaaactagtgaatgattataataacttttttttaaaattagaagggaaatgaaggaaggaaggggaaaaaaggaaggaacgaaggaggaaaaaggaaggaatgaaggaaggaaagaagcactattaactataataactgcagttggtactatttgtggaacacttactagatatttcaggctttaggatttgcaaaaattatctcataatatccccatttcatagagggaaaactgaggttcagggagtttaactattcaagattaagagtaggaaccaggatttaaaattaattttttaaattctaagagcatcccctaatcaccacaagatcctacctctctcatttttttcttgcagctggataatggtagaagatgtgtcaaatatttaatccagccagagtgccaagttacattcagcttggatttgaaaaacaaaacaaaacaaacaaaaacaaaaacccattgtttttcaaggcctcagagcataagctctgtgtattacagggaaagcttctatgcttagctggaggtaggagaaccttgctgtctttttctgaatttgctatgaccttgggtaagtcaactgacctccctgggtggtgttcagagcattattgatgttatataatttatttttatcaatgccacaaggttggctacatatgtttcctctctagtgtatgattaggaaagagtcatttagatttcagtagttttatttccttcaaggtcaaccaataattcagacatcaagttgaatggaaatgaacttctaaatataggtcaaatacttttataagaagcacataactgcatctccctcccccatgcctgagtttgatccacctaccaataagttctcccaagctactactcagtctctattgttagtgtgttattgaccacgtgtaccagtcctgcattttgtgtcgaactgattaataattttcttctgaacccctagtgcatcccctgttttgtccacattctcataaagactctaggtgataaaaatgacaggactgggccggctgagcgcggtggctcacgcctgtcagcactttgggaggccgaggtgggcggatcatgaggtcaggagatcgagaccatttnnnnnnnnnnnnnnnnnnnnnnnnnnnnnnnnnnnnnnnnnnnnnnnnnnnnnnnnnnnnnnnnnnnnnnnnnnnnnnnnnnnnnnnnnnnnnnnnnnnnnnnnnnnnnnnnnnnnnnnnnnnnnnnnnnnnnnnnnnnnnnnnnnnnnnnnnnnnnnnnnnnnnnnnnnnnnnnnnnnnnnnnntgactcaaaaaaaaaaaaaaaaaaa

SEQ ID NO: 4236 - DNA, 441 bp, Macaca Fascicularis
  misc_feature (1)...(441): n = A,T,C or G
aaagaccggctactccatagacagagcagccnnnnnnnnnnnngtttgcccattttaatggttatttcttgaatatatactaaacaagaggtggattattcatgcctccccttttcagaccatatagggtaacnnnnnnnnnnnnnnnnnnnntttgtaaactgtcatggtggtggtgggagtgtagcagtgaggacgaccaaaggacacatcttgttgccattttgggttttagccagcttctctacagcaacctgttttatcagcgtggtctttatgacctgtatcttgtgccgacctcatatctcatcctgtgacttagaatgccttaacnnnnnnnnnnnnnnncccagtaggtcttagccttattttaccggcccctattcaaaatggagttgctctggttcaaatgcctcggacaggtgcagagggagggtggtg

SEQ ID NO: 4237 - DNA, 640 bp, Macaca Fascicularis
  misc_feature (1)...(640): n = A,T,C or G
ccgggagaaacgagatgggggtgaagctggagatatttcggatgatactctacctcactttccctgtggctatgttctgggtttccaatcaggccgagtggtttgagggctacgtcatacagcgcaagagggnnnnnnnnnnnnnnnnnnnnnnnnnnnnnnnnnnnnnnnnnnnnnnnnnnnnnnnnnnnnnnnnnnnnnnnnnnnnnnnnnnnnnnnnnnnnnnnnnnnnnnnnnnnnnnnnnnnnnnnnnnnnnnnnnnnnncaaaaaggaacattttactctcagccatgagtaaggaaccnnnnnnnnnnnnnnnnnnnnnnnnnttattgccttctcctggaagagtgaagcggatcccccttggacccctttgtcattggcagggggcttccaatgaagacactgaaacctcnnnnnnnnnnnnnnngggcagggtggtgggagagtggtagagggatcccggctcagcgctgaggtgtgtgcccctccccctttgctgtcccacccacttctccatccatagcttcaagagatagaagaattcaaagagagggtacggaagcggcgggaggagaagcttcttcgcgatgcccagcagaaatcctgaggcctccaagtgggagtcctcgcccc

SEQ ID NO: 4238 - DNA, 698 bp, Macaca Fascicularis
  misc_feature (1)...(698): n = A,T,C or G
gaggaagaaactcgcagnnttgcacggatattttcttctcggtactcccagaaagactgacgtagnnngaggcgctgggagaaggagacacctgcccaccctccctcagctttgtccagtttgcagaggcaccaggtctggctccttcagggctgtcacagtcctgaaactaccacttacctaggccatggctgcctcaagagacccagtcagcccagactggaggagtgccccaagccagtccagtgtccacttgccagaatttcagctcctttcttctgtggtaaggcaaaggctagaaacaaaatggaatccgcgcccaagtggctcctccatcttttggccagcggaccctagcaggcatctttcggtggagaaacgcctcccagtgtccttggcacagctgactgcttacatgcctgaagatgtgggaccatttttgccttaaaagctggggaggagggacatgtacattgtgtgcattgtgcatagtcaaggaaatcctagggccacctccagttcatttgtgtgggaacaaggatattttatagatacaaattatttttatgccatgttgaattaattaggacaggaaggggaaatcacctccttcaaactttttatccgattgtctaaaattctaaccatgcttttaacttattnnnnnnnnnnnnnnnngaaggtcattgttcttgcct

SEQ ID NO: 4239 - DNA, 735 bp, Macaca Fascicularis
  misc_feature (1)...(735): n = A,T,C or G
aattatgacttctgtcatctccagatatagtctggcttggtttaccccataatctaatttcagaaaggaaagctttattttaacactcatctgaatcaacattaaagccttttctctcaaagcgcttattaagaaactcaaatgaacatactttttnnnnnnnnnnnnnnnnnnnnnnacggcttcctgtgctgcnnnnnnnnnnnnnnnnctgccctctaaagcactttctttccttgcatggtttcatgtaagctgtgctgtttagaaacaacatctccgactttacaaataaatgacaaagaagnnnnnnncactttttaagggatactcacaagtggtttctgtgttctaaaggacaaaatacagagnnnnnnnnnnnnnnnnnnnnnnnnnnnnnnnnnnnnnnnnnnnnnnnnnnnnnnnnnnnnnnnnnnnnnnnnnnnnnnnnnnnnnnnnncaaagaagtaaagctttatgctatttttattcaatatgatagaaaatttatcttggtatgtccttttttagataactccagcagnnnnnnnnnnnnnnnnnnnnnnnnnnnnnnngtagaagaaagaaaattattatnnnnnnnnnnnnnnnnnnnnnnnnnnnnnnnnnnnnnnnnnnnnnnnnnnnntttttatcttagtgcatttatggaaaaatattaactatcctgaatattttataattttgtaggaaaaannntgcatctattttttc

SEQ ID NO: 4240 - DNA, 768 bp, Macaca Fascicularis
gccaaaaggcaagcttaagtacaaaaccaaaataaaaatgaacacaatctaaactaaagtgagcccaacaacctgatacagcaatgtgtaacctgcaggaagataggtacagactgaaggagtctttcaaaacaccccagcagtcaatctcactctgcgctgcttctacacgcgattatagtcccagagagacgacctcatagttatattttatcttgttttacaaaaggtccttgggtactctttaaaacatctattctttggcaggaaaattagctcattagagcaatgacagcattaagggaaattataggggccctggggctgaggtgggaagattcttccatctgccccatatagtttacccttccttgccttgaaaatgaatcttttggaacagagtacagctcttaaaagttactaataccattattattatagttgttacataatactttaattaagaaagatgaaaaccttttttctttcctaagtcagcccaatggtgctattttacatatcaacacagttgaaaggaagtactgttattttgggctgcagtgtttcctccacatctaaagaaagcccattttgaaattggatactgcattaaagaaggaaaaattattttaactgtgtgcagtttttgaaattaggcatttgtactattttggttttacataattctcttgcattaacaatttactgttttgtgaatcgtgtactaaagcaaattaagaaaaagaaaataactatctgtgaaagact

SEQ ID NO: 4241 - DNA, 748 bp, Macaca Fascicularis
  misc_feature (1)...(748): n = A,T,C or G
tatcataggcttctcatttttaannnnnntccaggggatgnnnncagagatttcacagtccctctggggacattacagtagaagagaaatacatggaattgtaccagtgctttttgcccatgttcatcctaagctctggctttaggcagtgctttctgacctgggcagagtgaaggcactgctggtggctgaggccagtgacatggggcccctgcccagctgccctgaaggctggataggtccctnnnnnnnnnnnnnnntttccatacctgtgtactctagattaactctagataaacagatatttacattttaaactcaggcctatacagagtagttttccttaagaggagcatgtatcacttagcaagaaactaaaaatggcaaatgagttttccatcctttaaggaaaaaaatcagttttagaattctctgcggtcggttgtgtgcaatgcagcaaaactacctttcagtaaaagttatttatttcagtgttttgtttcttttgatactgtttccctttcaataattaatgatgtgaccaaggagaattttttcgttctgtactaaaattgttttacagttaggaattataaaaagcaagggagcatctttaaatgttttttgtttaagtgatgtcttccatccaaagtaagaataattctctcagaaggtccttgtgatgtcatgtcacttgctgtatgtggcagccttacattgccacacttaggtatcaaatggtcacatc

SEQ ID NO: 4242 - DNA, 670 bp, Macaca Fascicularis
  misc_feature (1)...(670): n = A,T,C or G
caacgctctcatgataataantnnnnnnnnnnnnnnnnnnnnnnnnnnnnnnnnnnnnnnnngaaggaagaagatacacctcagtgcnnnnnnnnnnnnnnnnnnnnntaaagacatcccggccccacctccccggaacaggaaagataaatnnnggagggaacacaggtcagcgtggggaagagggtcatggtggacgcaggggtggggggcgttgacaaagttgccctggtcgtgnnnnnnnnnnnnnnnnnnnnnnnnnnnnnnnnnnnnnnnnaggagcataagcacacggatttcacatgatgctttgtaggaaaagtgcacgcagcnnnnnnnnnnnnnnnnnnnnnnnnnnnnnnnnnnnnnnnnnnnnnnnnnnnnnnnnnnnnnnnnnnnnnnnnnnnnnnnnnnnnnnnnnnnnnnnnnnnnnnnnnnnnnnnnnnnnnnctgcgggatgagctgcatgtacagcttccttggccactgcnnnnnnnnnnnnntctccccctggttcacgtagacgtgggacggcagccacctcttggaccgactgttgggctcaggcctgggctcctgccactccatgacgccgctccatgccagaaacttgtnnnnnnnnnnnnnnnctgggcctgagttgacaccannaggtcccactgcctgcttg

SEQ ID NO: 4243 - DNA, 752 bp, Macaca Fascicularis
  misc_feature (1)...(752): n = A,T,C or G
ttttctggccactccaccagctnttctgtgctgtctgcttgggaagctaaggctcttaaaactggggcatcacccagctgaccaatctctcagtccctctgagcttggaggaagcgtgttctgagcctctccctatcagtcagtagagagagatgtctagaaaaatattttttcaggaaagttctcccccacagaatttttttttccttgttaaaagtcaggaatataggccnnnnnnnnnnnnnnnnnnnnnnnnnnnnnnnnnnnnnnnaggccgaggcgggcggatcnnnngaggtcagnnnnnnnnnnnnnnnnnnnnnnnnnnnnnnnnnnnnnnnnnnnnnnnnnnnnnnnnnnnnnnnnnnnnnnnnnnnnnnnnnnnnnnnnnnnnnnnnnnnnnnnnnnnnnnnnnnnnnnnnnnnnnnnnnnnnnnnnnnnnnnnnnnnnnnnnnnnnnnnnnnnnnnnnnnnnnnnnnnnnnnnnnnnnnnnnnnnnnnnnnnnnnnnnnnnnnnnnnnnnnnnnnaaaaaaaatcaggaatatagttcatatcccacttctttgtttacaccaatgtccctggatatcagcctgtagctaatggacttggatttctggtctaagtgggcgtcctagggatggggtggaacactgagcttctaagcctcaatgtagtgtagaaaggtgctggggcctgtctggcaagccttgttgaaatgctctggcattcagtatgncttaataaactca

SEQ ID NO: 4244 - DNA, 734 bp, Macaca Fascicularis
  misc_feature (1)...(734): n = A,T,C or G
acgggactcatcnnngtgtacattagcnnnnnnagagttggtaaagaantcttcgtggccgaatttgtagccagaggtgcacccccccnnntccagccccggagtgcgccagcgttcctggggggagaggaggggtgcgtcccgccgccgcgcgctgcgggacctagtccgctgacttggatcccttagaagccgcgcgaatgtgcgcgaaagggtttgtgcaggctgcaagggaggagagcttgacacatttctgtccaagagcggtatgctctttcttccctcccggtctcaacgtcacagtcccnnnnnnnnnnnnnnnnnnnnnnnnnnnnnnnnnnnnncggccgccggcacccaccgcccgacttttgcgcaccaaaacgggtgtatacactctgttaaggtgctgtgaaggagtgagatcgggtagccgaggaggaggacattagtacatcggtgaccgtggccaccctttccgaccgtgcccactgtggctctccaccaccccaacttcctttactcgtgttggcaaaccgcggttgcaaactagaattttattggnnnnnnnnnnnnnnnnnnnnnnnnnnnnnnnnnnnnnnnnaattctgtcatgaggtctggccgccccctcctttcccttcaagccagtggcatggcactccacacccgtccatgaaagagttaagatttatggtatgctggagaggtcttgttaggatgtaatctgcatt

SEQ ID NO: 4245 - DNA, 671 bp, Macaca Fascicularis
  misc_feature (1)...(671): n = A,T,C or G
cccactcaggacnngccaagccccgcctccaagggatgattgataggtcctatcattccaactattccagtctctggtccgacccttcttcaagcatatttaggccccgcccttcagtctgaacaagctccgcctccactccaagctccgcccccctgaatccctgccactccaaccaggagctggaagggactccttagcctctgaccttcgcccccatcccccgacccccacaggagcnnnnnnnnnnnnnnnaagcacaaccttccaatctatgaagggcacagtctgaaaagcctggtgagactgccgtctgagccctgggacaggtctgggcggtggaggagcgagggttggggtgcagccctctcctggtttctgagccccatcgccactgcctccccaggaacaccgcctaaatgagatggagagaactcaggctcagctgagggatgctgtccagagcctgcagctttctccaaggacgcgggggtctcggagtcaaccccagcccctcaaagcaccctgcctcaatggagacaccacctgagctgcccatcctgcctcaccacacgtggtctgggagcagagagatagccgtcttggcgggggggggtgtctgaccttgccttagccctacttnnnnnacaatggggagtggagctgctggt

SEQ ID NO: 4246 - DNA, 757 bp, Macaca Fascicularis
  misc_feature (1)...(757): n = A,T,C or G
ctggagtggttgtcctggttcttactgtgttgtcctctatggggctggcanccatgtgaagaacggaggttcccagcatcatcttcctacaccttattacattcatccatctttctgtttttcattcttatctccagcctgggaaaagttctccttatttgtttaggtccttttgtactttcagatcccgttggagcagtagagtaccttgtagaccataatagtggaaaagggtctagttttccccttgtttctaaagatggggtggctgcaaaaactccccttttttgcccacagcttgccaactctagaagcagttattctgtctgcatattgggctttgatttgtgctgagggtcagcttttggctccttcttcctgagacagtggaaacaatgccagctctgtggcttctgccctggggactgggggtgaggctttgggtgccactgcctgtgggttgctggcttnnnnnnnnnnnnnnntcattggtgagagcccaggccattaacacctacgcagtgttattgaaagaagagaggtgggggtggaggggaattagtctgtcccagttagagggagataaagagggctggttagttcttggagcagctgcttttgaggagaaaatatatagcttttgacacaagaagatccagaaaattattgaacatattaatggttatttctttttctttttcttggatttccagaaaagcctcttagttttatgctttctcatcaaagtcatgtaccc

SEQ ID NO: 4247 - DNA, 732 bp, Macaca Fascicularis
  misc_feature (1)...(732): n = A,T,C or G
gctggcagagtgccnntnncccaggaggctgcagannnctgtnnnnnnnnnnnnnnnnnnnntctgtnnnctgcagttccattcctttagnnncttttgcaggtnnnnnnntctctggagcatgcaggggaggagatatctgaagtgggcttannnnnnnnnnnnnnnnnnnnnnnnnnnnnnnnnnnnnnnnnnnnnnnnnnnnnnnnnnnntctgggtctgcctctggggccctgaccaagcacgcctgactccagccccatgaggnnnnnnnnnnnnnnnnnnnnnnnnnnnnnnnnnnnnnnntaccactgtgcgtcaagcccccatcccatctctgcctgggccgacttcctggttgggcctcccatggtaggggcctcagttcccaggctctgggctgacnnnnnnnnnnnnnnnnnnnnnntctgagaccctagacctgtcccaccacccagaccagagtgcctggaagccccctactcccactcaacatggttcccacacactgnnnnnnnnnnnnnnnnngggatgccctttgtggacatgcagaatttctatgaatatagttttttgtaaacattttgtaacaatttgggtttcatagtaactgtgttacttgccaatcattctaggctgatgtaaataaatttccaaacaaatccgattattttcctttttaagacactgtgatatatcaaagtgcacagtttgctgtatgaagtaatatg

SEQ ID NO: 4248 - DNA, 333 bp, Macaca Fascicularis
tgttgtggaggaggaagagatcaggtggaaaaggagggagttactctcagggggtgtccagagacagtgaccaggggtctgatgtgtctctcagggagagtaaagcgcgagacagaggccctgtgtgagagtgagaggcacgatatcttcaggcccttcccttgtgagatcaagagcatatggcaaaggcatatgaaagtgtgtgcatctctattagcataaagtgaggagggggagagagtgcccacccccgtgtccaccgtgacccccgttcccacacagacacgtgttccctccccagttacccctctcgttccagagaggggggggggg

SEQ ID NO: 4249 - DNA, 724 bp, Macaca Fascicularis
  misc_feature (1)...(724): n = A,T,C or G
gacaagtgatgaaaactnnngaggcattacctggactagaatgggtagtgaagacccatgtcannnnnnngaggactcggaaannnnnnnnnnnnnnnnnnnnnnnnnggctggcctgagggcatttgctgaacacagagaaacccaggagaggagatcagcagttttctttcactctacttgatctgtcagatnnnnnnnnnnnnnnnnnnnnnnnnnnccttaagagtctttaggcccagaatggagnnnnnnnnnnnnnnnnnnnnnnnnnnnnnnnnnnnnnnnnnnnnnnnnactttaaagagttgaaggggannnnnnnnnnnnnnnnnnnnnnnnnnnnnnnnnnnnnnnnnnnnnnnnnnncgactgtgccattcccagtctatgtggttccctttannnnnnnnnnnnnnnnnnnnnaacaccctacgaccgttttgtttccccactaccacnnnnnnnnnnnnnnnnnnnnnntgtgagtccttgaacccttccagagggctcccaaaggagggtgatcactgcccctccattgaagactgaggaaagccaagtgagaagattcagtttatttgggcaagttatttaacnnnnnnnnnnnnnnnnnnnnnnnnnnnnnattacttaccttgtccaaaaaggtcataaagggtagtagggctttttctgttccacctctgtactatatttctccccagcaagtatctgcccctga

SEQ ID NO: 4250 - DNA, 419 bp, Macaca Fascicularis
  misc_feature (1)...(419): n = A,T,C or G
ttttttttttttantnnnntttnnnacccaacccctttctctggtacagtgctgtctgcctggctgcctcccttaaccctgacttctaagccatcaatttcatgttatttattattgccctatgtgaggtggggagggaacctctcgggtctgcacatctccnnnnnnnnnnnnnnnnnnnnnnnnnnnnnnnnnnnnnnnnnnnnnnnngggactccccacctgcccaacccagactttggagcgggtgggagttgtgagacaaatcaaaatatggatgacaaagaggatatagccgtgtataccccagggagaggaggcattgagttctgatgggagaggtataggttgggttctctgcctaccattgctgtctctgacttccggagctcaaccccctccttctcccagtgggacaa

SEQ ID NO: 4251 - DNA, 723 bp, Macaca Fascicularis
  misc_feature (1)...(723): n = A,T,C or G
tattaatccttgtgtgnnngntcnnnntgctgttagtaggcaggtannncnaacagttccaaagagacannnnnnnnnnnnnnnnnnnnnnnnnnnnnnnnnnnggttttgttgaaaagaaaagggggaaatgtggggaaaagaaagagagatcagcctgttactgtgtctatatagaaagaagtagacataagagactccatttggttctgtatttgagatgctgttaatctgtgaccctctccccaaccttgtccttgcaagagacatgtgctgtggtgacttaaggtttaatggattttgggctgtgcaggatgtgtctttgttaaacaagtgcctgaaggcagcttgctggttaaaaatcctgcccatccctgggcaatggaacatctcggtgtgnnnnnnnnnnnnnnnnnnngtttactgagataggagaaaaccaccttatggcataaggtgggacgtgctggtgggacttgctggagcannnnnnnnnnnnnnnnnnnnnnnnnnnnnnnnnnnnnnnnnnnnnnnnnncattttcctttgaacttactcannnnnnnnnnnnnnnnntccatgtcttactgctaattttctcccttcgatgatcctattgtcctgccactctcttatctttaagatggtaaagataattatcaataaatactaagggaactctagagaccggtgccagcgtgggtcctctgtaagctgagcgcc

SEQ ID NO: 4252 - DNA, 777 bp, Macaca Fascicularis
  misc_feature (1)...(777): n = A,T,C or G
gacgagctcatnnngcggaaaaggggactactaagccgatataatcccgagggtttgctcaacctagtctggctcaacaacacaaaagcttttgggcattnnnnnnnnnnnnntggatctaccttaaaatggggtgatatccggctccgggtaacagagacgggtctggagtacttggagtggatgggtcaggacacaggagacctgaatgccaaaaccaagagaggggggacagactcccgtgtgtatgccacccagcacgccccacagacctgccctgtnnnnnnnnnnnnnnnnnnnnnnnnnnnncggcctcccgccatgcgctacgaggatgcccctttctacttatccatcaagccagtcgttaacttggccgctctgcattggtacaactgccaggcccttggcaagaacaagctggccaagatggtgaagaccatgtgtgagaagggcaacatccctggcaggaaaaccaacttcagtgtgtatcagagctgcagcaccttgtctgaagcccagagcaaccagctggtgctgatctgtaacaatctgagccagcaggctgcccagtcagtggccggccactcnnnnnnnnnnnnnnnnnnnntctccgcctcctatgactcttcctcagacaccgcttgaccaggtggcttgagcaagactcacagtttggttaccatgtccagagaaactgtgattatacaccgcttctcattccccttcctgtgccctcagtgttaattcactttataaaaatataaatatataata

SEQ ID NO: 4253 - DNA, 716 bp, Macaca Fascicularis
  misc_feature (1)...(716): n = A,T,C or G
cagtgatcagagacatcaggcccagcgtggatgctgttnnnngctaagtggggaannnnnnnnnnnnnnnnnnnnnnnnnnnagacagcttcatttaatgctttatgctgccgagtctgggggcttgttttggtttggggtcagccatcctccaccagaaagggggagctccttctgctgtggctccagatagagggggatgccgggctccaggccgaccagcactcgggctctgatgagacccggcaagtacccaggggtgccaagtccaaggccnnnnnnnnnnngtcagcccttggaagatgccaatattnnnnnnnnnnnnnnnncaggcacagactcccccacccaggacggctgtgatgaggtggccctccctgttaaccctggtccctgcagtccctgcgcctggagccctggtgggactgatgtcacgggtgtttgctgtgctgctgcactggtcctatgccagcctcccccgtgtggggaccacgaaaggcgcactccctcacccctggggccgggccgtgcagccccccagatggacagcagctgtggtgacctgcgtttctccctgggcctgtgcttcctgtagttagtccgtcccctggttcccctgtggctcagaggccgcgtccctggcttgtacatatgtgattgctgtgggcacaccccagaccccatatcatagctgccgtcccgacgtcacgacgctc

SEQ ID NO: 4254 - DNA, 1194 bp, Macaca Fascicularis
aaatccaagctgtagaattcacttgtgatttttttgcctggaaactctctgtgtttccagtggcctcgccaggggagcccccaggctccagctcccccctattgcctgggcttccatctgggtcctgtccccaggactgtggtttgccatgcttgcgcctgtgaatagctactgacctctgaggcaagttatgctatgaaagcgcttggaacagtgcctggcatagagtaagcactcagtaaatgtcaccttctgttactgttttaaaaacatgagtagtgagcttgtttgagacagagacagcatcgtcagtggtggggcctggctgtgtacttcttcagaagctctgcaagtgactctaaggtgcattcctggtcacaaacctgtgcatggaggggatgggtgcagcagacaatgagacagccaagaacaggttttttgtgccttgcccttccttctataaaacggctggaagttgggaccgaaacatagacataggccgatcatgaaactggaagggacttgagaaccatcaagtttaacccccttgtaaagatggggaaattgagccccaggtggggaggggagtgacttgcccaagatcactgtcaggtcagtgggaaggtaggactagagttagaccatctgcctccccatccagtgctctttcttcctgcacagattgggtatgtaccagccttctaagtctaaacaccttcctgaccctgtggggaccagaaatacgcaggtggttccagattgagaaggctatacagtgaaaagtctccctcccgctccacccagccacctccctagaagtcagatgcttgtgtgaacttcagaggcgttttatgctgcacacaaatgcgtatgtgtcctcttctgccttttttatatcacacttatctgtatgttttcacccactaaattttggagattatcccatgtcagtatatgaagcatgtctttttgaccagtctagacaatatagtgagattctatctctacaaaaaaaaatttttaattagccaggtgtggtggcatgctcctgtagttttagctacttgggaggctgaggccggaggatcacttgagccaggagttccaggccacagtgaactatgatcacacttcagcctgggtgacagagcaagaccctgtcaaaaaaaaaaaaaaaaaaaaaaaaaggccaca

SEQ ID NO: 4255 - DNA, 547 bp, Macaca Fascicularis
  misc_feature (1)...(547): n = A,T,C or G
gaattggtttcttcagttggataaatgattgannnnnactaattatttatttnnnntcttgtnntnnnngttggnnnnnnnnnnnnnnnnnnntcttgataccatatttgtaccgaacacagggtaattgttcaaatcctatttcctgaaatgtttttggaggctgaaggggtagagaactttagaataagaagatatagtacannnnnnnnnnnnnnnnnnnnnnnagaaggttgctctaaggaatattggagaccttgtatatgtagtacagataaaggaagatccctcccccccaaggcaggatgaacaatttgaaaactgaatagatgaacaaaaatgtataaatctatttcagagagacacatagtagaaaaaatttaggagctaggagagtcttgagaccatagatgaatcttaagcaattctgaagtttgatggacgtggtattctgctgaaaaagttaattccttttggctgggcgcggtggctcacgcctgtnnnnnnnnnnnnnnnnnnnnnnnngacggaaggatcacgaggtcaa

SEQ ID NO: 4256 - DNA, 756 bp, Macaca Fascicularis
  misc_feature (1)...(756): n = A,T,C or G
aggcaggatgtgaaagtatctgtnnnnnggagcagctgtcacagannncagagaannnaggggaaggctgcctggtctctaactaatggggccacaaaccccaccgctgtgttctggaggcctccggccaagcatgaagagttcattagaccaatttccactgccttggtaacaaaggcccgtgcgtgtgcnnnnnnnnnnnnnnnnnaagtgagggttattcatggggaacgcaccacagacaggtaccgtgcatcccgccaggcagcccaggnnnnnnnnnnnnnnnntgccctcctgaagacagaacgggcccctctggaaccgcgtgtggccgcgccgcctcccacggcaccggaggccgagcgtgtgctgagtttgtggagtttcagaggcgtggatcggcagctgcaggagccgtctcatcctgagccgtgccctcacccgcannnnnnnnnnnnnnngacacccgatgctgaaaggatctgtctgtcttacacgtccaccgtcagatccaggcgagagaactcctgggatccaccgaagaaaaccacaggacgccaccggcaagagggaatggaactgccacgcctggccgctgacgccgccgttcttggggatgcacgggctctgagaggcctctcgtgatgtaagtgaccatcggtcacgccggcccaaccgccgacgtcctctgcacgggaagttgcgtcttctttagatttttctttttcccgctcagaatctggcccttattat

SEQ ID NO: 4257 - DNA, 770 bp, Macaca Fascicularis
  misc_feature (1)...(770): n = A,T,C or G
cagaagccaagtggatcatctgtgtccccttnnnncacaatccctccattttctactaaaagacccgtgatcccnnnnnnnnnnnnnnnnnnnnnnnnnnnnnnnnnnnngactattctcccatgtcctgccttgctaattcttcccactaactctaacctcacctctttacttgtcacgtggactacttcagcaacagtctcatctcccagattacctctgtgcacgctgacacattgtccagtccaccctgaacatgcacagtgatttttctctcccgttgcacacaaatctttaaaagtttccccggcccatgaacaaatgtacaattctctattctgacattacagaccaccggataaggccccactcttcctttccaccctcccctggtcagcctaggagagttgtttttcctggannnnnnnnctgcgttttactgtctctgtgcctttggtcttgctgttcccatcccctggaatgctcccttttcttcccttcaaagcccatgcggaaaccacgtccttcatgaagccctccctgatctaccaaccactgggctctctccctctgctgaaccaccgtagcactttatttgtacctttctcatggcacttaccatattctgccttgtattatagttatttgtgcacttgtcctatgactgttcttagactgtaagctcgccaagggcagggactgtgttttattcatctgtatccatcacagcactaggcgtggtgcatagcacacagcagtgntcaataaat

SEQ ID NO: 4258 - DNA, 2347 bp, Macaca Fascicularis
aacaaatggtgctgggatcttgcaggtacctgaacatatgcaagctcctggagggcagcatgcccagggagggcaggtaagatggagtaagcaagttccacctgcctctcctgtggaatgcagctataaaatctggacgcaacttgtggagcagatacttgaggtttctgagcagtaaacagcagcaggtggattaggaaagaccaatggtatgtcttgatcagcagtgtgaaatggactaacacaaccagaattcaaagtaccactgaatggctgtgagttacccactggttggcccggatgtctcttggtctggacaagctatgacaagacatagacaagctgattctaagatgtgtatgaaaagcaaagacactataatagtctaaacaattttgaaagagaaaaataaagttaaatcatactccccacttttaagcgttcctgtaagcagtgtagttggggtaaaggggtatatacacaggtcttttgaacaataggatccagcagtaggccacacacatacggttaactgatttctgacatggtgcaaaagcaagtcaacagagaggagaatagtcttttcaacaaacggcactggaacaatcggacattgatataccaaaaaaaggcaatttcaaaccacatgctttatacaaaaattgatataaatgggtcataggtctaaatgtaaaaaagtaacactataaaatttttaggtgaaaacatctaaaattcttgtgacctgggaatagagttcttagatataataccaaagcacaatccatagaaccaaacccatgttaaagctataaaactcccagaagaaaacataggaaaaaatcttcatgatcttggatttggcaatggtttctgcaatgtgacaccaaaagcacaagcaacaaaagaaaaattaaattgaacttcatcaaaattaaaacttgtgcacatcaaaggacactctcaagagagtgaaaagagaatccatggaagaaaaatacttgcaaattatatatctgataagagtttaatatccagaatatataaggaactcctacaactcagcaacaacaaacaacccagttgaagaacagacaactttaatagaaaatttcccaaagaaaacatacgaatggccaagaagcacacaaaaagatgcccaccatcactaatcattagggaaacacagaacaaaatcccactgagatacctctttacacccatcaggatggctactatcaaagaaacataaaataaccaatgttggcacagttatgggaaaattggaacctgtgcactgttggtgggattgtaaaatggtatagctactgtggaaaacagaatggtggttccttagaaaactaaaaacagaattcccatatgtcatagctcattgtgtgttgctgtagcagaatacctgagactgggtgttgtgggaagtcggggaccccaaacggagggaccagctggagctgttgcagaggaacataaattgtgaagatttcatggacatttattacttctcaaataatactcataatttttttactcctgtctttaatctcttgatcctattatcttcataagctgggaatgtatgtcacttcagaaccctgtgataattgtgttaactgtacaaattgattgtaaaacgtgtttgaacaatgtgaaatcagtgcaccttgaaaaaacagaataacagcgcttttagggaacaagagaagaaaaccataaggtctgcctgcgggattgggcaaaaagagccatattttttccttgcagagagcctataaacagatgtgcaagtagaagaggtatcgctaaattattttcctagcaggtaatattaatattaataccctgggaaaggaatgcattcccagggggaggtctataaacggccgctctgggagtgtctgtctgaagtggttgtgataaggattgagatacgccctggtctcctgcagtagtaccttcaggcttactagggtggggaaaaacaccaccctggtaaatttgaggtcagactggttctctgctctcaaaccctgttttctgttaagatgtttatcaagacaatacgtgcacagctgaacatagacccttatcagtagttctgttttgccttgtcctgtttcctcagaagcatgtgatctttgttctgctttttgccctttgaagcatatgatctttgtgacctactccctgttcttgcaccccctccctttttgaaatctgtaataaaacttgctggttttgcggctcaggtgggcatcgcagccctaccgatacgtgatgtcacaaccagcaacccggctgcaaaattaaaaaaaaaaaaaaaaaaaaa

SEQ ID NO: 4259 - DNA, 689 bp, Macaca Fascicularis
  misc_feature (1)...(689): n = A,T,C or G
gacaagtgtgtggannnnnnnnnnnnnnnnnnnnnnnnnnnnnnngattannnnnnnnnnnnnnnnnnnnnnnnnaagatggcatcagaaatcgaagatcatatctaccaagagctcaagagcacagacatgaagtaccggaaccgcgtgcgcagccgcattagcaatctcaaggaccccaagaaccccggcctgcggcggaatgtgctcagtggggccatctctgcannnnnnnnngccaagatgacagcagaggaaatggccagtgatgaactgagggagttgaggaatgccatgacccaggaggccatccnnnnnnnnnnnnnnnncaagaccggcggcaccaccactgacctcttccagtgcagcaaatgcaagaagaagaactgcacctataaccaggtgcagannnnnnnnnnnnnnnnnnnnnnnnntacctttgtcttatgcaatgaatgtggcaatnnnnnnnnnnctccttggaggatgctgagaaacctttcaaattttgttgcctttctggttttgtagttctgctgatggaacagccaggaccgccatgaacaagaaactgcagaggaccaggcacagtggctcatggctgtaatatgcaaactcctggagactgaggtgggagaatcgcttgaccccagaagtttgagtccagcccgggcaacatagcaagaccc

SEQ ID NO: 4260 - DNA, 718 bp, Macaca Fascicularis
gtggagacctacctccataattagataaactctttttggattaaaatcagaattttgccttttttcttctcaaattattacatatgtatgtattatatatccatatatatatagtttttcctgattaaatggatattaaaataattgtgggtgcttcaggactttttgcttctatatttaagtatattgtttttatagcaagaacatattctgaatgtgttttataaatctttaataatttatatataggtaatatttttgtatcacagtgcattatttttttcctcctttccttccaaagtataccactgtatttaccacttctaagagtgactgacgacaggccagatgacccttgaagtagtcattatgtagcaataaatgaagcctgaaacaggtttttttacttccactttaatccttagaaatttcttggcaactcagcatattttcactgacaccaatgtataagtataaatttaaatgaactaattacttttgcatattttaaattctttatatggtagttattttttataacaggatattaacataagttaaatcctatgtatttgaaattgttacagagctttcctcttcaaacatcaaaaaagtggggggcatactgtagtcctgtcatctatgtaaaaaatttaatcattattttgatgctttaaatattcttatgtgtaatatgtttttgtatcaaaaacactga

SEQ ID NO: 4261 - DNA, 744 bp, Macaca Fascicularis
  misc_feature (1)...(744): n = A,T,C or G
gaagcannnnnnnnnnnnnnnnnnnnnnnnnnnnnnnnnnnnnnnnnnncagtgcttaatagaagcacttaatagagcgannnnnnnnntcaaaaaaaataaataaataaaaatgaaagtgtaaagtgcttaatagaaggtattggccctcctcctgagcagattctttccccnnnnnnnnnnnnnnnnnnnnnnnnnnnnnnnnnnnnnnnnnnnnnnnnnnnnnnnnnnnnnnnnnnnnnnnnnnnnnnnnnnnnnnnnnnnnnnnnnnnnnnnnnnnnnnnnnnnnnnnnnnnnnnnnnnnnnnnnnnnnnnnnnntatgaagtgtttactaagnnnnnnnnnnnnnnnnnnnntttacgtgtattaattaatctttgtcacacctgnnnnnnnnnnnnnnnnnnnnnnnnnnnnnnnnnnnnnnnnnnnnnnnatccaaaatcctccaaaatttaaaacttgagcactgacgggatggtcaaaggaagtgctttttggagcattttgaattttagatttnnnnnnnnnnnnnnnnnnnnnnnnnnnnnnnnnnnnnatatcccaaaacctgggaaaaaatccgaaatccaaaatacctccagtcccaagcatttgggatgaagggtactcaacctgtttcccgttttgcagataagacaaccaaggaacaaaaagatcccgaagtgggaggcggacgcggaggttgcggtgagccaagatcgtgccgttgcactccagcc

SEQ ID NO: 4262 - DNA, 784 bp, Macaca Fascicularis
  misc_feature (1)...(784): n = A,T,C or G
aagcactaacttagctgtttcatttaatgacctgtggtttaaccctttttatcactaccaccannntcagcaccagactgagcagctatgtccttttattaatcacagtcgttcattcattcattcattcattcattcattcacaaaatatttatgatgtacctactctgtaccaggtcccatgccaagcactggagacacagttatggtaaagtagacaaaacatttgttctttcggagcttagagtccagaggaatacattaaataatgacacaacaaaatataaattgcaagatgtcacaggtgcaataaagggagagtaggagagaccatgagtgtgtgtaacaggaggacacagcattattctagtgctgtactgttccatacggcagctactacccacgtataactttttaagatttaaatttaaattaattaacattcaaaatgcagctccccaatcacaccggcaacatttcaagtgcttgagnnnnnnnnnnnnnnnnnngttaccctattgagcaggtcagatgtagaatattttcatcatcacagaaagttctattggacagtgctcttctagatcatcattaagactacagagcacttttcaaagctcgtgcatgttcgtattttgtgtcatatgtgtcatattttgagctggtgttttgagactccccttagagaaacagacccaaaaaatgtgctcaattgcagtgggccacatacctggatctccagatgtcatttcccgtctcttaagttatgttaacatactcaaat

SEQ ID NO: 4263 - DNA, 777 bp, Macaca Fascicularis
  misc_feature (1)...(777): n = A,T,C or G
gtgatagtacatatnncnaccnnggataatgataatgagataatacacatatattattagttatttattgatgaaaataaatattcataaagnnnnnnnnnnnnnnnnnnnnnnnnnnnnnnnnnnnnnnnnnnnnnnnnnnnnnnnnnnnnnnnnnnnnagttgggccacttgggtgtcaagaatagggtaacttgatcagctatctttggatctacagacctgtatgtatgtcatcttctttggaacatttggctaatagtctttgttgaaagcagagccacgatagagtattccaataataaaagcatacttcaagttcctgcttgggtctcacctgttaacattttatgagtcagagaaaatcacatgtccaagccccaaagcaagagttgagaaagttatctacttcttgtacagctgcaaagttacaagtcaacagtgatgggtacagggagaaatgaaaaactggnnnnnnnnnnnnnnnaaacatttacatctttaannnnnnnnnnnnnnnnnnnnnnnnnnnnnnnnnnnnnnagaaaacagataacccatggctgtaactggttttagagaagttttcaaataattgaaataatttgacnnnnnnnnnnnnnnnnnnnnnnnngattaggtataagaacttactttttctccttgtgtcttggcaatcatgattcagacttgcaagcacagaatatgaagacaaccatatgttgtaggtccaatccaacctattaaaagttgcttgtttcccctcaaggtttattt

SEQ ID NO: 4264 - DNA, 753 bp, Macaca Fascicularis
  misc_feature (1)...(753): n = A,T,C or G
caatgaattttatcnnctgcagcnnnantccgagcccttagcacccantncgaccatagtataatcatatcaaagggtgagaatcatttagcatgttgttgaaaggctttnnncagttgttctttttagaaaaaaaaacaaaaacaaaaacaaaaaaaaatcacaccattgctcacagaattggcatctcatttttgggacctcccatctttctgttttgaaaagtgtacagtagtgcagtgttcctgatgtaactttatggcttacaatgttgacatgtctcaggttcttgtgtttcgattggtgttttccgtctcaggtagattgcaaagtgtaggccccacacattggaaaaaaataataataaaacaaagcaaaaacaggaaattatggattttagttgtatattggtttatgtattttttgcttaagtatacagtgcaatgtttgaaatgtattgttgagtattactttgtacgaggttgatcactttttttagagtgaagaaagaacaaacttgttttttgtgttttttaaaggaatataaaataatgaaggatgtataattgatgccaaataagcttgttctttagtcacaccgacgtcttatttttccctttaggccagttctgtttttaaggtgtacatggacaatgttacagtgtaagaaactccatatccatatgttcccattcgccctttgtagtggttcaggtataccttttnnanaaaaaaaaaaaagaaaaaaaagaa

SEQ ID NO: 4265 - DNA, 751 bp, Macaca Fascicularis
  misc_feature (1)...(751): n = A,T,C or G
tcaaatgatgcagatccagaactgggctgnnnnnnnnnnnnnnnnnnnnnnnnnctggggcattcagaagggactggacctctttcccctcatcaaaggaaacagcagtctttgcctctttctcttggttgtgcccaagggctacacagtagctctgaaataataagagctctgcaataacagtaataaatagctctgaaataacagtcctaagaactcctaaagccctnnnnnnnnnnnnnnnnnnnnnnnnnnnnnnnnnnnnnnnnnnnnnnnnnnnnnnnnnnnnnnnnnnnnnnnnnnnnnnnnnnnnagtgtgtgtgccagcagggaggacttatgggctgggctgcctcttcccatgggtcttcattcccaatggaaagctcactctgcttagtttggaattatttttctttcagttgttctggaacctttgctttttattgatttatacaatacaattggcgggagggtggacttgggatgggagtgggaaaagcatataagagcttcttttgtgatggtccatctacccaaaagagatctgctttagtgaacaatactctttcatttcatgtttctaaactagatcaagttgttattgattttannnnnnnnnnnnnnnaatttgaaaaacttttttttaaagctgattgggaactacaaacaatgaatggannnnnnnnnnncagctaattggaaaacagatgtcttttgtcctattgatgctggtgttaaaaaaacacca

SEQ ID NO: 4266 - DNA, 2513 bp, Macaca Fascicularis
ttcatagggtcttaggtcagaaaaggttagattacaaaaatgtgaattataacctcatgattcccggtcactagcagcgtgacctcgaaaacctgacttatcttccaggagccttggttccctcacctgtaaaataatgatttaaaaaaactggcgtgacagaatttctctggctattacatgaaatgcttcatgtaaagcacctaactcaatatctggataggagacactcaatgcattttgacaggtacttttggcatcatatttaattcagagctggctcagatctaggacatgaatgattctacctttatgcagaaactggcaaaagtgattcatgcaactttctcagggagcttttctgtttttgcggtaagtgctcatcaaatgaaggataaatcacaagggtctaaaggggagacttcctatcacctattataccttactgcatttgatgtgggaaagtatatggcctggtaacatttttgacatttttgaaatgtttatcatttattttaaagggtttttatatacaactatgttattatatttgcattagtttgcctgtttctcttctctgtactcttcatttacttatgtttatttattgttttgtactcatgataactggatctttgcctcaaattgctttacttgtgttacacttcaaagttcatcaccattgggcaagtttctgaaaagttttcctctaggatggtaataacttcttgttgaaagatgggtgattctatcttacctatatatttgtctagatgttgtaaatattattaaataacttcttctctgtgttgttggtagcaggaaaatctatggtaataattttaaatttgtgttgttaacactatttgttcctgttaaaatgcagttttcccccctatcaaccagatagctagattctcatcttggagattttgcaagacaaacaatagaagctgtttgatgctagaaactcttggcttcttccgtagaagcttggatttgttgcagaggtgatatgaattgttctaaaaagggaaagtagaaataaatgaaagggacttatttttctttcctgattggcagaatccggaggttttcagtattccaggagtatcaggaacctttgcagattatggcaacatctagaaaagttggaagtcattagaagatgtagccccttgggagcacctaggcaagctggatctaggcacaggatttatcctgagtatgacacagaagactggacataggtacaggaatcctgtatcccaagtcttatgtgaaagcctggatcttggcataggaatcctatatcccaagcattacacagaaacatcagaatttctggctgtggataggctaatcctgggtgagacagtaggtaaaccagtgattttgaccaatagtcttaccaagtaaggaaggcacccaattccttagcattatgtaagagcctgggatctttgtatgatctttgtatgttcttgtggttgattttctgtcatatggtgtgatgcgagaacacagtcaaatttagattggttttaagaaaaagaaattgacttattttttgcaatttgagtttgtggattgggattcattttactacagcttcatgtatgtacaagcataatatttagctaaacaactcttatgcatcctgacatttaataactagcccaacctcttgacagctgatagctcatggtattgttttatagtgttgtttacattttttagtttgtctctttttttccagctatggtatgagcttctggaatgcagaaatcttgctggcattccctgcaatatctacagtattaatttaaatatctgtgcctggattcccaccattatgtttgttctggagggtattagaaaataacaatatttgtttttaatacaattcttattttcttagattctcaaaggatgatgttaataattaatagactcttagtagtccagttaatagtattcatcttaagggaaaaattaagtaataaagggtgataataatctaaaataaagtagcctctttttctagaactagatgaattaatttttattttcttgaaaatagttattgtgaatgtgccaatttgtttggtatatgggatacctagagatatttttcttgagccaaacatgtatgaatttatccagcacatgcttgcttataagtatttcagcttaactttattcactgaaaaattggtatagctcatcaaacagtaagaatgtttgtagatgttaaaatttcaaggcaacctccgctattaactgcatttgacctcatttgcaaccatgacaagggattctcacgaggtcttgcctgtactggttgagacacactttgcagctttcttggaacactctttcatgggcctagtttaaattctgtcaagcatcatgctaactatacctttatcctgtcatcccacacattccttttcttgctcaaatcacacatactacattcatttaatcttacagaaaaaaaaaaaaaaaaa

SEQ ID NO: 4267 - DNA, 2120 bp, Macaca Fascicularis
atcacaagctaaggatcctgacttgaagacccttttcacaaaaatgggatgtaaaaatattgaaatacttcgtgagacatttattaacattgaatcaaaggatcacaggttacagaaagttaaagtgattttgctgttacctcgttgttcaggactgggtgttagtaatccagtagaatttattttaaatgaacatgaagatacagaattccttaaagatcactctcaaggaggcatatcagtggacaaacttcacattcttgctcaacagcagtacgaacagctaacacatgcaatgaaatttactaaagctcaagcagttgtttactgcacatgttcagtttgtccagaagaaaatgaagctgttgttaagaaagcactggaatttcaagaccttgggaataaagtacaactttatagcgggacccttctgagacagtgtctgtgaaagatgttttggcccgagctgcagccaagggtctgctggatgggattgagttgggtaaatcatcaaaacgggagaagaagaagaaaaaatcaaaaacatcattgacaaaagctgccactactgataatggcatccaaatgaagattgctgagttcctgaatcgagaaactaaagccagtgctaatctatcagagactgtaacaaaaccatctcttccccagaaaaatactgctcaagtgggggcttcctcgcagaccagaaaacacaagctggcccctcatcctgcagtgcctacatttatgaagaacacttgtccctccagaccgcgtgaacggcagacacacttcataagacctcggccagaagacagaatggttgctctgaaacccatcgagattgttctgcctccagtctttatgccattttcaagtccccaagggatcagatctcggatgccaactcaacatttgtactgtcattgggttgcccccaagccacttgtgcccacctgccttcccacaccttcactatccagaaaaggggaaaagcctaaagatgacacacgttcctccctactcaggcctcctcggcgatggctttgattgtcttttttttttataggggccaaagagcggttgattttttttttcaaagtctagtatttctctgaaggttccacatctcgacacaaggtattcattcttttggtcacttagggatcttctaagtgtgatattagtttcagagaattcagacaagtgagaaacaataatgtaggagtcagcaaagcagaattcagagacttcaaccgatcagtgctgctctgagaggatccagttagagactcagtgttagctgtcagaactgatctcactcctgtgaactttcaggctggacttaaagctgcccagtttctcctgcggggaaggaaacactgcctcctttcagcaggcagctcattagaaagccgaacgggcaagcgatcccggcctctcccgcccgctgactgctcttcagcatccacgcagttggagtcgtgactttctcaaccacgatcaagggtgatttttttcttaaatatcaagctgttctttgaacagggagtgacatgagtttttgtaacgtgactgaagttgagtttaagtaggaagcgcaggaagttcccaagtgccaggtgtgcgtagctcagagacgcttttacgtgaggtgtctctcactgggggagcttccaggatcgtgaatagactggacacaatcatctctcccttcctatatgtcaagcactcttataaaaaaagactgtgagcaaatttccacctaaatattaataattctgaagaggcaaaactgttgaatgcaagtgatacctactgttgaagtaacccatacacttctgattctcttcaaagatcaggtgatacaacaaaatctacaagtcatttcaaacaacacgcaggaatcaaactttggtaaatcatttctgatgcacaattaaatatattgtaggcactcttaattatatgaaatgtcgattcatcttgaatgtattatcaattgcctaccaagaattggtatggttatcatttctgggtctattgatttttcatcatggcaacagaaattgtcattaaatagcataagatacaaaaaaaaaaaaaaaaaaaaaaaaaaa

SEQ ID NO: 4268 - DNA, 722 bp, Macaca Fascicularis
  misc_feature (1)...(722): n = A,T,C or G
cgacactgattacaggcccgcanntcccctgtctgccctcatgccggccgagagctaccaggagtnnnnnnnnnnnnnnnnnnnnnnnnnnnnnnnnnnnnnnnnnnnnnnnnnnnnnnnnnnnngcgtcatcctcatcgtgagtcacggctccgcgctggactcctgcacgcggccactgctcgggctgccgccccgggaatgtggggattttgcccagctcgtgagaaagatcccttccctgggcatgtgcttctgtgaagaaaataaagaggaaggaaaatgggannnnnnnnnnnnnnnnnnnnnnnccctcacccacggggcgaacgnnnnnnnnnnnnnnngnnnnnnnnnnnnnnnnnnnnnnnnnnnnnnnnnnnnnnnnnnnnnnnnnnnnnnnnnnnnnnnnnnnnnnnnnnnnnnnnnnnngagatgctgctcnnnnnnnnnnnnnnnnngtctcacctaatgtgatttgtaaaagcacaagacgcacttttatattccggaatatttccctccggctttcgcctttgtannnnnnnnnnnnnnacccatcctccaccagctcagctgtgggaagcacaggnnnnnnnnnnnnnnnnnnnnnnnnnnnnnnnnnnnnnnnnnnnnnnnnnnnnnnnnnnnnnnnnnnnnnnncgggactctaaattccaggaattaaagactcaccacacacgaaggatctaaccacttca

SEQ ID NO: 4269 - DNA, 1849 bp, Macaca Fascicularis
  misc_feature (1)...(1849): n = A,T,C or G
ttagtaaagactttatttgatttttgttgttgttgctgttgtttttccaagtaggtaaactcttttctcttcctggtggttaagatgtggcaatcctctgtcagaatttttttggtcgaataaatctgatatggcactcacgtttaattaaattgaattcatctatgaatagaggtactaactaccattgatattgcctctacctttttgatcttagttttggaagttggaagtcattgggctgcagtttcagatatttggtttatctttggaatcatttccagtaaagcctcaaaatcaaagatgcttggaatacaccatgatttctctcaattttcagcccccttttccactgctggtttcttgataaaattcagtaggcaagaattgagggcccaaacatttgttttagcgtatgattctctttctgatctacatacatactgctgtctagaaaaactgtcatttgatcctattttagcaagaaaactatcatataactcatgtctgaggaagcgttgtctttacttccaaagcctcttgtctctggtacagcatgccttagttccgtatgtggttgtgatgttgacttctagcatctgcctcctcccttcaacatttttctgccttttgtttctaaatctcatagcttcctaaatcctagtacaaaaccccatcctgaagcctttttatcttcaggcagagatgaagcggaggtcatgatggctgtagatatatctctcccaacaagatcccctgagaaacacaagcgtcacagagactttccccttcaatttagaaaacataatggcaaaaattaaatatatgtggtaataatataaaattcattaaaattagaggccaaatactataataaatgttagttaaaaacttttctatgcaaaagaagtgaagcgttgctccaaataaatatttattaccttactaatcaactgattcattaaatttttaaataagagtccatataccatatcaagcgttaaatttgatactgcgaagaatacagagattatttaagacactatccctgtctgtaatgaatttaaccatccaatgggagagagaaaacatgcacattaacaggtatagtacaaggtataatatactgaaggctagaaaacattgtagaaaaatgctctaatggtttgattattttgtttaatggtgcgacaattaaacaaaatacaggattggagaaatagtgctatagaagatcagcacagttaagattttttgtttttgtttttgttgttttcttttgtttgtttgtttttcttagaaggtggggaagcatgaagacattttagacagcaagaatgatgtgagccaaaaaataaaggagagccattgaaaggcaggttcaaggaatgaaaagcagcacatttgaccagatgccagggaatgtagaagagagtagctggaactaatcctagacagggatcaaactgcgtatgtgtgtgcatgcatgtgtgtcttggccatgaggaatgctgcaagtgaacttaattcaactactaaagacaatagtagactgggcannnnnnnnnnnnnnnnnnnnnnnnnnnnnnnnnnnngccaaggtgagcagatcacgagatcaggagattgnnnnnnnnnnnnnnnnnnnnnnnnnnnnnnnnnnnnnnnnnnnnnnnnnnnnnnnnnnnnnnnnnnnnnnnnnnnnnnnnnnnnnnnnnnnnnnnnnnnnnnnnnnnnnnnnnnnnnnnnnnnnnnnnnnnnnnnnnnnnnnnnnnnnnnnnnnnnnnnnnnnnnnnnnnnnnnnnnnnnnnnnnnnnnnnnngtctaagaaaaaaaaaaaaaaaaaaaa

SEQ ID NO: 4270 - DNA, 723 bp, Macaca Fascicularis
  misc_feature (1)...(723): n = A,T,C or G
gtgcatgtgggtctgattgaggtgttgggnnnnnnnnnnnnnnnctcataaatggctttgtgccttccccagtggtattgagtgagttcctgctgtgtttgttcctgcaagagctggttattaaaaggaacctggcaccaccacctcctctctttctcgctccctctctgtgtgacatgcttactccccctgtgccttctgccatgagtaaaagctccctgagacctcaccagaagctgagcagatgctggtgccatgtttttatagcctgcagaactgcaagtcaaataaaccttttctttataaggtaaccagtcccaggtattccttcattgcaacgcaaaacagactaatacagtttcttttaagtaagaattacaaaatttaggccaatgaccaagctgagtataaatcactaatcatacacaaaatgtgtttcactggcttgagtcatttttctatttgacactgaatttacacttagattcttgtactgtcactgagtacctttgtgaacagctaggtatattttgtgaatagtaactagccaaaaatatagccaaagtctcatgccaaactggtctacatcaatatggactccataaatgcatctttcaaccacttgattgcattaagtagtcatttgagtgcatcacctagtgtcctgtgatcctgaaagttagtaatcatccccaaaaaggtgtaaattaactactgatagac

SEQ ID NO: 4271 - DNA, 2516 bp, Macaca Fascicularis
tttgtcttatagtgatgaaataggccagagatttttaatagacttgctctttgtgaagattttctttttctgttaacattgttcttttctggggatatttgagaaattttcagaattacattttatgttaagaagtaaacatgtatgttttctttttaaaagaagcaaatttagaatttttgcattttcctcctgttaatattttctgtttttcattgaaatgtggtagcacttaaagttctctaatattaactgcattattttttatcacaacagtaattttatatttgagttttggagcactaaatgcaagtatatacaaggtgtccttataccagcacatcttctaccttgacttagattctccctgactttgtgccatgaagatgggcaaacaataaattctgtcacagaaaggcactgtgctgggctagcttcagtttttgcagtgacacctacatcacaagatggcatttggagaatattgtgccaagtagaataaaatgcctcacagcttaaaacggtgcatgtgagaagctgcagatttctgtcccaacaaaatgttttagaatcgggttttgtgaagtggttaacttagtttttttcagtggatataaatttaacttctttaaagaaaatcttcctacttcataagcaccctgtatatatttgcatataaaagtgtggactgccttaaaaatagatgggccgaggaaaacgggagtggagatggtgtgactttgctccatgcactgtggaaagatatgctctgctctatatgaaaattgccatgggtctctgctgcatgtgaaacagatcctgaactagactgtgaaccttgtacatgtttgccatccacggtggtccagtttgatgaacactgtgccttcttattgtccctttgaagtcacccagcagcatgcagtcgatgatagtccatgcatgtccctgttctcctacacacaataacacagtgagggggacggttggctctgggacaggggacaggtgtcattgcagccctggtctcattttcatctgctctggtgatggtacacagcaggaagttagctgtttgattgctaacccaaatcactcttctgttttctctacttgactgctgacaagtttaacaaagtgtgtggctcttctccttcctgcttgggaaccaggaggggttgggacccatagttcatgatcgaaagtctcagacattgcctgtttcccgtaacagaacaggaatgatgcatgccagattgcagcagctgggcagcctggataactctctcacttttaaccacagctacggccactcggacgcagatgttctgcaccagtcattacttgaagccaacattgctactgaggtttgcctgacagctctggacacgctctctctatttacattggcgtttaagaaccagctcctggctgaccatggacataatcctctcatgaaaaaagtttttgatgtctacctgtgttttcttcaaaaacatcagtctgaaacggctttaaaaaatgtcttcactgccttaaggcccttaatttataagtttccctcaacattctatgaaggcagagccgacatgtgtgcggctctgtgttatgagattctcaagtgctgcaactccaagctgagctccatcaggaccgaggcctcccagctgctctacttcctgatgaggaacaacttcgattacactggaaagaagtcctttgtccggacacatttgcaagtcatcatatccgtcagccagctgatagcagacgttgttggcattgggggaaccagattccagcagtccctgtccatcatcaacaactgtgccaacagtgaccggctcatcaagcacaccagcttctcctccgatgtgaaggacttgaccaaaaggatacgcacggtgctaatggccaccgcccagatgaaggaacacgagaatgacccagagatgctggtggacctccagtacagcctggccaaatcctatgccagcacgcctgagctcaggaagacgtggctcgacagcatggccaggatccacgtcaaaaacggcgatctctcagaggcagcaatgtgctatgtccatgtaacagccctggtggcagaatatctcacccggaaaggcatgtttagacaaggatgcaccgccttcagggtcattaccccaaacatcgacgaggaggcctccatgatggaagacgtggggatgcaggatgtccatttcaacgaggacgtgctgatggagctccttgagcagtgcgcagatggactctggaaagccgagcgctatgagctcatcgccgacatctacaaactcatcatccccatttatgagaagcggagggattttgagaggctggcccatctgtatgacacgctgcaccgggcctacagcaaagtgaccgaggtcatgcactcaggccgcaggctgctggggacctacttccgggtagccttcttcgggcaggtgagcctcctgtccgttctgcagtgtcctaagtcctttaaggaa

SEQ ID NO: 4272 - DNA, 760 bp, Macaca Fascicularis
  misc_feature (1)...(760): n = A,T,C or G
cggcagccatgcggcccccgcgcagctgggnnnnncgagtggggctggttctgaggacatggggaccacagtcaatggagatgtatttcgggaggccaacgntcntnnngntggctacgcagccattgcccaggctgacaggctgacccaggagcctgagagcatccgcaagtggcgagaggagcagaggaaacggctgcaagagctggatgctgcatctaaggtgacagaacaggaatggcgggagaaggccaagaaagacctggnnnnnnnnnnnnnnnnnnnnnnnnnnnnnnnnnnnnnnnnnnnnnnnnnnnnnnnnnnnnnnnaggaggctnnnnnnnnnnnnnnnnnggaggagaccccaggcacagagtgggagaaggtggcccagctgtgtgacttnnnnnnnnnnnnnnnnnnnnnnnnnnnnnnnnnnnnnnnnnnnnnnnnnnnnnnnnnnnnnnnnnnnnnnnnnnnnnnnnnnnnnnnnnnnnnnnnnnnnnnnnnnnnnncagagcacgggccgggcctgggcagaggaggagcagctgctttggtcggggcggagactcgcagcagctgctacccannnnnnnnnnnnnnnnnnnnnnnnnnnnnnnnnnnnnnnngagaccctcacccccctcagccctctctccctcctggccctatggtccagcccctcacacctcctctcagtctactcaattgtgactgtccctcctgatgtatttttttttctggcttaaagggtgtg

SEQ ID NO: 4273 - DNA, 743 bp, Macaca Fascicularis
  misc_feature (1)...(743): n = A,T,C or G
actagatcacagcagaggagcgagggcaggcntnnnaccaggaannnnnnnnnnnnnnnnnnnnnnnagaggcagcaaaggcgnnnnnnnnnccccaggctctgtgggcccagccctacccctggagcacagttaactggttctggggtaggaactgggggccagaaggacagggtgctggttctggctcaaccttggctgccggtgagatccagggcctgggaaagaggggctgaggcctgaactgggcctaaggagagcgcagctcagttcgcacacaaaacagcacccagccctgtcccttgccacctctacccagtcctgggcagttccctcaacagagctttgcagccccacgtggcagctgnnnnnnnnnnnnnnnnnnnnnnnnnnnnnnnnnnnnnnnnnnnnaggaggtggcgcaagagcctggacgcacgtgtgggaggccgttttgtgcnnnnnnnnnnnnnnnnnnnnnnnnnnnnnnnnncgcgctccgtggctctgttggtgcccagtgtgcaggggtgtgctggtggccctgtggcaacccatgccaactgagaagaagtaaccggcaccatacacccccccaacacaaaactggtcatttatttttgttgttgtcattgttattaggaggcaaaaaaatgtacagttacaagaatcattttccaaacagaggttaaatatgagctgaaaagtgtaaaaaaggaagaggaacatcactttacaaatca

SEQ ID NO: 4274 - DNA, 760 bp, Macaca Fascicularis
  misc_feature (1)...(760): n = A,T,C or G
tagatactgtcaaannntacgatatctatatagacgtagatcttttaaacttacctagtcattcttctatcatgtatattgatgctgaaagaggannnnnnnnnnnnctnnnnnnnncaatttcttagtctataatattaggagacatcttctgttttgcaaatgtctatgaatctgagcaacctggcattctatttactggcaagaaagctggcaggtgacatttgtaacatttcctctttgagactctgagttcacctagagaagtctaagaataacagctttctttcccagcacgagcctttatagctatccttagccgaaccactgtgtccatccagccaatggatgtcccttcccctgtaccccaatttcaagcttattttaggaagccttgaactaccatgtatcctggctcctagctgagtttattagaggtgtggagcagtgcaacttaaactcaagttgcacttatatattgaattttaaaatgatggttttatccgttgtgtgaggtggcttacccttgaggaccaggaggctccatatcctggctgaaaatctcttctgcaacttaagagtaacagtgcttttggatccttgagttctcctgtctccagatagcaaatgaccttgacttttctgccttgtgaattcatagtccaataggttgaagttaaatcacttgggagggacgcatagcaggagctctaggaacacannnncagtgcaggagtttttccaggtggcctcccttccc

SEQ ID NO: 4275 - DNA, 546 bp, Macaca Fascicularis
  misc_feature (1)...(546): n = A,T,C or G
ccaggttggggagcatgccaacannnacnnngagattgttgcaaaagataagnnganngannnnnnnnnncgcgcnnnnnnnttgcttgatcaagtggaacagattcagaaggagcaaggaattaccaaaggtatcgtgaagagcgcttccgactgacaagcgagagcaccaaccagagggtcctatggtggtccattgctcagactgtcatcctcatcctnnnnnnnnnnnnnnnnnnncgtcacctcaagagcttctttgaggccaagaagctggtgtagtgccctctttgtatgacccttcctttttacctcatttatttggtactttccccacacagtcctttatccacctggatttttagggcaaaaaaatgaaaaacaataagtcnnnnnnnntccatggccacannnnnnnnnnnnnnnnnnnnnnnnnnnnnnnnnnnnnnnnnnnnnaggacattagtccaatctttcaaaatctgtcttagggcttatgaggaatcagaacccaggactcagtcctgcctcttttgcctcaagtga

SEQ ID NO: 4276 - DNA, 2515 bp, Macaca Fascicularis
agttgcttgaaggcgacattgcacttcagatggagaaaatgctctttcctctgaagagccctagtgccacatggctgagccccagctccactccctggatgatggatttcatcctcaccagtgtgtgtggcctggtgctcctctacctgttactctcctacctccacagtgacccaccctcacccccgcccgggaggaagaggagcagcagggagcctcaaagggagagaagggggaggtccaggagcagaaagaagatctcagctctgaaagcttgcagaaacctcctgagggagctggaggagactcgggacctgaaccatcttctggaaagccacctgaggaagctcgctggcgagggcggctcccatctgccattaggtggagaccccccgggtgacgtgtgcaaaccagcgcctgctaaggcccaccagctgcatgggaaatgcatgccagatctgtctcccaccagcttgtccccagcagctcccccagctcctctggcctccacccagtcaccaggtccgatgaccttctcagagccttttggaccacactcaaccctgagtgcctccgggcctccagagcccttgcttcccctaaaacaccctgcatcccggccacatgtggtttttcctctttcaacacagccgcatggtcccctgacctctctacctccacctgactccagcctggctggacttcagtgtggctccacaacacgccccgtccccaagagctctcctctacacagccaggggccgccttctccaaccagggtgatctctggccttgggcgctccagcgatcccatctgggacctctattgctggagggaggctgccaccacctggggcctctccacctgttcacagggcaaatcccagccacagcatcttcccgaccagcccctagaggcttccttctggggagactccacacccaggcacgtggaggtaggtgtctgcacattcatccaccctgacgtgcagaagctgctggagactctcatcgccaagagagcactgatgaagatgtggcaggggaaagaaagggaacgggccaaccacccacagatgacatcgctggggaaggagtgggacatcacgactttagatcccttctggaacgtgtcaactgaaccacaacagctgccccgtcctcagcaagtctctgacgccatagcggtgggggaccacttgcagcagaaatgcagccagcttttctggaacctcccatctttcaacagcgagtccctggtagccacagcctgggtttctagcaagccttcctcacagaatgcgcactccgtatcattggatgaagcctccacttctcttccaggtgaacctgaggtcgaggtatcctcagagctttcccaaacaccgtcttcctcacagaatgcacactctgtatcattggataaagcctccacttctcttccaggtgaacctgaggtcgaggtatcctcagagctttcccaggccgccacgtgacatgctgcccgccacagacaggctgcccgctcagacccctcggtccaccccccagagtgtgtccagtaagaacacgacagtttcccagggaccatgggccctcctatggaagggaggggacagcccagggcagcgggagcctgggagcccgaaagcaaaggccccacagaagagtcagaagacgctgggctctgcggacaagggcgaggcccgcaggagacccagaccaggggagcagggacacggctccaagggaccaaggacctctgaagccagtgggaggagccactctgctcacaccagggaaataggagacaaacaagaaaggaaatacaaccagcctcagccggagaaacgagagacgccaccagaaagccacttccggagaaagatcggtcgccatccacggggtctacaccccaggaaaacaggtgcagggtgggaagacgtcctggagaaaggcaagcctggggcagatgctgtccagagctgggggtctggcccagcaaggctgtttatggactgcatggttgatgaagcctggaccatcagcagagttgtggggcaaatcctggtggacaaactggggcttccatggggacgtggtccctcagacgtcagtcgccacaaaggtgacctccacgcccaggagaatgtgccttcctgcggccacaggggtcactgccaccaggaacatagcagagagatgagagctccggcctgcagccccaaagccacccccaggggccaccactgtcctgtcaaaaacaggaacatcagggacagagacagcagatgggccccacctccccgggagcctgtgtccccagctggcccccaccaccacaggccacgagtggcaagcgcctcgggtggccccatctgcggccgctggaactgaggtctacacaggggtcttgcctcctgaaccagagaaggcttcttgcacgtctcctgggggcgacggggttctactcaaataaaactgacacctacacgttaaaaaaaaaaaaaaaaaa

SEQ ID NO: 4277 - DNA, 716 bp, Macaca Fascicularis
  misc_feature (1)...(716): n = A,T,C or G
tggacaactgtgagtggttgggttttcccccannngctgtgcgacttcctgtgcttgaggctnnnnnnnnnnnnnnnnnggagctaattttaattaactgtacagtcnnnnnnnnnnnnnnnnnnnnnnnncaccgcatttggtcagtcngnnncttnangnnnatgccctcctgattctccatntccttcaggggaggttggggccccactggactgggtgtcaagatgtgaaagctagtggaagctttaaggagacttcatggtggttccatgcaggtggttctgccatccctgctgatttatcctggttcctgtgtgtgtgtactcacatgtggagggcggggggaacgtggggtctactnnnnnnnnnnnnnnnnnnnnnnngcatcctcaagctcccagctaagtaacttgactacttttattnnnnnnnnnnnnnnnatagaagcgctctcatgttttatgttcagattctgtgaccactagttactgtatcagaactcttcaggtacccacttataaatagcactgatctgtttgtatactgatccatcactaacctgttttctaggacccagcatatgtagcatttgtattgcagtttccctggcttacnnnnnnnnnnnnnnnnnnnnnnnnnnnnnnnnnnnnnnnnntttacttgtgcaatactgctgtaaataactgcagattttaaagaatcttttatgttaa

SEQ ID NO: 4278 - DNA, 765 bp, Macaca Fascicularis
  misc_feature (1)...(765): n = A,T,C or G
actttaagtgtacatcatttaacaaatacatatcttaaaattgaaagatacttgggggaaagctggaaagaaatatagcatggtctcaacaaatagccctcttccccacagttaccaatgtcaattaatccaccctttgctcaactataaaattctacaaaatccaatttcccagaagaggccactcttctcccttcaggggatcctggctgcttatttattactttgaggtagtctggtgcattctgtaaacacagagataatatatatatatccccactatgtgattcctgcatcctccctcccatgcaaaacaaggatcctgagatttttctctgggttactctgatgtgagtcctaagtccaaaaagttttgtcctggttatgatcagagaaaagtgaaagaaaaagtaggaagcaatcagaagtagaataaggctaggagagagtcacttacaaggaatgggacatctgttaccaaggcggatcagataaatccaggacatggcaaagaaagtaaagtacaaaaataaattggaccatttaaaaaaataattcacttcattcagaacattaacttggacttctgagttggttactcactttgccatttataaagtactaagtatattttcataaaatttctgccccagaatagagaacctcattgctcaagtctgcattttagtgtctttttatattctgacttaatttcctgatctgttagtttaactgtnttgttgtattttagtaaatgaagcattt

SEQ ID NO: 4279 - DNA, 1977 bp, Macaca Fascicularis
taactgaaaatgtgctttctcataaattacaatttgatggtaggatcatgtcacgtaatggacgtgatgcttgcagagagctgattgggttctttttcactcacgaccaatcccttacaatttatgaatatcgacaatttgggaaaaatagaacaattgtgcttccttttattcaaaaaagcatttatagtcatcaatgtggacgaagaaaaggaaaacaataccgacttggtgatttttatgttggtgcaactttgacatttttgagttctgatcatgccagccttccagaaagcatcaaagaaaacacatttcttaaactccgaatcacacatattgatcagatagctttggattctctcaaaactgcttctatggaccaggaggatgatatagtcattcaagaaaccaatgataggctggtcttcaaggcaattcaagatgtgctaaaagaaaaactacataaaagaggtgttcgtattttgactggattgggaaaatactttcaacagttggacaaggaaggaaatggacttttagataaggcagattttaagcaagctctaaaagtgtttcacttagaagtgtctgaaaaggattttgagtctgcatggctaattctggatgacaatggcaatggtaaggttgattacggagaattcaaacgtggtattattggtgaaatgaatgaatataggaaatcatatgttcgaaaggcctttatgaaactggatttcaacaaaactggcagtgtgcctattacaaacataagaaaatgttactgtgcaaagaagcattctcaagtaatttcaggccattcaacagaggaagaaattaaatcatcctttctagaaacgttaaaagttgcctgcagcaagtctgatgaagtttcatatggtgaatttgaagattactatgaaggtttaagtatagaaataatagatgatgaagattttgttaccatcttgcgtactccatgggggatttagtctttaataattacatatgtcatcagcactaagcattttattggagagatgatttcagtgtaaaggatgatcaaacactggaatatattttcctaggacttcctttattctgtttttttttttttcgttgagtctggaaagaactatccagaaggatagatgtaggggcatgtgagtgtttgtgcatgtatatgcctgctcacatgttcatacatttgtaaaggtgtctttttggtttattacttatcttgcatatattttagaggtcattttttattaacttcaatagaaaagttatgtctgcatcaaacaatatggcagcatgtatttattaaccaagtttcctgtcctttcacattgtttttagctatctcttcctcagaatatatttgccaccattgtcaatttgataaattagaattgggcctaaagccagtgaaataattcaacatgtttttaacatatgaatatattaaaggatatgcaagagaaatgtttcaagcagtgtgattatagatgttttctgtatatagaatatttagaatgatggaggtttacccctatgatgctcatttaaatactgacttgtcttgtaaatctttgtcttctaaattatgtactgttgttggttaaatagagcacaatgtagtttttctaatgaccagttgtatttgttcttttattctgttttaaaacagcatcctttttaccagcatacaattgttatttagctagaaacaatagaatatgaatgggaaatgttctttattaagatcaatacattatctttttaaacaaagatcctaaaagtgtattgttgcaaatatgaatctaaggaatagttcagtaattattgcctaaaatgtgaaagcatattttgtatcctaaaatgaatgcatcatattctaaacatctctttttgtataacaaacaattgaaacatttccttctaaatatatgttatttaatagttaaaaaaaaaaaaaaa

SEQ ID NO: 4280 - DNA, 713 bp, Macaca Fascicularis
  misc_feature (1)...(713): n = A,T,C or G
gatttggataaactccccattnntcttcctacactttaatagtctcaaattctttctggggaagcaacgtcagtgtctacctccacaataactatgatataggnnnnnnnnnnnnnnnnnnnnnnnnnnnnnnnnnnnnnnnnnnnnnnnnnnnnnnnnnnnnnnnnnnnnnnnnnnnnnnnnnnnnnnnnnnnnnnnnnnnnnnnnnnnnnnnnnnnnnttaaataaggtaggcagggcaggcaggaaaccaatatttattacttttgtgattaaacactctagaccaggcttgttgatgtgtatgccaataatctagaatttttggcttagtgtaaaataaaaatgtcttttctattgtggtnnnnnnnnnnnttctgtaataagatcagtttgttgtcctctgtgcaccannnnnnnnnnnnnnnnnttttnnnnnnnngcatcaccaagannnnnnnnnnnnagctgctgagaannnnnnnnnnnnnnnnnnnnnnnnnnnnnnngtgctgccagtggtattttcccagatgtgaaaaataataatctaataaaggattaatacctaataacaatatcattgttgaacannnnnnnnnnnnnnncaccttcttctgattccttttttgtatttgaaaatgcaatggtgtgttccnnnnnnnnnnnnnnnnntgttnnnnnnnngactctccttgaagagaaaaaagatc

SEQ ID NO: 4281 - DNA, 754 bp, Macaca Fascicularis
  misc_feature (1)...(754): n = A,T,C or G
cgcggcctagctggcccgttcgctcagnnnnnnnnnnnnngccannnctgccattttacactttctgatctcctcggtcccttctgtgagctatgtctcaggggtcagtgacattcagagatgtggccatagacttctcccaggaggagtggaaatggcttcagcctgctcagagagatctgtaccgatgtgtaatgttggagaactatggccatctggtctcactgggtctttccatttctannnnnnnnnnngtttccttattggagcaagggaaagaaccctggctggggaaaaggaatgtgaacagagacctgttttcagtttcagagtcaagtggtgacatcaaagacttttcaccaaaaaatgtcatttatgatgactcatcccagtatttgatcatggaaagaattctaagtcaaggccctgtgtattccaattttaaaggaggctggaaatgcaagggtcatacagagatgctgcaagaaaataagggatgtattaggaaagtaacagtctctcatcaagaagccctggctcaacatatgaatatcagtactgtggagaggccctatggatgccatgagtgtggaaaaacctttggtcgacgcttttccctggtgttacaccagaggnnnnnnnnnnnnnnnnnnnnnnnnnnnnnnnnnnnnnnnnnnnnnnnnnnnagccagatttcaaaccttgtgaaacatcaaatgatacatactggaaagaaaccnnnntgagtgtaagg

SEQ ID NO: 4282 - DNA, 743 bp, Macaca Fascicularis
  misc_feature (1)...(743): n = A,T,C or G
agagatatgcagcccctactcagtgccctgccaaatgtgggcatgtttgannnnnagcttcagagtccctggcacccaggcagccagcaccagccaccagcctccgacccggattcagggagccccttcaagtcactggctccctcagcagccccacttcccactgctgccagccctccccaatctccagcagaacctgcccatgccagctcagcgatcttctgcagaaaccaacgagctgagggaagcccttctgaagatcttccctgactcagagcaaagactgaaaatagaccagatcttggtggcccacccatacatgaaagatctnnnnnnnnnnnnnnnnatggtgttggattgaagattgtgctgagaagnnnnnnnnnnnnnnnnnnnnnnnnnnntcaagctcacacctgtacttgatgggaatgtgaagaaacttatttcccagtgtaaacgcagttgtatagaaaaaaaaaatgttttgtgtataaatctgggttttcaaaaccagcttttttctatatataaattatgctgctattacagatttaacattttctgttaaaggaaagtctacattttctgcctgttcagaactgtttaatagcagttactcttgagtgtatttacctttttatgttttttaaactattttccttaaagccgaaaatattgacaaatggatatggttagcctttataaataaataaataaataaaaaagagcgntttctaaga

SEQ ID NO: 4283 - DNA, 993 bp, Macaca Fascicularis
  misc_feature (1)...(993): n = A,T,C or G
ttccatttgacccagtttactgtcagaattcagttcaggtagatttggttcaacttttggtggtttttggctctaggatattcttgactttaatatcctagaacttactgagtcttcccttcccttcaataaatacacttctcacatacctctaatcctatgcttccttgaaacaataatgctagctgagttgtttactaacgattattacaagggcctgaaggtgtgggagtggagannnnnnnnnnnnnnnnntccaatataagggagaagcagattggcactacgtctgattaggcagaaaacaccaggattccttaagtgatccttgaaatggttattgttttctgccttgtcacatttgccactgtgccctttaaaacgatgtggaaacctcaggtttgtggacagcacaggtggaacgacattttgtgcttcctgaggctcccctctaccaggcacattagcttagtgcttcagatgtcagcccaagtccttgctacctccttttcctgctgcctggggaagagtgtgttggagctggagcgcttgcactcttcaggtgactattttcacctccatttcttccacatgcgttaggtgaaactgaggtctgaacctcctgcaaggtctacattttaaggactcacacatcgggctctcagaaatgtacacacctgttagttctgtttgttctaaaggaaatgtgggtatctcaggccaggacttagtgaccaagtgactagttttcgctagacagcaggttaatacctagatctctttaaaaaaaaaaaaggattaaagggagctgatcaggtttgcgagttttttagcctaattccaaagcatggaagagtgctctaggtaggaaagaaatttttttcttacgatttgtnnnnnnnnnnnnnnnnnnnnnnnnnnnnnnnnnnnnnnnnnnnnnnnnnnnnnnnncttgcaattattcaaatgacaagttaaatttgcttttgtaat

SEQ ID NO: 4284 - DNA, 1663 bp, Macaca Fascicularis
aaatctcaaacttacattaggctaccccactggcagtggtgatttgggccacatgatagataaaacttcacacatgccctcttctcccttgaagtcctctgtttgttctagcactctactaccatcaacaacaagtagttcagtaagtgtaattagcatatcagcagcaaattttggacaaaacaatgcaaatattattcatactccaactaaacagcaacaagtagattatatcacaaaaagttaccctgttacaaggtcagaagcaacagcaacaacaaatggagatgtaatcagtgggactccagttcagaaacttatgctggtatcagctccatctattctttcttctggcaatggaactgcaattaatatgacacctgcactgacatctacaggtgtttctgcccagaaattagtttttattaatgccccagttcccagtggtacgtcaaccccgactcttgttgcagaatcattaaaacaaactcttcctcctccattgaataaagcatatgttaagactccagagcaaccccagatagtactgattccatctacagtgggcacaccaataaaaataaattcatcaccagctgtgtctcagataaaagatgtgaaaattggactaaacataggtcaagcaattgtaaatacttcaggcactgtgccagctataccgtcaattaacatactacaaaatgtaaccccaaaaggagaagacaaaagtagcaagggctatattttgccattgtcaacaagtggtaattcaattccagtaagctcaaattttgtgagtcagaatattacccctgttaatgaatcagtggtttctgcagcaagagcagtaaacatgctttcagttaccggagcgaatttatctttaggttccctttcagtgacctcagcctctgcttcagctgggacacgacctcctgttttagtcagtggaaatgatacctcttcgagaattatgcctattttgtcaaatagactttgctcatcaagtctcggaaacactgtggctatatcaactgtgaaaacatggaataatcagccaatatataacatcagtattttattaaataatctgaatgtggttgattttgacatcgctgcaattacaattttcttctatttttcaagtcacaataaggaaaataaactactcatggtctaaataccagagataaagtagactcatggcttggtaaggaaattttaagcatttcttcaaagattgacgtgctaaaataagtattgatgttttgggtttttttacacctaggattttagcttgggtgtgtaggtgaaggccaagaccctctgcaggaaaaagcttattttcaaactcagaaaataaaatgtcaatcataaaaatctacttcaactttagcaaaaagaaaaaaaatcaacaaaaagtatactctgtatgctgggattccgaggttccaacacaccgttacaaatctgtggggggtttctttcttctgataattctagagcctgttaccatagaaaggcatttcttcaatggctggttgtagttagttcatgtttttcaatcaaatttgcaaatgtatttgttgctgtatagtgattgttttgcaaaataaaattgcttgtcacctaaaaaaaaaaaaaaaaaaaaaaaaaaaaaaaa

SEQ ID NO: 4285 - DNA, 757 bp, Macaca Fascicularis
  misc_feature (1)...(757): n = A,T,C or G
ccatcccataannnnnnnnnnnnnnnnnnnnntaaggctcccatgtttcctggccccggttgagggatgctgaccccattctgagatgtgaaatggcttccactggagaggtggcttgctttggtgaaggtattcatacagccttcctaaaggcaatgctttccacaggatttaagataccccagaaannnnnnnnnnnnnnnnnnnnnnnnnnnnnnnnnnnnnnnnnccttggtgtggctgaacaattacacaatgaaggtttcnnnnnnnnnnnnnnnnnnnnnnnnnnnnnnnnnnnnnnnnnnnnnnnngtccccgccaccccagtggcnnnnnnnnnnnnngacggacagaatcccannnnnnnnnnnnnnnnnnnnnnnattagannnnnnnnnnnnnnnnnnnnnnttaaccttcctaacaacaacactannnnnnnnnnnnnnnnnnnnnnnnnnnnnnnnnnnnnnnntgatagtggaatccctctcctcactaatnnnnnnnnnaccaaactttttgctgaagctgnnnnnnnnnnnnnnnnnnnnnnnnnnnnnnnnnnnnnnnnnnnnnnnnnnnnnnnnnnnngaaaagcagcatagagatgcagacatcacagccccattattaaatcaatctgagccannnnnnnnnnnnnnnnnnnnnnnnnnnnnnnnnnnnnnnnnnnntgaatattgatacctaaactttatttcagtttactttgttatgccttaatattctgtat

SEQ ID NO: 4286 - DNA, 2263 bp, Macaca Fascicularis
tactggaacagtcatgtcgggggtccggagactgtcgcggctgctgagcactcggcgcctggcgctggccaaggcgtggccagcagtgttgcaaacaggaacccgaggttttcacttcactgttgatgggaacaagagggcatctgctaaagtttcagattccatttctgctcagtatccagtagtggatcatgaatttgatgcggtggtggtaggcgctggaggggcaggcttgcgagctgcatttggcctttctgaggcagggtttaatacagcatgtgttacaaagctgtttcctaccaggtcacacactgttgcggcacagggaggaatcaatgctgctctggggaacatggaggaggacaactggaggtggcatttctacgacaccgtgaagggctccgactggctgggggaccaggatgccatccactacatgacagagcaggctcccgccgccgtggtcgagctggaaaattacggcatgccgtttagcagaactgaagatgggaagatttatcagcgtgcatttggtggacagagcctcaagtttggaaagggcgggcaggcccatcggtgctgctgtgtggctgatcggaccggccactcactgttgcacaccttatatggaaggtctctgcgatacgataccagctattttgtggagtattttgccttggatctcctgatggagaacagggagtgccgtggtgtcatcgcactgtgcatagaggacgggtccatccatcgcatacgagcaaagaacactgttgttgccacaggaggctacgggcgcacctacttcagctgcacgtctgcccacaccagcaccggcgacggcacggccatgatcaccagggcaggccttccttgccaggacctagagttcgttcagttccaccccacaggcatatatggtgccggttgtctcattacggaaggatgtcgtggagagggaggcattctcattaacagtcaaggcgaaaggtttatggagcgatacgcccccgtggcgaaggacctggcgtctagagatgtggtgtctcggtcgatgactctggagatccgcgaaggaagaggctgtggccctgagaaagatcacgtctacctgcagctgcaccacctgcctccggagcagctggccacgcgcctgcccggcatttcagagacagccatgatcttcgctggtgtggacgtcacgaaggagccgatccctgtcctccccaccgtgcattataacatgggcggcattcccaccaactacaaggggcaggtcttgaggcacgtgaatggccaggatcagattgtgcccgggctgtacgcctgtggggaggccgcctgtgcctcggtacacggtgccaaccggctcggggcaaactccctctgggacctggtcgtctttggtcgggcatgtgccctgagcatcgaagagtcgtgcaggcctggagataaagtccctccaattaaaccaaatgctggagaagaatctgtcatgaatcttgacaaattgagatttgctgacggaagcataagaacgtcagaacttcgactcagcatgcagaagtcaatgcaaaatcatgctgccgtgttccgtgtgggaagcgtgttgcaagaaggttgtgggaaaatcagcaagctctacggagacctgaagcacctgaagacatttgaccggggaatggtctggaacacggacctggtggagaccctggagctgcagaacctgatgctgtgtgcgctgcagaccatctacggagcagaggcgcggaaggagtcacggggcgcacacgccagggaagactacaaggcgcggattgatgagtacgattactccaagcccatccaggggcaacagaagaagccttttgaggagcactggaggaagcacaccctgtcctatgtggacgtcagcactgggaaggtcactctggaatatagacccgtaatcgacaaaactttgaatgaggctgactgtgccaccgtccccccagccattcgctcctactgatgagacaagatgcagtgataacagaatcagcttttgtaattatgtataatagctcatacatgtgtccatgtcataactgcctttatacagcttctgcactccggggaaaaaggagtacattgaagggagattggcacccagtggctggtagcttgccaggaacccagtggccagggaacgtggcacttacctttgtcccttgcttcattcttgtgagatgataaaactgggcacagctcttaaataaaatacaaa

SEQ ID NO: 4287 - DNA, 734 bp, Macaca Fascicularis
  misc_feature (1)...(734): n = A,T,C or G
taagcagtcannnnnnnnnnnnnnnnnnnnnnnnnnnnnnnnnnnnnnnnttagcagctactnnncagcagatgcaaccgtcaactttgcttatgnnnnnnnnnnnnnnnnnnnnnnnnnnnnnnnnnnnnnnnnnnnnnnncgctacaagtacagcagcatgattgactacaaccccctggagaagnnnnnnnnnnnnnnnnnnnnnnnnnnnnnnnnnnnnnnnnnnnnnnagctctccaagatgtgnnnnnnnnnnnnnnnntaccagcaatgtcagaaggagatgctcagggctcctgaggggagcaggctgaagggagagccagccagccagggcccaggcagctctgactgctnnnnnnnttttcattaatccacaannnnnnnnnnnnnnncnnnnnnnnnnnnnnnnnattnnnnnnnnnnnnnnnnnnnnnnnnnatatgagaataaatatccttttcttctgtcagcatttatgggatgtttaatgacatagttcaagttnnnnnnnnnnnnnnnnnnnnagctataaggtatagtagtttcnnnnnnnnnaccattgctcttgcatgttacatggttaccacaagccacaatgaaaagcataacttctaaaggaagcagaatacctcctctggccagcatcgaacataagtaagatgcatttactacaattggcttctaatgcttcagatagaatnnnnnnnnnnnnnnnnnnnnnnntgcat

SEQ ID NO: 4288 - DNA, 687 bp, Macaca Fascicularis
  misc_feature (1)...(687): n = A,T,C or G
ttttttttttttttnnnnnnnnnnnncaatgaaaataaggtacaacacaagtttttacctagtctgactagaagtattccacttcaaggnctgaagtagtacttttaccttaaaaaagaaaaaaaaaaagacgacaacaaacaaaaactgtcacacaggatggataagaagattggttaaacagttttgtgtagatctttttggtgctgaactatgacatgagccttatagattgtaaaatagagatagttggaactaatgtacagaactaaattttttaaactttatttgctgttaaattctgtgaagtttcagttatctaaaataaacatacacaaatatgaaatgtaatgtttcagattgcaaggtaatatgtaatgtagtgtttgtaagatactcttgtctaatattaactagtagtattttgatttgtacagtcataatttgttaaaatgacttcatttaacattcactgatagagattaataatgtaagttctgatttaaagaatggtgggaaaatggtgcatgtaatacttttgcaactgttggggagatcggtatgttttgaaaagagtaatttaacttttgggtgccaggaaatgggttttctcaaagttcattgccggcaatgggcaggcctgcaaatactggcacagagcattaatcatacaccttattaacggtg

SEQ ID NO: 4289 - DNA, 635 bp, Macaca Fascicularis
tcggcgccccggggcgcctggacccctcttgcctccatcttgctgctgctgctcgggctgctcttttaggcctcgcgccccccgccgttggctgcgggagagcctgcgtcccgctcccgtgctcgcctcgcccccgcgccggggcacctgtggcttggggacagatagaggggatggttggggatacttcccaaaactttttcaagtcaacttggtgtagccggtcccccccgccacgactctgggcacttcccctgaagctcctctccggagcttgacttcttggacctcttcccccgccccaattccaggctgcagaaactcccgacttgtctgcggtccagaaacctatctgcagtgttcaggacctcccggaggaagcgggcatgtaggggacataacagtagtcctggactcgaaagggaaggtgctgaccagtggagccttagcaattcgaagggatgggaaggaggaattatatttgcaaaggggctgcctattagcatatttcctttaagggggaaaaaaagtaccagtatcgacttttatagattgtggccagtgaggacgttagaatcctatgtaaacagaaaagtcccacttaccgattcattctttcgctgtatgtatcaccg

SEQ ID NO: 4290 - DNA, 741 bp, Macaca Fascicularis
  misc_feature (1)...(741): n = A,T,C or G
gttttgggagagctttaatgtatcaggaatagactcctcctaaggcaaaagtctgagggtgagggagaggcaggtgggcaacaaagcttataccaaagctagaatatccagggcaggttcagagagaagggtcctaatatcagcatttgactgaagccaaaaacagaagagaacatgcaagttctgagaataagaaataaataaatagtttaagttttgaatgtattgagtatttttatactccgtgaaaattctagaacagaatttaacaatggcataaggaagagagnnnnnnnnnnnnnnnntataaagatcccaannnnnnnnnnnnnnnnaagaacagnnnnnnnnnnnnnnnnnnnntttatgctnnnnnnnnncttttcctatgaaattattttttaggaataaggaaacatcctatggaatatttttctttcctacactcaagaccaccctcaccccacaggggaacctcaatatcaaatagaaaaaataatgcacttttgtataacccttaggagactctttatttgcannnnnnnnnnnnnnnnnnnnnnnnnnnnnnnnnnnnnnnnnnnttaatatacatatgtgatgaattttcttttgactataccatttctgtttccaatatatctttcataatagggacatcctctgttcttaaaacaatttaactgatgttattttttgttctnnnnnnngtatcagctctatttttaccaaacactggcaaag

SEQ ID NO: 4291 - DNA, 1758 bp, Macaca Fascicularis
tgggagaaaatggcagaagaaatgcccattaaggcaaaagccgagacagacagaaaagtctgaactttatttttacaataaaagcacacaaactataacttgaaaaaccagcttgccctcccaagatctgagagtgttagcaaaccactgtcttgcctgtattcagattgacttgctctttgtagaagtaggggctttggtgacagtagacacaactgtaaataattcagagattataaaattcccaagactttgtcttcagagatgtttgaaatagctaaaatctaaattaggctgttaaaaaatgtctgtgtaaatgttgatggcattgaataagaaaaggcagcatttttttcctctcagttatttataatctataaggaaaagtagctgtgtatagcactatgttttttcttaacaatttgattacatgatgaagattttctggtgtcacaatcacagcattacaacagcgtgatttaaatactattgcaaaaccaaaagccaagtaactgcttatattacaaacactttttttgtttctataaccatttattcaaataaaatattgtatggaaattaactatttaaaatcgaattgctaggttatgtcgggaacacagaggtgtagaagattgaccctgtctttaaatgtataaaccattaagtagtcaaatgtctacagtgaaaaacagtattttatactaggtatagataattggcacaaataagctcagaaaagaatgatcagttcttgctggagtaattctagggaaatggctttcatggagaaaaggaaaagaggaagtgtagtatgagtctgtgttgtctattgctaatgtagaatgttgttttctgcttctatgccttactgattccagtttttatttttagaaaacaaattaagtgaagcttctggaggtagggctgaaaatggtgaaagaagtgacttggaagaggacaacgaaagggagggaccggaaaatggagccattgatgctgttcctgttgatgaaaatcttttcactggagaggatttggatgaactagaagaagaattaaatacacttgatttagaagaatgacatcaaacacgtcactgaaaaaattaagtcagctcagcatgagttgaaattgactacattaatttctttccacctagaatcaacaggatgtttatttcctatgctgattctgaaggagttaacctcctgcgaaaaaggaatattgtccctacatcttctcttctgactttggctacatctcatagtaagttcagagtagttcatgataaattgaaaatataatggtcattgcagaaaatgattgattgttgtaactgtccacccaagtaagaagtgtatctgcttttccatctttggttttcatttgggcatgtgctattaccagaaacaacaaacttacatttaaaatacccttcatttgacacagtttttaatgagtgatttcatttcctttgtatttgtatgtttagaagactgcctaaaacatcaacactgtacttcataaaggaaactgcatatgcagattcagtattgtatatctttggacaattagatggacatttaaaatggaacttcttatatctgacaggatcagctacaatgccctgtgttaaattgtttaaaagttttcccttttcttttttgccaataaaattgtaaataaagaccatcatacattaaaatccaaaaaaaaaaaaaaaaaaaaaaaaaaaaaaaaaaaaaaaaggccaca

SEQ ID NO: 4292 - DNA, 3258 bp, Macaca Fascicularis
  misc_feature (1)...(3258): n = A,T,C or G
cagtgcagggatccggcccgcccttgccactgcctggcactatgctggacccacacacctgggccgtggagacggctctgtggaagcagctgctggtgctggtggagctgcagcgctggccggaggcggctgctctcatccaggagaagggtgaggcgtccccacggcgggggctggtgcagatgcagcagagccgctgtggccatttcctggaggtggcccgggagctgggcagtggggacaccctgcaggtgcagctcggcgccagcctgcagcacggcttcctggtaccgagccctcagctctggactgtggcacccggcttcagcctctgcctggagcacgtggagcggcctggagactgcttcctgggccacgtgtaccaggccccgcgggaccgctatcgcgacgtggatgagtacacctgtgtgtgggagccattctgcgctctggagtcggccactggtgcagttgccgagaatgacgctgtcacacttcagcacctgagtgtttcctgggatgtgtcacggatgccgcaggggcagctgcagggcgccttccgcctggaggccgccttcctcgaggagaactgtgtcgacatcaacctcagttgctgctacctctgcatccggctcgaggggctgccggctcccacggccagcccacgccccgggcccagcagcctcggccctggcctgagtgtcgaccccggcacatacacctgggtggcacatgggcagacggaggactgggaccaggagcgccgggcagaccggcaggaggctcccagacaggtgcacctcttcatccaccacatgggcatggagaaggttccagaagaggtgctgaggccgggcaccctgttcaccgttgagctgctgcccaagcagcttcctgatctccgcaaggaggaagccgtgcgtgggctagaggaggcgtccccgctggtcaccagcatcgcactgggccggcctgtcccgcagcccctctgcagagtgatccccagcaggttcctggagcggcagacctatgacatccccggaggccgccacaagctgaaccccagccagaacagggcggtcagggaggctctggagaagcctctcacagtcatccagggcccgccaggtacagggaagacgatcgtgggcctccacatcatattctggtttcataaatcaaaccaggagcaggtgcagcccggaggctccccccatggggagacgcagctggggggtccctgcatcttgtactgcggcccctccaacaagtcggtggatgtcctggcagaactgctcctgagaaggatggagctgaggcctctccgggtgtacagcgagcaggccgaggccagcgagttcccagtgccgcgcccgggcagcaggaagctgctcaggaggaacccccgggaggggaggccgaaccagagcctcaggagcatcaccctgcaccatcggatccggcaggcccccaacccgtactcgtcggaaatcaaggcctttgacacccggctacagagcggggagcctttctccagggtaggacctggtcttgtacaagaaggtcttgtgggaggctcggaagttcgagctggaccggcacgaggtcatcctctgcacctgctcctgtgcagcctccgccagcctcaaaaccctggatgtgaggcagatccttgttgatgaggcaggcatggccacagaacctgaaaccctcatccccctggtgcggttcccacaggccgagaaggtggttcttcttggagaccacaagcagctgcggcctgtggtcaagaacgagtggctgcaaaacctgggtctggaccggtctctgtttgagcggtaccacgaggacgcacacatgctggacactcagtaccgcatgcacgagggcatctgtgccttcccctcagtggcattctacaagagcaggctgaagacgtggcagggcctgaagaggctgcccagtgtcctgggccacgctggcaaggagagctgccctgtcatctttggctacgtgcagggccacgagcggagcctgctggtgtccacggatgaagggaatgagaactccaaggccaacctggaggaggtggctgaggtggtccgtatcaccaagcagctgaccctggggaggaccatagagccccaggacgtcgccgtcctcacgccctacaacgcgcaggcctctgagatcagcaaggcccttcggcgagagggcatcactggggtggccgtgtcctccatcaccaagagccaggggagcgagtggcgctatgtgctggtgagcaccgtccgcacctgtgccaagagtgacctggaccagcggcccaccaagagctggctcaagaagtttctgggcttcgttgtggaccccaaccaagtgaacgtggctgtcacgcgggcccaggaggggctctgcctgatcggagaccaccttctcctgcgctgctgccccctctggcgtagcctcctggacttctgtgaggctcagcagagcctcgtgcctgccggccaggtgcgcgtctgcaggaggccaactatgccttcctgaagagccctccccacccgcaagctgccaggactgggagggcaagtccagggccccccaacctccccaccgccctccaccatcagcctgcctgggccagcctgcctcctggcctcgggctctccctggggcgggaagtgggcagattggaggaggaggaatggcgagggccggtccccacacccctgcttctcctgggcatctggggacaaggacacctctcagggtggccaaaaggggcttctttgggaccagcgcacggtagttctgctgtccctgggaagtctcagaaccaggaaggaaaccctatggaggctgccctttgacctttcgatgccacctgtgattactctggatggcgtctgaggagttcaggtttattctgtatttaaatgaactcaaagccagcatcctgccgggcgtggtannnnnnnnnnnnnnnnnnnnnnnnnnnnnnnnnnnnnnnnnnnnnnnnnnnnnnnnnnnnnnnnnnnnnnnnnnnnnnnnnnnnnnnnnnnnnnnnnnnnnnnnnnnnnnnnnnnnnnnnnnnnnnnnnnnnnncgtgcacctgtaatcccagctacttgggaggctgaggcatgagaatcgcttgaatccaggaggcagaggttgcagcgagctctgattgcaccactgccctccagcctgggtgacagagcaagaccctgtctcaaaaaaaaaaaaaaaaaa

SEQ ID NO: 4293 - DNA, 665 bp, Macaca Fascicularis
  misc_feature (1)...(665): n = A,T,C or G
caaaaaaaaaaaaacaaaaaacacgggattaaaaaaaaagtcaggataaaaattttaaaaagcaggccactgtcagcaaagcctggagaagaggggccggaggctccgcccccataatgtccctgccaccccttcccagtcacccctttactcttacagtagcaaataagacccctgtctaatggggggagacaaatgtgtagagcctttgccaccttggccagggctgattctttaaatttctggatgatgatgattgttatttaatagccagaggctcatagaattgacttgtttggaggaggcgtgatggcctctttactctcaccaaagcaatttttccctcaggggggctcccatcttcttacacagagaggcagatgaggcaggacagtggggttaactgtagaccaggtgagggcacgggctgctggggtggccccgcttccccagtgtacatattgtatctgtgtaacacattgtatattccaggggtagggcagccccctgtatcatacctagcagaggttggagctggcacatggggaggaggttctaataattatttggggctgggaaacttatttattgatagcataggacagaggaaggaggcggggatggggtcgtggcaccctggtgatgcaactnnctgtttattttgc

SEQ ID NO: 4294 - DNA, 1672 bp, Macaca Fascicularis
atggtgggtgaagagaagatgtctctaagaaaccggctgtcaaagtccagggaaaatcctgaggaagatgaagaccagagaaaacctgcaaaggagtccctagaggcacctagtaatggtcgaattgacataaaacagttgatagcaaagaagataaagttgacagcagaggcagaggaattgaagccattttttatgaaggaagttggcagtcactttgatgattttgtgaccaatctcattgaaaaatcagcatcattagataatggtgggtgtgctctcacaaccttttctattcttgaaggagagaaaaacaaccatagagcgaaggatttgagagcacctccagaacaaggaaagatttttattgcaaggcgatctctcttagatgagctgcttgaagtggaccacatcagaacaatatatcacatgtttattgccctcctcattctctttatcctgagcacacttgtagtagattacattgatgaaggaaggctggtgcttgagttcagcctcctgtcctatgcttttggcaaatttcctaccgttgtttggacctggtggatcatgttcctgtctacattttcagttccctattttctgtttcaacgttgggccactggctatagcaagagttctcatccgctgatcaattctctcttccatggctttcttttcatggtcttccagattggaattctaggttttggaccaacatacgttgtgttagcatatacactgccaccagcctcccggttcatcattatattcgagcagattcgttttgtaatgaaggcccactcatttgtcagagagaacgtgcctcgggtactaaattcagctaaggagaaatcaagcactgttccaatacctacagtcaaccaatatttgtacttcttatttgctcctacccttatctaccgcgacagctatcccaggaatcccactgtaagatggggttatgtcgctatgcagtttgcacaggtctttggttgctttttctatgtgtactacatctttgaaagactttgtgcccccttgtttcggaatatcaaacaggagcccttcagcgctcgtgttctggtcctatgtgtatttaactccatcttgccaggtgtgctgattctcttccttactttttttgcctttttgcactgctggctcaatgcctttgctgagatgttacgctttggcgacaggatgttctataaggattggtggaactccacgtcatactctaactattacagaacctggaatgtggtggtccatgactggctatattactatgcttacaaggactttctctggtttttctccaagagattcaaatctgctgccatgttggctgcctttgctgtatctgctgtagtacacgaatatgccttggctgtttgcttgagctttttctatcccgtgctctttgtgctcttcatgttctttggaatggctttcaacttcattgtcaatgatagtcggaaaaagccaatttggaatgttatgatgtggacttctcttttcttgggcaatggagtcttactctgcttttattctcaagagtggtatgcacgtcagcactgtcctctgaaaaatcccacatttttggattatgtccggccacgttcctggacttgtcgttacgtgttttagaagcttggactttgtttct

SEQ ID NO: 4295 - DNA, 665 bp, Macaca Fascicularis
gctggcctggccgatctaggcagtgactctggcgcactttctctgtctgtccactggggacggtaatgaacagcattgccgcctgcagcgttcagagctccttgagcatacatcagttatttctgcagatcaggttttaaagcagccagaacctccatgggaaagagcaggacacacagtacttaacaagagaacttagctaatttgatctgccattcggttgattaaccagcacttgacaccagaagcagcctgttcctgcaacaggtgacggggagcgctctcatcaatattttatgcaaatgctggctcagtggaaagaggagaaaacttttccctccccatcattttttttttttaaacagcagaaaagtaatttctggtgaactgatgagaattccctattgcaaaaaaaaaaaaacaactcatttataaccatttattctgagaattaaagacagacaagagtacgtttttcaattagcaggacccagggactcctggctacaggggcctgctcctgaatcagtgtatttgttaaaagcacaattcactttcatgctaccattttgctttcattaaagaattgcagttttcaatcaaataggaataagtgtctcccattagtggcactgcagataaagggcattcagcatttctgttct

SEQ ID NO: 4296 - DNA, 712 bp, Macaca Fascicularis
cagatgccttggaggcaccatcctccctcctcccagatgggatcctgccagaggcaaagtcaggggtctgcccctgcctatagggccagagcaggtatagctgcaatccccaaataatgagatgggctggccccacattatccatccagaacattccatgcttcaagccagaatgttggcaagatcgggttttgccttgagctatcctgggatgtgggaaaaaccgatttctccatagatgggctgcagggagtgggaggcagtattccaggagagaagtgggtgaaggttcctgggatcttaggtaaagactagatgccgcctggtactggtctgtactgtgctggctcaggagttctgagaactggaaggacttagcctcaacctgagttctgcacgcaccccttccccttaaggaaggcagctctgagaggcagcaggacttgatccaaacccacagtcttgtcctggaggtagcaggggtgaaggtggaggtccagggccgtgaggaggctgcttgccatcagagcctggcctgaccaccctcttctctacttacacacacatgtattttataacagccctgacccaacctggccactctgcagagactgggacagccaggtgcaggcagggggccctcccacacccagtcacctacaaggaattttcaaatcttccactttaaaacagaaaccggaaatgcgccgta

SEQ ID NO: 4297 - DNA, 745 bp, Macaca Fascicularis
  misc_feature (1)...(745): n = A,T,C or G
gtactnnngagctgagctggagctgcnnnnnnnttcacaggaacaagcaaggttcatctaaaatataggtaaaaacttaaaaacaactaatgagtttagaatttaatggcaaatgtgtgataagttttgaaacacaatttctctctctccagtcctcaattttggaaaacaaaaacaaaaacaaaaaaacaacaacaataaaaaacataaatcatgatcggactgagttgttggcaaaatagattgtagtcttacacttggtctgattatttgcataaagtgcaagaagaataattatttctacgtaggccttttggattggctttgatggaactctgtttcacaaggagtctcagataagaccttttaaaaccaagcccagttacgggtttgtatcctcaaatgcctgtgaggtgagtgattctcttctcttaaggtcccaagataaacggagttcttgaacctgttagaaagtgacattcttaggctgggcacannnnnnnnnnnnnnnnnnnnnnnnnnnnnnnnnnnnnnnnnnnnnnnnnnnnnnnnnnnnnnnnnnnnnnnnnnnnnnnnnnnnnnnnnnnnnnnnnnnnnnnnnnnnnnnnnnnnnnnnnnnnnnnnnnnnnnnnnnnnnnnnnnnnnnnnnnnnnnnnnnnnnnnnnnnnnnnnnnnnnnnnnnnnnnnnnnnnnnnnnnnnnnnnnnnnnnnnnnnnnnnnnnnnnnnnnnnnnnnnnnnnnnagg

SEQ ID NO: 4298 - DNA, 746 bp, Macaca Fascicularis
  misc_feature (1)...(746): n = A,T,C or G
ttcagaaagtggtcactgtgctcccagtttttaaattggcttacaatacttgtttaagttgtgaaaaaatccctgaagatgaagaaaacccttctagtgttccttgatatataagtcccagataattatgcagttgtaaatctatgcctcacgaactcaaccatgttgggaaactcaaacttctgaatatactttcctcattaaggcagtggttcttaaatgagattgattttacaacacagtggnnnnnnnnnnnnnnngagacatttttgatcattccaagttgggggcaaaataccagtggtgctgaggttgagaagccttgtgtcaaggggatatgttaatatatgctcaaaggagtccttcatattggaaggttagcagatttnnnnnnnnnnnnnnnnatatttatttaccttannnnnnnnnnnnnnntcnnnnnnnaatactatagaannnnnnnnnnnnnnnaaagactgtcatagtttagagggggaataacttatccaagctactaatgcggaaaggtttcggtgcatgtgatgaagcaaatcagtatgaatgaagtcatgatactgtaaacgctttctgatgtactactgaaactaatagaaaatattttcatgaaactacatgatttctgttgaatgagatttttaaaatgccattaatttctgtttttattttgcagatatgaagagcattttaagagatacagcctctggaaatggatcaaactctaactc

SEQ ID NO: 4299 - DNA, 750 bp, Macaca Fascicularis
  misc_feature (1)...(750): n = A,T,C or G
caggcagttnnnnnngaaatgnnnnngcgagtcgagcggctgatgcaagacctgaataaactgacctgtcaggtggctactctcaagaacaatgcctctactgaaaggacctgctgccccgtcaactgggtggagcaccaagacagctgctactggttctctcgctctgnnnnnnnnnnnnnnnnnnnnnnaaagcactgccagctggagaacgcccacctggtggtcatcaactccagggaggagcagaattttgtccaggaacatctaannnnnnnnnnnnnnnnnnnnngcctcagtgaccgtgaaggagcctggaagtgggtggatggaacagactatgagaccggcttccagaactggaagccaggccagccagacgactggcaggggcacgggctgggcggaggcgaggactgtgcccacttccacccagacggcaggtggaatgacgacgtctgccagaggccctactactgggtctgcgaggctggtctgacccaggccagccaggagagtcactgagctgcctttggtgggaccacctggctgcagaaatggcggtggggaggaggactctacccagcacctcctctcaagaccgctctggcagaggaataagccctgggagattgggagcactgccaacattttgaatgttttttctccttaactttaaaaagatggtatagagttcttaaacttttattttttttccaacttttgaaagtcaacttcatgaaggtataa

SEQ ID NO: 4300 - DNA, 735 bp, Macaca Fascicularis
  misc_feature (1)...(735): n = A,T,C or G
tattttagtagagacgggatttcaccgtgttggccaggctggtctcnnnnnnnnnnnnnnnnnnnnnnnnnnnnnnnnnnnnnnnnnnnnnnnnnnnnnnnnnnnnnnnnnnnnncacgaccggccctcatttagcaaagttttaaacataaaaggtgcttgttagaggatatcagtgcctggcccacatgagatagaacagatccatacacactttgaaaaactatgttcacttttaggaaatataattttgaaaaatcatttacataccagaggtccactgggccattgcttttaatggcaaaatattggaatgtacttgaatgtccttcacataagataaataagataaattttagtatgtgcatgtactggaatactatatagccagtaaacaaattgacagtgaagctctctttataccagtaaagaatggtcttgaagagatattgtaaaatgaaaaaacaaaacaaaaaaaacaagttgtaaagcaatgtagattatcttatcaccaatgaaaaaatgcaattattatatacaagcatgcaaatatatctctggaaagattaatgaaaannnnnnnnnnnnnnnnnnnnnnnggaagaaccaggtgaatgtagaggttgaaggaccacatactcttcactttaaactcttgaattttgtaaggaaatcttattttacctattcagaaataaataagaaaatgtaagagacaatgctaataatgataac

SEQ ID NO: 4301 - DNA, 743 bp, Macaca Fascicularis
  misc_feature (1)...(743): n = A,T,C or G
gctccagagannnnnnntnnnatgagtctagtcacgaaggacaaaaaaaccagaggactataccacggagatcaaagtcannnnnnnnnnnnnnnnnnnnnggggcaggctgtacaggagaggaacagtggagggacaggccatggaaaacaggaccacctggctagaccctgaagcctggagaggatcaagttccaaaggggaatgctatgaaagggcagtgagacaagaccttaccctacctccctgaccagctctgcctcctgctcctgccccnnnnnnntggtggctagtaggaccaagagaagctggagtagagagctggcatgagtatagggaagcaggaaggacacgctttcaatgcctgtggctcaatccaaatttgtnnnnnnnnnnnnnnnnnnannnnnnnnnnnnnnnnnnnnnnnnnnnnnnnnnnnnnnnnnnnnnnnnnnnnnnnnnnnnnnnnnnnnnnnnnnnnnnnnnnnnnnnnnnnnnnnnnnnnnnnnnnnnnnnnnnnnnnnnnnnnnnnnnnnnnnnnnnnnnnnnnnnnnnnnnnnnnnnnnnnnnnnnnnnnnnnnnnnnnnnnnnnnnnnnnnnnnnnnnnnnnnnnnnnnnnnnnnnnnnnnnnnnnnnnnnnnnnnnnnnnnnnnnnnnnnnnnnnnnnnnnnnnatggtctcaaaaaaacaaaacaaatttgtggctaaggagttacctaggggaagtggaatgggagacctgt

SEQ ID NO: 4302 - DNA, 2591 bp, Macaca Fascicularis
  misc_feature (1)...(2591): n = A,T,C or G
gatgcaacccaggtactgtgccatacagaggcagcgcgtcgactgtgccagagccggcttcgcggggaagctttaccggcatcttgaaggatatgtagaggcttcagttacttcctaaattcatgaattaagagaaacgtggtgctgtcctttgggattgtgtgtggtgttacgatacgtcttcaatgaactggggaagcaaagagtccaggcctggcctgggctccgtctgcagctgtctgtgatttaggagcatcttccagcaacacagggaagagagtacagtgaggctcagagcatggacggaagggattgatggaggcatgctggctttgcctcagagcgtggagggaagggattgatggaggcaccctggctttgtctcagagcgtggacagaagggattgatggaggtgctctggctttgcactttgggaagaacacagcacaacgctcccacccagcctcgctggagaaacagcccgtgccccaggctctttccaggcaaccccaggctctttccaggcagccccacagcaggtcatctcaaaccactgggctgttgtctcttctggagcctgactcagtgctcctgcctcggaaagcttcctctgggctcccaagtcactccaaattggagggcccagtagggagttggggaaggggaagttgcctttcttctctagccccactttgccctggtttcttcctccctatctctgcacattttccctgtggttggttgttggccagtctcactgcaccaaaactacttactctattgatccccaaagtgactttcccagactctcccatcctccttcagatggtcgcctccctcctctgtcacctgctccctcttcctctcctctttcttctttgctgaagcccttccttgctctcactgcctaatccattcctgaccctgccaccctgcgtctccaggagcctgtccctgtgctctcctctggtgcccttctctccagggagtgtcctcacctgcactctaaagtcacctctatgtgcaagactgtcaaaagcagtttgtcacctgatttcctgcctcagtgcttggctgtcacttccagtgcctaatggttgtttcatagagacagccaccttgttaacagctcagatgtgctcagaattaaattccatgtcctcttcactctaaaattggtctgtcactgtgcctggttcacagccctggggcttcccgactccctgctgcattccccactcaaccccctgtcagtttagacttcctaagacaaagcccatcatatcttcacctgcaaagggctttgcaggggtgggggattagaggcagaggaacagaaggctttgccagtgggagcagaggagggcgtggggagtcagttcttggggaggaagtgctgaaggaggcccctgagcagtctctgtttatgtttgtttgtttatttttgnnnnnnnnnnnnnnnnnnnnnnnnnnnnnnnnnnnnnnnnnnnnnnnnnnnnnnnnnnnnnnnnnnnnnnnnnnnnnnnnnnnnnnnnnnnnnnnnnnnnnnnnnnnnnnnnnnnnnnnnnnnnnnnnnnnnnnnnnnnnnnnnnnnnnnnnnnnnnnnnnnnnnnnnnnnnnnnnnnnnnnnnnnnnnnnnnnnnnnnnnnnnnnnnnnnnnnnnnnnnnnnnnnnnnnnnnnnnnnnnnnnnnnnnnnnnnnnnnnnnnnnnntcctggccttctctttatgtttgaggctgcaccttctctcaggatcttagtgtctcagtgagccctggtgcttctgcctagagccaagaactcatgggaggcggcaggacttcagggagcacagacttccttccttccttccttccttccttccttccttccttccttccttccttccttccttccttccttgcttctttccttccttccttccttgcttccttccttccttccttcttccttccttccccttccttccttccttctctccttccttctttccttccttcccagttttattaaggtataattgggataaaataaactgcatgtatttaaagtgcacgatttgaaacacttttcttgttgtttttgtgatttttttcaaatgtgctatttatgggcattcagctagtttcaagttcggggccatgatgcatagtgtgctgtgaacattttagaccatgcctttggtgggcatctggtatcctccttagcagcttttgaaaggatccccatttcctttatctggagaaaaacatgtgctgtacatcaagctgatatggtttgcctgtgttctcatccaaatctcatttgaattgtagctcccataattcccaccaggagggacccagtgggaggtaattgaataatggggggagggtttccatactgttcttgtgacagtgaataagtctcatgagatctgatggttttataaaggggagttcccctgcacaagctctcttgcctgccgccatttaagacgtgactttgctcctcatttgcttccaccatgattgtgaggcctccccagccatgtggaactgtgagtccattaaacctctttcatttataaattaaaaaaaaaaaaaaaa

SEQ ID NO: 4303 - DNA, 706 bp, Macaca Fascicularis
  misc_feature (1)...(706): n = A,T,C or G
gatttgctcattaaagactgatttccttcccaagccgccatgaataaaatgggggagtagaaacgcctggaagcaccacacctggccctgggccctgggccctgggcccactgtgtcnttggcctccccgccacccgcacggctggtcacatttgtcactgggcattcagctcagtgtcagaggccgactcagcccccagttcagagtagtcacctggttacactgaagtcctcaccttcttttctctctttttttaaagaacacttctctttttgaaagattctcgtttgtttttttgtttaccttttttctgtggatttgctgccattagaatagcaactcgaggagaacagcaagtgagtcatccctgccttgtccactccctgtccggccagcagtgggcacagccctgccgacaggagcaagggcttctgggaatagacccactggagccgggagagggagaagctggattctgaccccaccacggaaactcctgtgtccagccatgcctgatgaccaccccaccctcagacggcgggattaaaccagtcactacaggctcactcagggaagccagactgctggggttccctgacactttagccagaataatccaggtgtatggatacacagataatctgaaggagtttctcatttttatatttgtggaacatcgtgtaagaaaaaccaaagagcaagtgc

SEQ ID NO: 4304 - DNA, 1175 bp, Macaca Fascicularis
atgttttttaaaggctcactcaggatgttgggttcacaatgaaactgtagaggaaacagctaaagaagatgactagtgcattaagaggcaagcatggtagcttgcccggggagaagtgggagaagagatgagattctgaatgtattttcaacctagacccaataagacttgctgacagagtcagtgtggaataagaaggaggagtcaaggatggctctaagaagaatggcctgaacaaccggaagcgctaaatgatgggggaagaactgtgggatgagctgtctagtgggaagaaaacagagtttgtttatagagttgtcaatttgagagtcttcttagacatctccatcgccttgttaaaagtggaaatgttgagtgggcatttggatatacacgtctgaagttagagagaaagattcatgctgaacttaccagtgtaaagatggtatttcataccatgagatgggatgagatcagcaaagtgtaatataaactgaaaagagaatgggtctcaggactgagtgcctgaggcatttctgcactgaaggggagaccaggaggactcagcagaggagactgagaagggaacagccaatgaaagggggagaaccaggagtgcctgtgtcccaggattcaagtgcaagactgcttttctgtcttgcatgtttgcagacactgttccccattcctgggatgctcctgcttctctgcctcacctatataatccctgtgcattgtttatgtctaactcaagtgtcatctcctctaccagagcatttctcagaaactcatctccaacattgctctggattaggtgcctattctctgtaattgcacaaggctttgtgtttagctctgttaaaacatgctttccagcggcttcctagatatttatacttcctaaactctaaggccctaaagcaagacgaattgttcatttctatatccctagtgctaacccagactaagtgctaaataaatgttgcctaaataaagtgaccttagcacagagtactgaggttaactttttcccttatagatcacatccactggactgtgaactttctggaaactctttttgcttctgtattcttagtctagggcagaggtacatggaagatgctcaataaatgcttgttgagacaaaaaaaaaaaaaaaaaaaaaaaaaaaaaaa

SEQ ID NO: 4305 - DNA, 754 bp, Macaca Fascicularis
  misc_feature (1)...(754): n = A,T,C or G
gtccaccctgtatccagccacannnnnnnannncaggggctcatactccagaaatactccatatattttacaagcataaagaaagatgtatgtatacatgtatgtgtataaaattatttatgcccaaatagttacatattatactcagctctttaaaaatatccattaaaagtattatattcttattggcttcatagtattctcttgtaaggatgcaccattatttagtctccttaaagttgtttccaatctcttgttattgaggactgaatatacttgcactcatatcatttcatatatgtgtaaatatatctgtaggataaattcctagaagtggaagtccaaattatacgtatattttaaattcttgtggatatatcagtccatttacattcctcccaaccatcaataaaactgtaaaaacttaaaatttacttaataagacctagtatttggaagcgtaatagggtgactatagtcaaaacaatgtaattgtacagttttttctccatcttagactgagaatttgtacatttttaaataactaaaagaatttgtacatttttaaataacnnnnnnnnnnnnnnnnnnnnnnnnnnnnnnnnnnnnnnnnnnnnnnnnnnncttgaggggatggataccccattttccatgatgtgattattattgcactgtatacctgtatcaaaatacctcatgtactccatatataaataaatatatatctatctactatatagccacaaaaataaaa

SEQ ID NO: 4306 - DNA, 131 bp, Macaca Fascicularis
tcacacacgctcttttttctgcgcggatatctcttcccctctctacatggccagtctcgtttattatcaggcgtagtgttggatatcacatcttctgggaagtgttcccttcccctctaacataggccctc

SEQ ID NO: 4307 - DNA, 522 bp, Macaca Fascicularis
aaaaaaaaaaaaaaaaaaaaaaaaaaaaaaaaaaaaaaaaaaaaaaaaaaaaaaaaaaaaaaaaaaaaaaaaaaaaaaaaaaaaaaaaaaaaaaaaaaaaaaaaaaaaaaaaaaaaaaaaaaaaaaaaaaaaaaaaaaaaaaaaaaaaaaaaaaaaaaaaaaaaaaaaaaaaaaaaaaaaaaaaaaaaaaaaaaaaaaaaaaaaaaaaaaaaaaaaaaaaaaaaaaaaaaaaaaaaaaaaaaaaaaaaaaaaaaaaaaaaaaaaaaaaaaaaaaaaaaaaaaaaaaaaaaaaaaaaaaaaaaaaaaaaaaaaaaaaaaaaaaaaaaaaaaaaaaaaaaaaaaaaaaaaaaaaaaaaaaaaaaaaaaaaaaaaaaaaaaaaaaaaaaaaaaaaaaaaaaaaaaaaaaaaaaaaaaaaacctttccccacacctccccatgatgcttgccccagcatcttgatgggagcgtcgacccccgagcccagagaagctgaagcccgccaaaaacaggagcaaatggcg

SEQ ID NO: 4308 - DNA, 707 bp, Macaca Fascicularis
  misc_feature (1)...(707): n = A,T,C or G
gataaaactgagcagnngnnnnnggaatanttcatgaaacaaatgaatgatgcacatnnnnnnnnnnnnnnnnnnnnnnnnnnttggatcttccacacaattaaacagcatgcattgaactgaaaagataactgagaaaatgaaagctcactctctgnnnnnnnnnnnncactgttaataactatnnnnnnnnnnnnnnnnnnnnnnnnnnnnnnnnacaatccatgaacagcattagaatttacagcaagaacagaaataaaatactatataatttaatgtaaacnnnnnnnnnnnnnnntagcacttaaactagttcatttcacaattaagctttagaataatgcgcaatttcatgttatgccttaagtccnnnnnnnnnnnnnnnnnagattgtttgtatctttttttaaaaaacaaaacaaaacaaaaatccccaaaatatatagaaatgatggagaaggaaaaatgatgtttttttttgtcttgcaaatgttctatgttttgaaatgtggacacaacaaaagctgttattgttttaggtgtaagtaaactggagtttatgttaaattacattaagattggaaaagaatgaaaatttcttatttttccattgctgttcaatttatagtttgagtgggtttttgactccttgtttaatgaagaaaaatgcttggggtggaagggactcttgagatttcaccaga

SEQ ID NO: 4309 - DNA, 789 bp, Macaca Fascicularis
  misc_feature (1)...(789): n = A,T,C or G
gcatacannnnnnnnnnnnnnnnnnnnnnnnnnnnnnnnnnnnnnnggcatgctcagtgagtgattgaggaggaaagagtaaatannnnnnnnncaaaagtgtgtgcagcatttgggaaagccagaaagggctggcacagggactggcagcactcaggcggtgtgaccagcctagacctgaagatgcaagcagaggagggttagtggaagcagacaggggagctgagaggtgcgtctcatgacagacaagtagacaggaggnnnnnnnnnnnnnnnnngggaggcttctgcaagcaggannnnnnnnnnnnnnnnnnnnnaccagagccaggcaggtgaggtgagtaaggcactcacctcgggcacaaaattaaaggaagccccaagtaactcaggaataaggcatgaatttttatttattgtattaataaattgatcctaagtattcataaggaacaaagtattaaattttaaaataaaggaagatcagtagtagcaccctgtacagctgtattggagcctaaaagccaaagaaggctggacacannnnnnnnnnnnnnnnnnnnnnnnnnnnnnnnnnnnnnnnnnnnnnnnnnnnnnnnnnnnnnnnnnnnngagaccagcctcgccaaacatggtgaaacccnnnnnnnnnnnnnnnnnnnnnnnnnnnnnnnnnnnnnnncacacacctgtgatcccagctacttgggaagctgaggcaggataattgcttgaacctgggaggtggaggttgcagtgaactgagatcgcaccattgcactccag

SEQ ID NO: 4310 - DNA, 1046 bp, Macaca Fascicularis
  misc_feature (1)...(1046): n = A,T,C or G
gtagggggagcaaatcgtgccttgtcattttatttggaggtttcctgcctccttcccgagnnnnnnnnnnnnnnnnnnnagaggaggaggggagcaggcccgtggcaggaggagggctcagggagctgagatcccgacaagccaaccggccccagccgctcctccgcgcctgtccttagaaatggggggaaacatagggacttggggcttnnnnnnnnnnnnnnnncccctagttctacatgaaggtggagggnnnagttccacgcctctcccacctccctccgcacacaccccaccnnnnnnngctataggctgggctttcccttggggcggaactcactgagatgggagtcaccaggtgaccagngggagcccccaccacgagttagaccagaaagctaggtcgtgagtcagctctgaggatgtatacccctggtgggagatggagacctagagnnnnnnnnnngggcgggcttggggggtgaagggccactgggaccctcagccttgtttgtactgtnnnnnnnnnnnnnnnnnnnnnnnnnnnaagcacgatcagtccatcccagagggaccggagttatgacaagctttccaaatnnnnnnnnnnnnnnnncgatatcaacacttgtatctggcctctgtgccccannnnnnnnnngtgcaatgtgaatgtgcgcgtctctgctaaaccaccattttatttggtttttgttttgttttggttttgnnaggatacttgccaaaatgagactctccatcggcagctgggggaagggtctgagactctctttccttttggttttgggattacttttgatcctgggnnnnnnnnnnnnnnnnnnnnnnnnnnnnnngccctcagctttccccggcccctccggcctgggctgcccacaaggcttgtcccccagaggccctggctcctggtcgggaagggaggtggcctctcgccaacacatcactggggctgggagcagggaaagacggcttggttctcttcttttggggagaacgtagagtctcaccgtagatgttttatgtat

SEQ ID NO: 4311 - DNA, 660 bp, Macaca Fascicularis
tgtcacctgccattccagaactggaccgcagaaaagtgctgaggatgctggccagcggacgctgctcagtcattggtggttctgtctttccctgacccttgtgtgctggaggacagaggaaccgcctcttctcactgttgatactctgttcctaagacctcgggttacccagtgcagcctgctgtgacccttctgcttcattttctgccaagtgatacagaaccttcattctgctgcttttggggcaggtgattctaccccaccttagggccagtgctctgtgccaccctggagaaacaggaaaaatataggggtggctcagtggagcagccctgtgaaagtcaaggccagagcttttctttttaaattttattattattattattattattattttgagatggagtctcactctgtcgtccaggctagagtgcagtggcgcaatctcgtctcactgcaacctccacctcccaggttcaagcgattcccctgcctcagcctcctgagtagctgggactacaggagtgcgctaccacacccgtctctactaaaaatacaaaaaaattagctgggcgtggtggcaggcgcttgtagtcccagctgcttgggaggctaaggcaggagaatggcatgagcctgggaggcggagattgcagtgag

SEQ ID NO: 4312 - DNA, 731 bp, Macaca Fascicularis
  misc_feature (1)...(731): n = A,T,C or G
gaaaaaaagtgcaggacactccatttnnnnntggaacnnnnnnnnnnnnnnnnngccaccacnnnnnnnnnnnnnnnnnnaggaaataccagtatagcaaaatctccatgtcacattttaaagctcacacaatggctcaaagagaaccaacatcaaaaacccgaattcctagctcaggtgagatcactgaagttgcctgtgaggtttcgtggaactnnnnnnnnnnnnnnnnnnnnnnnnnnnnnnnnnnnnncagttgctcctgcatcttggggcnnnnnnnnnggaccctctcccttcaacagcacgtcnnnnnnnnnnnnnnnnnnnnnnnnnnagactctccttggactcctgaggtttttacacttacttgctgactctgtnnnnnnnnnnnnnntcattaaacatcttataatgatgtaatttcnnnnnnnnnnnnnnnnngaannnnnnnnnnnnnnnnnnnnnnnnaacaagggactagtgatctgcactgtcatcccgctccgtggtgctcagatgtaatgaaatcatgaggcaacaaacctatggctaggtaaacagagaactccnnnnnnnnnnnnnnnnnnnatgttccttcttgcctggtaatgttctagctttaccccagccttaatcttttaaaatgtatattttcnnctggtgttgattttaaaataattaatatgtatttattacactgggtttgtgcagtaagccacctcgaa

SEQ ID NO: 4313 - DNA, 105 bp, Macaca Fascicularis
  misc_feature (1)...(105): n = A,T,C or G
aggctgtgatcctcgtgcnnnntgaggcacttccctcctaagtcaaagaccatcctcattgactgtgtgccaatgcctcgtttcaggcttgtgactcaacaaagg

SEQ ID NO: 4314 - DNA, 1074 bp, Macaca Fascicularis
atgtggttcttgacagctctgctcctttgggttccagttgatgggcaagtggataccacaaaggcagtgatcactttgcagcctccatgggtcagcgtgttccaagaggaaactgtaaccttacagtgtgaggtgccccgtctgcctgggagcagctccacacagtggtttctcaatggcacagccactcagacctcgactcccagctacagaatcacctctgccagtgtcaaggacagtggtgaatacaggtgccagagaggtccctcagggcgaagtgaccccatacagctggaaatccacagagactggctactactgcaggtatccagcagagtcttcacagaaggagaacctctggccttgaggtgtcatgcatggaaggataagctggtgtacaatgtgctttactatcaaaatggcaaagcctttaagtttttctaccggaattctcaactcaccattctgaaaaccaacataagtcacaacggcgcctaccactgctcaggcatgggaaagcatcgctacacatcagcaggagtatctgtcactgtgaaagagctatttccagctccagtgctgaatgcatccgtgacatccccgctcctggaggggaatctggtcaccctgagctgtgaaacaaagttgcttctgcagaggcctggtttgcagctttacttctccttctacatgggcagcaagaccctgcgaggcaggaacacgtcctctgaataccaaatactaactgctagaagagaagactctgggttttactggtgcgaggccaccacagaagacggaaatgtccttaagcgcagccctgagttggagcttcaagtgcttggcctccagttaccaactcctgtctggcttcatgtccttttctatctggtagtgggaataatgtttttagtgaacactgttctctgggtgacaatacgtaaagaactgaaaagaaagaaaaagtggaatttagaaatatctttggattctgctcatgagaagaaggtaacttccagccttcaagaagacagacatttagaagaagagctgaagagtcaggaacaagaataa

SEQ ID NO: 4315 - DNA, 365 bp, Macaca Fascicularis
  misc_feature (1)...(365): n = A,T,C or G
ctctcatcaagggaaaagtacttcttctgagagagcgagtgcaccacgccccccgtggcggcacgcgagagagacacgcccccggcacgacgtggtatgtgtgtgaagcactgcagagagcnnnnnnnnnnnnnnnnnnnnataagaacactttactgcgcgcagctctgagtcttgccccacactctgggcacgaggtaagaggtgtctttattcagttcatcgtgaagaggcggctgcgggaggggtgggcacatctctgtgtgcacggtgtgnnnnnnnnnnnnnnncatggtcagtcagttccacagatatgaaagattactgtctgtgtgtgtctnnnnnnnnnnnnnnntagcggtggc

SEQ ID NO: 4316 - DNA, 752 bp, Macaca Fascicularis
  misc_feature (1)...(752): n = A,T,C or G
tttttagcatgtgttaaattgtgctttaaaagacttataaagagttgggaaacatttcaggagatgatcatagcctgtaaaagtatcagattagaacatacggatttaccatgaagttctgtcttcaacacccattctaaagggctactgtcccaaatcctgtgtgtcccttcggcttgtcgatcacccaatggaaatggacactcgtaaagtttacaccgctgtacttggcgttaaatcttgttgaatttgtggtaagctgttatcatttctacattttgtagaatgattttggtctgcagcaacattcgatctcacttctcacacccctttccttccacttgaaatgcaatgtagacagaggccccgtggtgaaagttgcaatattaagtttacctttagaagatcccttctcaaactcggaaccctggcagtgttaccttaaacaagaatgagctcgggaaaaaagtaacacagttacagagaggcaaatcgagttatttccctcattaaaagtttcccagattctaggaattgcagtatcttgtaacctaaaaattttccagttgactccttttattgtctgttgatgactttaataaaggtcatttaagggcgtaagtttttaaagactcccaaagtgagacttaaccattttcgnnnnnnnnnnnnnnnnnnnncagtttatgttgtgtgctgaattactatgccatgtgctattttagtgtttggggaaaatgaaaaataaaatt

SEQ ID NO: 4317 - DNA, 709 bp, Macaca Fascicularis
cgctcttaactaaagatttctattgcatcacattttctttaagatccatatttttaattttttatctggcattttgaggaattctttgttattgggatctactgctggacaattgttatgatctttcatgtggtgtcatatcttcctgctttttcatggtgactgtgtccttctgttgatatctacacattgggtgtagcagccaagtcacttgttccagtttgttaaaattgcttttgtaggggataattttttcctgaggatgtacgttgttaagacactttgatttggggcactgtgataggaacaggaggcaggaaaattctaggcacaaaagggcagggtccctggtaagagacccaccctcaaggctggaaccacggcccatggggggaactttacatccctgttttcttgctcaaatgttgccttttccaaaaccactcctggcctgccccgtcacccctgcccctgtcctgtaccgataaaatcccgaggctccactggcagagagcagagaagggaagaagaggagaagcagctggacatcggagactacagatgaacttcagagagaagcaacttgacttcagagggatggcttgatggcatagctttggagaggagcccagctggggacggccagacttcgggggaaatataccttcctgtttcatcccctttccagctcccctttccactgagacca

SEQ ID NO: 4318 - DNA, 776 bp, Macaca Fascicularis
  misc_feature (1)...(776): n = A,T,C or G
gcagcaatgacaaggtgtcagatgtnnaaagatcatggaaaactgtaattcagccctcctattgctcccattagctagaaaaaagtagaagactgttggatacaagcagcaaatcagaccaaaatggaagatggctggaaatttactttacttagatgtccagaaagaagagaaataattgacctaaaatctaacctttgacacatgccctgtggatgccaattaacccagcatctgcagagaagtttgaaatgctctctactggagagtagagaaaatatgagatggacttatattataggctcattcgctgaagtaccagaaagatcttgtgataaacgagggttcactgttacaataaccatgaaaatgtatccctagtaaagtagcatacagtgtctattcagatgatattcttgattggtaactggttgttcaactgttattgaaaacatgcctacacagtaaaatacctgaagatgtaagtgctttttattcaatgaaataataatttgatgataagaagtgtgtacaaatgatagggcacatggaatttagctgacttgcaaacacctggctttgactgcatgtgtaggaatcaccttctatcctgtacttggtcccctattcagacagctgctgccaggtgactccatccctccactctagtcatttcttcatccttttccccaagactgacaaaagctggtgaggagaagcaaataagattgttagcagatggctctgtgtgtaatacagtgccttgtacataatag

SEQ ID NO: 4319 - DNA, 990 bp, Macaca Fascicularis
  misc_feature (1)...(990): n = A,T,C or G
caattcagttgtcagacataatgattattgaagggcttgttttantgnnnnnnnnnnnnnnnncaaaaattctggttaaaagcttccaaacgggtaacagaccatgggagagatatgtggttgggtaatgcaaatgtagttacacaaagaaaatacagatagctccagacctgaggacttttttatagggcaattgttgtgttggtggcacattggatatttctaacatgtacaaagctatgtattttgatttactttcatttcttgctatgtatacgtacttttcttaaaatgccaagaactttctcttgctatcattgctccttttgaaacaattcaattttcatgtctacagcttacagctgactgttttgttaaagattgagtcattgacattcaagatttaagtctgaggtagtcaatcctcgacaaaaaacaaacaaacaaaaaaatggcttatctgaaatcagtactgtggaaatgaagtatatgatctattatgaataatgtccaatataagaatatgcttctggaattgagttctacttttaagtaccaatgatatttaaatttttcagaaatgtaatggtgtgtcattgccttgaagtgcttgcttagggcttcttttatgttatcttaaaatgtgctggtgaatttttcattttttacatccatttcatatgtaagagacaaaatctagattggtcttgatactgagataataaaaagtaagtagcattaagaaagatgacaatcttcatttnnnnnnnnnnnnnnntgaaacaatttaggggaatgaggggcaaaaggggagaaatgatgttgctaaagaacatgagcacaaaaatgaatgcatttcagtgtttaagaaggtttgaaaaagaatgtcacttttttatttaactgataaggtttttgttattttttactttgatgagtaaaccaaaaaatatttgcatttcaaaaaaaaaaaaaaaaaaaaaaaaaagg

SEQ ID NO: 4320 - DNA, 776 bp, Macaca Fascicularis
  misc_feature (1)...(776): n = A,T,C or G
acggaaacaaagagactgaagaatagccagccacatgcttaagcaaacaggaccacggctaaattannnnnnnnnnncncagctattctgctgcaaaggccgacctcgggtgctgcccaccaggctccagtgagggttaatgcactccgccagacccgaaggaaaagagggcagggnnnnnnnnnnnnnnnnnnnnnnnnnnnnnnnnnnnnnnnnnnncttctggccagtgaaatacaaagatggagaaaaaaaaagacttggtatgaaatgggagctcaaaaatcaacgtgaacagatggcactttttaggactcaaattggacacaatttactctagttgcaaaatccnnnnnnnnnnnnnnnttgtgaattagattcccatgaaagcacnnnnnnnnnnnnnnnnngaataatttcaccttagcaacttgccttctgtcttgagaaggcaagtaggtttgtaatggcagacgttcattttacgaacaacctgactggccgggcacgnnnnnnnnnnnnnnnnnnnnnnnnnnnnnnnnnnnnnnnnnnnnnnnnnnnnnnnnnnnnnnnnnnnnnnnnnnnnnnnnnnnnnnnnnnnnnnnnnnnnnnnnnnnnnnnnnnnnnnnnnnnnnnnnnnnnnnnnnnnnnnnnnnnnnnnnnnnnnnnnnnnnnnnnnnnnnnnnnnnnnnnnnnnnnnnnnnnnnaggcagaggttgcagtgagctgagattgtgccattgtactctagcctgggcaaaaagcaagactcctct

SEQ ID NO: 4321 - DNA, 294 bp, Macaca Fascicularis
tagcaaagttaagtgtattaatcctgggatcaataacagtactaggcagtgaatgtgtcagatggaattccaaagtagtatccattatatatgctttctagccactttgcagatgtgaaggggctccagttgtgatgattgccatcccatcaggttgggttgactggataactggttgtttattcattattttgtcttgtttctctccccatactgtcaaaggtaagattcttcccacagagggatgaccgctatccacttgagaagtaaataagagcatccattgggtcttac

SEQ ID NO: 4322 - DNA, 728 bp, Macaca Fascicularis
cttgtctcattacaaaccagcgtctttactgaagttccttctgctgcagagctgtgtgatggacacgtggacagagctgggtggcacgtggaggctctcctggcttccgagcaggaaacgtgctgtgagcaggaatctcgagtgagttccgtggcgtccctgcgtcagcacacgccgggtcctcagtctcgagtgagttccgcggcgtccccgggtcagcacgtgcggggtcctcagtctcgctggctcaccagtggtggccggggcatgcctcccccagccctgagtctcctggcagtggtggccggggcatgcctcccccagccctgagtctcccggcagtgcaggcagtgtgggcacggggtttgtcacagcctgaacgtcacgtggaaggagtcgcctctggaaaactctggagagggtctctcccaccaacaggcatcttggcatttggtccctcagtgactctgtaactgtcacctagccaatgacatcctgcttataccaactcaattaaaaaaaaaatcagatgtcaaattgcagtcaacactactctcgtctaaaaacaaacacaaactaactgcctggcaaggatttctaagctcaatgggtagttcccttgatgttcattccacccaacacccccccgccccaaccacgaaaaaagccaccgcgcatagccagtccttccagttcatcctcacacagagcatgacgtgcatgggcag

SEQ ID NO: 4323 - DNA, 738 bp, Macaca Fascicularis
  misc_feature (1)...(738): n = A,T,C or G
gccatttcaagttggtagttgggatanctgctgtctgggatggcatcagttgggcagtcatccttttggaagagaagtgtgcttttgaatggaagattcaaagccagtctttgttaaactgcagggtgtactctcaaagaccaaaactattggcctcttttgtnnnnnnnnnnnnnnnnnnnaacttgtatctttttttataccagcaacactacaaaggagaagttactcatttcaaaatggatgaattgttattggtgaagagaatctgagtttatggtctgtgccataaactttcagtgtaataagacttattcaatacatcttccaannnnnnnnnnnnnnnnnnnnnnnnnnnnnnnnnnnnnnnnnnnnnnnnnnnnnnnnnnnnnnnnnnnnnnnnnnnnnnnnnnnnnnnnnnnnnnnnnnaaagtaataaataattttaggagaattcgagaagtttacagaattacttattcattgttttcttagtaagtcagtttaatgtttatttttctcattattnnnnnnnnnnaataaagaataagggtgtttgagctcaccnnnnnnnnnnnnnnncagttttaaaacattattttgcctaaaattagcattgtgatgctttctaaaagaaatattttataaaccctgtttcacagcagaatttctgaatctgtatagagactactacaaacttggacaaagattggnnnnnntttgtaaagaatttgtgaa

SEQ ID NO: 4324 - DNA, 743 bp, Macaca Fascicularis
  misc_feature (1)...(743): n = A,T,C or G
catgatatnnnnnctggatcttatgtagtggaagttgtatctccagcttacagatttgatcnnnnnnnnnnnnnnnncacttcgaaaggaaaaatgagagcaagatatgtgaatcacatcaaaacatcagnnnnnnnnnnnnnnnnnnnnnnnnnnnnnnnnnnnnnnnnaggtccaccttcttactttattaaaagggaatcgtggggctggacagactttctaatgaaccnnnnnnnnnnnnnnnnnnttcttcctttattgatatttgtgcttctgcctaaagtggtcaacacaagtgatcctgacatgnnnnnnnnnnnnnnnnnnnnnnnnnnnnnnnnnnnnnnnnnnnnnnnnnnnnnnnnnnnnnnnnnnnnnnnnnnnnnnnnnnnnnnnnnnnnnnnnnnnnnnnnnnnnnnnnnnnnnnnnnnnnnnnnnnnnnnnnnnnnnnnctgcaaaaggaggtagtcaggccgtccagagctggcatttgcacaaacacagcaacactgggtggcatccaagtcttggcaaaccgtgtgaaacaactactgtaaacttgagtcatcgcgaacgttgatctcttacaactgtatatgttaactttttagcacatgttttgtacttggtacacgagaaaacccagctttcatcttttgtctgtatgaggtcaatattgatgtcactgaattaattacagtgtcctatagaaaatgccattaataaattatatgaactac

SEQ ID NO: 4325 - DNA, 2072 bp, Macaca Fascicularis
tatggggttgttacttggtggcaagcactgttccaggcacgggggctacagtgatgaatgtgacagttacattcctgacctcatgaaacttgcattctacagagaggaggcaggaaatacaaataataaaataatattagataataagtggtgtggaaaagaatatcaaggaagtgggccggagagccactagggtgcttcctcaaataaggtggtcagggaagacttctccgatgaggggacactgtcagaagctgctaatgtttgttgcatgagaattcccctagtgtcccattccaaccaactctcttctgacccgctgttaaggtctggtgttggccatcgtattgattttatttttcaggcctcatttaggcagcatgcagcttgtctgctaataacagctcatctttgggagaaaatgctgatgcagactggatctttaatatatgcctcctattaggatctaatgacgttgtgcctccctagtcagcagaccgaggtgcccctggtcccaagtggagggatacttgaggttacatgagacttctggtttacattgatagagcggtgacactcatccagagttttgaggttctttgttgaagctttgattctaactttactgagtccttttaaatgaggacttcacgtttgcacaaatgtgcatgccagtgctgctagctaggcatgcacattattaatgctaagtaatgaactcatatgtgttctgtctgtactttggttttgcattaaacactggttttgctgcagctctccaattcaacagccattaaactagtgttttaatggactaatagaagagtgactctttgtcaccttctcaaaagtttctttggtccatactttcagaaaacctgacacagtgtgtctcatcttggaggttcagaagacacattcatgttttctaacttgttacagattttgaggtaagacaaaccgacttaactctctttaacgtgcattctcaaactcagttggcctcaaggccactctctggggcataatacccaataggtgttctaggcctatgtgtgaaaatactcctgggacctgcctctcccaacatggaaatgtaagattcagagaaagccacacgtccttgtggaagtttcatggaacattatcgctcacttacaggcactaatgacttcaataacatagtgaagtttagcataaataggctcatcattaaagttgatggcagaagtataaacaaggcccacactattaaatttgctatttatttgttatgcgtctggaattatcctgctgtctctagctgtctcatactgggtgtttataaacctaagtcgaatgtggtattattttgtttttttgtccaacctagaggaatgaggtgatttttaaacattgcttcttctacaaatgggattacccaagctgggaaggacagtcctcgcatttcccaaggcagcatctgccattctggtcacaaggcctttcagggcacgagggttttacagaaaacaaaaagaaacaactgcaatagatgcgagaagcaggttaagggtcagatgatgtgatgttggcaagacactaagatttgaactgttgtgctgtaagcagagatggtcaaatggcgttatcaactattatctgttagcagaaatggtcatatggcgctatctaccatgaaagggtagctcaaggcaccatgctgtgagggttacaagtgcagagtgggtttgaagccagactggctgggcttgggtgctggtattagctgagtgttttgggcaaagtgcttcatctcttcattcctctataaagtggagctaataggagagttatgaggatgaaatatgtaaatacatgtaaagtgcttaccctgtgcctggcatgtgtgtgtatatatatatatatacacacacacacacattcactcaacactagcttttatataaaacagatgtgcttgaaactgcaggagggtatggagagtcatgcaagatattgattattgctggcacccgagatccagactaaaaacgttagtacttttactaaaagaaaaaaaaaaaaaaaaa

SEQ ID NO: 4326 - DNA, 715 bp, Macaca Fascicularis
  misc_feature (1)...(715): n = A,T,C or G
agttctatgggacaattagatgggtttcataaatgcgatcttaatgagtgtgccacttatcagtgtattactgctcagcttaaaagcgactctgctatttgctctgtgttaacctgctggaccctataagcagttctccttaacagcaagcactttgttaggttttgtcgatagagggtgcaagaaggacactgcaagaagaaaggacttctggctctgattcttccattcatgtgacccccaggcaggagaagcactgaacaatataacaacttctctgtggtggaggtatgaggtacctgcaggcccagatcccctttgccatcaggtgctcccgtcacccttgcctcccagctgctgtgactctgggctgatggactccacagctgccctgttgctggagaactgccctcagccacataggagctgccttggacctgccctgcccaggaggctctgccacattctcatccatctgcccctggtctgatgactgactcacaggaaaggaaaaaaaggccatccccctcttctcaaaggtactgactctgtgtggccatttgtgttccagagcaccttcatgggattgagaggtgacaatgtgctagcagccctcgctctcggtgcctccttggccttggcgtccactctggtggctcttgaggagcccttcagcctgctatggcactgtangagcccctctctgggctggctg

SEQ ID NO: 4327 - DNA, 719 bp, Macaca Fascicularis
  misc_feature (1)...(719): n = A,T,C or G
aaagcaaccaagatgtgcttcagtaagtgaacggataaactgtgttacgtcagaaactgggatattattcagcactaaaaagaactggaccactaagccatgaaaagacacggatcttaaatgcatgttgctaagtgagtcnnnnnnnnnnnnnnnnnnnnnnnnnnnnnnnnnnnnnnnnnnnnnngtctggaaaaggcaaagctgtggagacagtagaatggtcagaggctgccaggggttggggaagggagggatgaatgggaggagcatagggggatgtgtagggtggggaagcaactctggatggggctttcatgggggatccatgccgttccatgtctgtgaaacccacagagtgagcagcagcaggccgagccctcgtgggagctgtggactctgggtggtggtgccgcattgatgcgggtctgtcggtcatacagaagtgtgctgctccggtgggggcaggagaatgatggagactctgcctgtgctgggttgttgggnnnnnnnnnnnnnnnnnnnnnnnnnnnnnnnnnnnnnnnnnnnnnnnnnnnntttttaagagctgatgcttgagctgcttaaaatcacacatggatattgattnnnnnnnnnnnnnnnnnnnnnnnnnnnnnnnnnnnnnnacaccttcaggtagtagagggtctcctggtcgaactccagcggtgagttgcnnnncgacagggccttgaggt

SEQ ID NO: 4328 - DNA, 143 bp, Macaca Fascicularis
ttttatagaaacagtgaaaacatttacggacacccagacaatgacgctgtattaaaggaatggtggaagctgctgtttatgataaaagtcattggtcacaaaatcaccttggattggtgccaagtgttttattgggtaacacc

SEQ ID NO: 4329 - DNA, 2033 bp, Macaca Fascicularis
caaattcgtgctggtggaggacgaggccaagtgcaaagcgaagagcctgagtccggggctcgcctacacgtcgctactctccagcttcctgcgctcctgcccggacctgctgcccgactggccgctggagcgcctgggccgcgtgttccgcagccggcgccagaaagtggagctcaacaaggaggacccgacctacaccgtgtggtacctgggcaacgccgtcaccctgcacgccaagggcgacggctgcaccgacgacgccgtggggaagatctgggctcgctgcgggccgggcgggggcaccaagatgaagctgacgctggggccgcacggcatccgcatgcagccgtgcgagcgcggcaccgccgggggttcggggggccgcaggccggcgcacgcctacctgctgccgcgcatcacctactgcacggcggacgggcaccacccgcgcgtcttcgcctgggtctaccgccaccaggcgcgccacaaggccgtggtgctgcgctgccacgctgtgctgctggcgcgggcgcacaaggcgcgcgccctggcccgcctgctccgccagaccgcgctggcggccttcagcgacttcaagcgcctgcagctgccagagcgatgcgcgccacgtgcgccagtagcatctccgcgcggggggcgccgccgcgtcggtgccccgcgccccgctgcgccgcctgctcaatgccaagtgcgcctaccggccgccgccgagcgagcgcagccgcggggcgccgcgcctcagcagcatccaggaggaggacgaagaggaggaggaggaggacgacgcggaggagcgagagggaggagccccccagcacgagcggccggaggtgctcagcctggcccgggagctgaggacgtgcagcctgcggggcgtcccggcgcccccaccgccggctcagccccgccgctggaaggccggccccagggagcgggcgggccaggcgcgctgagagccgaaggacaggactcgcggccccaggcccggcccgccagactcacagcctccaaccccggccctgcccgcttcggctgccccggcccccggcccgtgtctccccgtggtctccgtgttgtcctccccgccgcctcattttggctcagggtgatgcctgatacgcccttcgttattggggggtgttcatctctccccacacccggagttgcccgggcctgccattgtggacccgccccctatgctttacacccagtctctttgcccacagacctcctcattccctcccaaaacatcctctcaagggaggaagtttccagaaatcaggagggtgggtttggaccctgggcagggtggaggcagtgaccctgcccttggtccctctagctttcttccctatggaaaaaaaaataaatgaccctggagaggcattcgtgtaggggaagaatctagcagtctgggagaattggggctgggccagtggtgggcagagtccactgccatacacaaggaggaattcgcaggcccaagccccgcctctctacgccctggaggactcctgggacttcactgctctgcctctggagaacactgagacagtcccaccgacgttcaaacaacaggttaggccaggtaacagccctgcaccaggccactgcccacacctctgcccaggcacccccgcgggattccttgcccgtcccatctctgcagacggatgtatgtggtcccctcctaggtgccccgcaaccaggaccaagatggggcttccaaaggaggtaaggagaacctttggcaggtgcttggggacactgactacctagaaagtagacacagcagagatactcccaagtcgaggctagtcacagcaggtgggtcctgacagcagcggattctcccagcaggatgaggaaggagggtgtgttaacccaaccaagggagtgggccccccaccccgcccaggtgtcttcgcgagaccacaaaaagcccaaagatctatgtgtcactgatcattgtaaataaagtggacctgctttttcaaaaaaaaaaaaaaaaa

SEQ ID NO: 4330 - DNA, 761 bp, Macaca Fascicularis
  misc_feature (1)...(761): n = A,T,C or G
atagtagccatccacgaagtagttagaggaaagagaggcttcacggtggaaaagcatgaaccaggtggtccaggcaaagctcagtggtggnnnnnnnnnnnnnncatggcgggtgggatgaggagaacagcatccgcgatactcctgccaaagacacctgccctgtatctccccatgtggaagcatcggccccccaagttaggggnnnnnnnnnnnnntgcacctgcctagaatcttcccaaagcctggtgtcgtgagaatcatggnnnnnnnnnnnnnnnnnnnnnnngcagagggaggctgagagccgaccgctttctcacggtgtgcctgtnnnnnnnnnaccctttcgcttcagatataatcggggacagctgaagagacttgaatagggcctgagctgggacagaaggaatgtgttggtttctgattttgatcgcttagttgtttgtggaggaaaatagacttgtttgttggaaattcccgctgaggtgtctgggattaggcatcaggtcagtgactcaccatcagataatccaagggagagagaattattttaaatgtacttgtaacttttctatgactttgtgattattcgaaagttaagtaacacaaataatttgtgttctcatcctaaagctttcttctgtcataaagtagaggattgtttatctgagaattatgaatataatgggattgtttcaaaatactttttaagattacacctgtttttaaaaattgtgtcagcccatattcatgta

SEQ ID NO: 4331 - DNA, 1223 bp, Macaca Fascicularis
  misc_feature (1)...(1223): n = A,T,C or G
taaatgcagtgaannnnnnanagccttcactcagaannnnnnnnnnnnnnnnnnnnagagagttcacactggagagaaaccgtggaagtgctctgaatgtgggaaatcnntctgttggaattcagggcttcgtatacatcgcaagactcataaatgagaaatcggaatgatgcaatgtgagaaactgatgttcaggagactttggataatatagacaggatttacaagcaggaggccctaaaactacactcatgtcaaaaatcagagaggagagagaccaatcatatttgggatgagtgtaaaagctttcagaaataagttgcaaatctttgtagatgaaaatagtggaaggaatgcggagcaataagtgtatcagatgttgtagtatcatcatgaagattcagagnnnnnnnnnnnnnnnnnnnnnataagtccaataaattagggaagcattttcccgttgaaagtgtgttccatggaaagtcacattccagatttgaagctgtgtttttgtaaaataaaatctcattatgaacagttgacttttcatggtggagtataaagttgttttttaaaaaatatnnnnnnnnnnnnnnnnnnnnnnnnnnnnnnnnnnnnnnnnnnnnnnnnnnnnnnnnnnnnnnnatgacttccctaagttaacactgaaaagtatttctaaaatttttagtattttatattttaatgtaacttgttctgtctatctaactatatatatatatatttgatagtttgtggaataatatcccccagtattttccatattaaatgctaattgtcttttcttnnnnnnnnnnagatctggtgtttattacagggctgccgcttaagagaactcattgtaatgaacgtttattatattttgcagttccgtgcctgttgtccattgattgacatgagcacccttgttttctctggagaaatacctcccctctctggggtgcttcctgtggtagtgtctttcaggtatccgttccactagctacaggtgagcattttacccattgttggataatggtaatctctttttcagaattttgagtctgtaattcattcacacgtgaaccagaaaatgtgggaactcattcaatcttgtcccagaattctgttgagaacatccattcattctggctaattgattacaagaataactgtggatactatccctttagaacctgcttctctgatcttctgttgttcct

SEQ ID NO: 4332 - DNA, 2143 bp, Macaca Fascicularis
agcatttgaaactcgacattctcgtgcttcttaaaacacttgcctaacggtaagcaacggcatccaacggtgcccgagggagtcgcgctgctggataagcagctctgcggtggcagaggctgggctgcggtctctccgacatcgcggaacagaggaagagatgaaggccctgcagcccccgccgcccgatttacgcttgaggaagcgaaggcgagagaggtcgtctgcggggccagcccagggccgccggggggcccagccctagagagcagggcccgggctgcggggaccggcggcctgaacggcggagcgttgaaagctcccccagggataggaagtgcagcggaaatcaatgactgaggtcaaggaaggaggggacgcttgagaccgtggaggggaagctggtttctccaggggggaacccgggcctccgcttgctcagcgttccccttgcgaatgtgttgagcacctgttatgtgctgggggtacagagggtctgagcacctccctcacacaggcagaaccctggctcccatgttcaccatgctgagagagaccttcggggaacagcgggaggccagccggggaatgggcccccacttgtccagcatcggaggcagagcctgcgcatgcccgacctcgctcctcgcggctccctgggcagcagctccctggcagttggaactggaaggcttctcagagtccgcgcagccccaccgctctccccactctcgggggtgggcactggggggacagagccagggcagggaggaagacagggcccagctcaccccacagctcagcccatgagggtgcgcagagcagggctggcaggagcgcgccactccacacccagccctgttgaagaaaaagaacagaaacaggaaacagaaacttgtcggttgctgtgtaagtttgccccgcagctgagccccttcaaacaaatgtagctccacagtgtctgtgggtcagacatccaggcccggtgaaggagcctctgcctcagggtccctccccaggcctccgtcaggacccgccggactgtaagcggactgcaggctccgggcggggaggctcagcttctctgctggccccgcggctgtgggcaggattcagttcctcaccggctattagagtgagggcctcgatcttttctgctttttggctggaggcctcactcagttctctgctgcacggacctttccttggcacagctcccgcatagctcagcaagccgcaaaggcaggcccctgcagccaaagggaattccgccctctttctgctgtgttctgttggtgtggcttccgcccaggggaggaggttccacgggacagacaccaggagttgggggcgttgagggccatctcccaggctgcccaccacagcccccacgtggccgcccgtgtctgtgttcttgccactgtccctaccctccgggagtgggtctggtctcatcagggagggcagcgctctcttcactctgtccttactctggtgtttcactgtgattttaaaaactgaaactggaattgttaccccttgacatagctgcacctgagtgggcctctgcgacgcccctccttctcttaagcctttccaagctgtctgacgatttttaagtcccatttcctgagtgacacagagcatcttcagcttctgagtgacttgtgttttcctcagagacaaaggggacccccaatctgtttgtttccagaggccctgatggtgtcgtcttgggagtggaggaacctgagggaaagtcccgggggcgagtcaggggagagctctgccctggcgcccttgcacgtatccacatgggccacagctgcaccctgctctcagcagagcaccttgccatgctcctgggcacagccgggccctctcacctccctgcggctcctaatgcctcccaggctctgccgagtcaccttgggcacttagcgtggctgcagctctttgcggcccggtgtcctgtcatccatgtggcagtcatgtggtgacttttcagtattgccctgcacaaggtccatggggactgggcacctttggccattctttctttggttgtctgtgcaaataataaaccaaatctgaaaaggtaaaaaaaaaaaaaaaaaaaaaaaaaaaaaaaaaaaaaaaaaaa

SEQ ID NO: 4333 - DNA, 1960 bp, Macaca Fascicularis
aatccgtcagaatgcactggatgaaatatcctaaaacctcccaaaacctgaatgcattgcttactagtcactttacagactcaagctaccatcctgttggaaaacttccttttacattcccacaatcctttgccgaataagcctgtgtattttaaagatatcattagataccatctgttttgtcatggtagattttagcgaaatttctgtggtttagatttttctcacgcttcctatttttagttggaaataaagttactgaattagtaaatggtaattgaacactctcaaagaaacatattaaaactcttatttgtccaataataattaccattgtaatgactgggaatgggacagtcattgcttgggaattttttgttaaagaactaactttctaagctacagcgcctcatttgacagcacatcagaaggggaagtgtcaggggttttataaaggtagggagaaaaaaaataataacagattttaactctgaaaagccatttccagtgtctgtagtctattgtgagcatggagaagtagagtttagttgggatagcttcattagagctgcctgccaaagactcccttccacaggatcttgtcgcaccagcaactgagaggagcttgggagagggcttacgtttttaataacgtagctgtcagttcgaaacctggaaatgttgaccctgaaaggtttcttgccaaaattagataccatatttatgctgaattgttaccttttcaatagattgtttgcccttgcagactaccgtattccttatatctagggaagcatgtctatgtttggaacctgcaaataatttttcagtcatcctagagatgctgcagaacatcagtaccacatcttgagtcagaagtcgagggtcatttattcaaaagttggagaaatatcctcttttgttgcttccactctagtggagaatcgggcactggtagttgtgtgggagttaggtgtctctaagatttgttgacccattttgatggcaaggtgtattcacaagtgtgtggaaagggggtgtggatgggacaactgtatctgcctcttgtgcatgccttgggtacttgctttcaccttattttttcccccttttgtataaaattctcaaaattgctcatttggatttgaatatgaaaggagaaatgaaatatctaaagaatgatagtaagtaccttacactgactttattttctgatatcttaaccttctagggcataaaatcttgttattttaatttgcaccggggagaatgtctgagcaaggagacctgaatcaggcgatagcagaggaaggagggactgagcaggagacggctactccagagaacggcattgttaaatcagaaaccaagactagctttgtaggagagaatgagagcctgcacgcttctctttggattggctgaggagtggtgggagcagggggctgatagaaaacatccagacacacacatataagcaagtggccgtgctacctttttagagaataaagaaacagacttttgagtttatatgcaatgccttcattaggtaccaccggcacttacaaaatgtgcggactgaatcccagagaacactggcagaagtatacagtgtatggattgtatcgcttccccaatgtttgtaaatccacagtatttggaaaactgccttcattttccagtgtgggaaaaactcttgctacctgtattacttgatctcagacccatatctgatggttcagtctgtccttaagttaaaggaattttgcttttctaatgttatactatttacctatcagtgtattactgcaacttgaatcactcttttactgttgttggatataaacttatcctgtaccaatgtatttattaacacttgtattttattattgagcatatcaataaaaatattaaaaaataacagattgttttttaccaaaaaaaaaaaaaaaaaaaaaaa

SEQ ID NO: 4334 - DNA, 1688 bp, Macaca Fascicularis
atctcaaatgcaaggccaaacaatgaattattattaatatgatagaggaaactggtactattaatgtcatggaaggagaaagcccattttgagtaggaacagaaggacatttatgaggggaaagttggctgggtagggcaaaactgagtagtagaaaatttaactgtaattattccattgaatttttttagaaggactcttcaaattgttggaagttgcttagtaattagcatagtaaccatttacaaaatacactctgacctagagcagcagggaagggagtcagagagacaaattttgtgcagactgtcagctatagcaggaaagtactcacaatgaatttccacgttaggtcaggcccatgtaaaatttacaaatggcagggggtatggaggaataaaggcattggcattgcatatgacctggtggccctttgaaaactgtgtttggggtttatgtttctagttgcagctaaatctgaatttgagattttaatccttttgaacgaaactaggtctaagaattagacatttgatctcatgcatcttatccagcacacagaaactcgagtgcttccttgactttgacataatctggatcccagctggtgctgattttagtttctgtgaagtgattagtgattaggtggcaccatggtaaggcagggtgctgtggtggcagggtcttccctccgtgcggaagggcccttgcagaacacagcagtgagtgttttaaccagcctactcctgcttgccccggagggctgagagttggtttttaggtagctgatttgtttgttattggctataattaggcaggtaggcttagctcctttaattactcatgctactttgcggaaggaagcgtaaactgcttattcagagttccagggccaggacttgggtgggaattctttggcagggccagctgcagaattagcattcatgtgatactaatccctgggatggcccctcagagcagtgtacccagatgtttgtttttcacatccagggtccacaaacatgtgctcagtagtgtccagtaggcgctagcactcaacatctagatggcatggtttatggccaaggagcttttagcattggtcaaagtctcaagcagagggaccagagatacagtctagaaggtgttcttatatttaatctctctctggaggcattggactcaaatggcctaaattttttgactcagatacctgtacatacatgtacacccctcaccttgctgtcttcacacacttgttgaagggaaaatgaggccaggcatggtggctcactgctgtaatcccagcactttgggaggttgaagtggataggaccaggagtttgagaccagactgggcaacatagcaaaactctgtctttcaaaaaaatctaaagggcaaacgggatggattacgtaaaaatcattcagaaaataatttgttttgtatacagcaaaattatctatatttagatatcccatgttggttattatacctgggcatctctttttcttctgtcacttgtgcttaagatttgtcttcacatatggtaaatacctgcataccattattgatgggatggcttaccatgtagttagtgggatgtacactgatattaggatattaggaagaacctcagaccaagtataaatagctaaaaaaaaaaaaaaaaaaaaaaaaaaaaaaa

SEQ ID NO: 4335 - DNA, 1399 bp, Macaca Fascicularis
acagcctgatgaacggcggtttctgtcgggggctgggtggacggcagttgctgacgggggctgcgtggacgactgttggcgagagttgtctggtgggacagtgtcataaatttggaatgctgaagagaaaattatagattttgatattgaaggaaatgaagcgaagcctaaatgaaaattcagctcgaagtacagcaggctgtttgcctgttccattgttcaatcagaaaaagaggaacagacagccattaacttctaatccacttaaagatgatccaggtatcagtaccccttctgacaattatgattttcctcctctacctacagattgggcctgggaagctatgaatgcagagttggctcctgtaatgaaaacagtggacactgggcaaataccacattcagtttctcgtcctctgagaagtcaagattctatctttaactctattcaatcaaatactgaaagaagccagggtggttggagctacagtgataacaacaaaaataccagcttgaaaacttggaataaaaatgattttaagcctcagtgtaaacgaacaaacttagtggcaaatgatggaaagaattcttgtccaatgagttcaggagctcaacaacaaaaacaattcggaatatccgaacctcccaacttacctcgcaacaaagaaactgagctactcagacaaacacattcatcaaaaatatctggctccacaatgagagggctagacaaaaacagtgcattacagacatttaagcccaattttcaacaaaatcaatataagaaacaaatgttggatgatattccagaagacaacactctgaaggaaacctcattgtttcagttacagtttaaggaaaaagctaattctttaagaattatttctgcagttattgaaagcatgaagtattggcgtgaacatgcacagaaaactgtacttctttttgaagtattagctgttcttgattcagctgttacacctggcccatattattcgaagacttttcttatgagggatgggaaaaatactctgccttgtgtcttttttgaaatcgatcgtgaacttccaagactgattagaggccgagttcatagatgtgttggcaactatgaccagaaaaagaacattttcaaatgtgtttctgtcagaccggcatctgtttctgaacaaaaatcattccaggcatttgtcaaaattgcagatgttgagatgcggtattatattaatgtgatgaatgaaacttaagtagtgataaaaggaagtttaaatagcataaattatagcggttttctgttattacttaatttaccatctccatagttttatagctactgttttcttgtatttcacttgttgaattaaagtatttgaattcttttaaaaaaaaaaaaaaaaaa

SEQ ID NO: 4336 - DNA, 908 bp, Macaca Fascicularis
  misc_feature (1)...(908): n = A,T,C or G
cctgctggggtgcgtagcgggctgctgcttcatcnnnntctnnntggacgccctgcaggacgtggaccattactgtcccaactgcagagctctcctgggcacctacaagcgtttgtaggactcagccagacatggagggagccgggtgccgcaggaagtcctttccacctctcatcaagcttcacacctggtggaggttctgccctggtggtctcacctctccagggggcccaccttcatgtcttcttctggggggaaatgtcgcaaaactaacaaacctccaaaccccaaaaattgctgcttggagtcgtgcataggacttgcaaagacattccccttgagtgtcagttcaacggtttcctgcctccctgtgaccctgagtcctcccatctaactgtgatcattgccctctccgagtatcttccagtgatctgccatcagtggctcttttttcctgcctccgtgggcctttctggtggcagtctcaaactgagaagccacagttgccttatttttgaggctgttctgctcagagctcagctgaaccagcctttagtgcctaccattatcttatccatctgttcccatccnnnnnnnnnnnnnnnnnnccttatagactttacaggcttggcttttagaatctgtaacttcagacttcattagcacacagattcactttaatttcctaattttttttttttttaagtaaaaagagnnnnnnnnnnnnnnnnnnnnngacatatccatgaggtcataaatgcatcctagaataccagggctggattttatcactgccctgtgtccccttgtttctctgtgccagatcatcagtgccnnnnnnnnnnnnnnnatttttttctcatagggtaattatatgaacagtttttatgacctccttttggtctgaa

SEQ ID NO: 4337 - DNA, 714 bp, Macaca Fascicularis
agggtatagctacagaatataaaactgctagctgcagtctaaaaggggctcctcagcaatggggtgtcccataactggtgcagcaactttcagaagttgtcctgtttggtgcagggaacaaggatatggggagctggcacctttggcccatcttcctcttgctgtctatgtaggtaacaatcttaaaaggacatgtcattactttagaagccaaatcaatcactcttgggcttggcctttttttgacgatgtggtagttatgtacaagagtgtctttgtttttgagacttgcacactggagtgtttaggagtgatggaacatgtctgcaacttggtctcaaatggttaagaaaaagccatatgataatggtggtacacacacgtaggcatgcacactgcagaaatgtgaagtgttatcaattgaacaatctggatgaagtgaacatgggagttctttgtactattcctccaactttttggtaagttcataacaagttactttttaaaatctacatataatgtacaatgtctgaaaggctacatgagaaaatgctaactagctcattacccctggtgactgagcttaaggccaggggggagtcttatttttcactttgaactcttctgtaaattgttttttgaatttctacaatgactatttattactttcttaatataaaattaaaatgtccaatttttaaaatcacaaaatat

SEQ ID NO: 4338 - DNA, 750 bp, Macaca Fascicularis
  misc_feature (1)...(750): n = A,T,C or G
gacttgtagaagaaagtatatccttctagaattcggngcagnnnnnnnnnnnnnnnnncaggcaaacgggtatatttttatattcagacaatctttctcctctggggctttgttgccaggaagattagaactannnnnnnnnnnnnnnnnnnnnnnnnnnnnnnnnnnnncagatgcctcttgtcttctttccaaatgtttttcacatatgtttaaaatatttctactttgaattgtcggattttccatgtcctcctttctcctttgtgcccagcctgagtcagcaccatcccacattcagaatctcccagtgaaagggcaggaaggggcctcacctgtcagccttcattttgagaaggtggaaggtgttggggtttgggagacagctcatccgatctcccaagtctcacgtgacatggtggatttgtgaccgtgagagtttccggtttaaaatatgaaaaaccagtttccttttcccagcgccatgcctgtggaggtgacagtcagacccagaggtccattagatgtggatgagctcacaggtgaatcgaggagaagaccaggggacatgccttttccgttttgtccaacaaagcattatatttttaagaatgccagacctgtttgctgaattgttcataagataacaataggcttgaatctccaattcaagnnnnnnnnnnnnnnnnnnnnnnnnnnnnnnnnnnnnnatatttatttttgtatccatttacagtatattgatctctt

SEQ ID NO: 4339 - DNA, 453 bp, Macaca Fascicularis
aagtgagagtttcaagggtcccctcaccctactttcttttcacctccccacccagaaactcaagtctcaccataataagtactgcatcagggaagaattctgcaattcgcccagcaattttcaaggccaggggcccaggactgtgtagagggaagatcagaggagtgaggagccaactgtgggcaaaacccatccatttgagatgggcctcccaggtctcatagatgtgggcgcagctgtggcctttccctgtaggtggcctgcggggatcgggcatgctggatgcttgatgtacgactgcttgatgcttgagtgatgtgggaaacaaggtgctcagatactgctgcacctgggggacacctcagttaagcaagatcagtctgttggccaggagtggtggctcaacgccatgtaatcaccagcaactttgggaggcatgaagctacgtggatc

SEQ ID NO: 4340 - DNA, 1105 bp, Macaca Fascicularis
aaatgtggatcaacaagatttgtttcagagtgacagtggagtcgttaccactggaggactgaagggccctgtggcagttgtcactggaactttgcctcttgatcaggtaaaatgctacaccagtcagtaaagccaagttgtatttttttttattgcccttttttccttctgtatttttaaagaaggatgttaatttttgactatatattttaaaaaaatctaagcagggggacatgcaaaaacaatcatcatccacttggatgtcattttatagattaacactgtgtgcttttgtatggaaaaatatatataatttaatagtataaaaagtaaaatattcatttgcacttctgtgaaacacaaactttgctctacaaaatttcatgtttcttagtgattttaaaatgcatgtattgcatgtaaaggaaaaccattacaattaatgtttatcacacctttatcttggtctttgttgatttgggttttgttggggtttttgttactgtttttaaattacagtaggcttctttatatcctggatttctgaactggtcttgttgacaaggactcccaagaaatggatctgttcactggctgcctctcccatatctgcaggagattctgcaggaacgaggtgtgcacatggtggtagccagttcaggtagtgaacatttaggatttggtgaagttcactgtattgctatatttttgtagatatataaaactcaataaattgttaatcattctctttttgctgtattgagttgcttatatcactctttctttcatgacattaaacagttaacatttaaatgttcctcctgtacttgtgttgtctgtgaccacttacagagttttattgttattggagtttacctgaatacctatgcgcacacacccacatacttccttaatatttctgaactcattatcttttagaatagtagtactacactttaccagcaattaacttctccctacccaaaatgtttttcttcctgtctgaaaatggaactaatttgtcttactcatgcttatatctgtattaaatataataaagttagtttttgaaatgtaaaaattcactgtgcaattcgtagtaagc

SEQ ID NO: 4341 - DNA, 517 bp, Macaca Fascicularis
ctgaagtcttctccccaaccctaagtcaattcgttatattaggctttgttatttgcagtaccctattactttatcagttcagtcacaagtttcctggtgcctcttcctcgttgagtcacatggggacatgcttaattctcccagaaatgtgtgacagcatgtgtaaaatattgccaaccagggaagctcaaccaatccttggtgtccaaggtttttactggaagtcagtcacacagacacgcatcacacatgtgactgaccttacctattaagtctcaagaccccagaggtgtagtgatacctcatggcccagggcttcagccattcaaaaacagacattcaccatgagtcatactgttagcataaactatctcatcaaactaacaaaatgcagcccaaggcctcaggcatactagaacactattatcaaactggaaattccaagggctcaggtcatttcccaggagctagttaaggaagggccagtacctgaagacacctttctttgaaaagtgca

SEQ ID NO: 4342 - DNA, 1501 bp, Macaca Fascicularis
tcggggcatagtcgggactagaacccaggtctcctctctctcgggccagtgctcagtccactttcacctcccccaccctctgacttttgcttctccttccttgttcatccctggggtggttagtcggagtaagaaaccctgaagccaaatgatcccttccggccctagtggagcagcacctgcacctcaaatgtcataatcgcaaatcagttcacagctgagatcacaagggtttattctgaggagccgactgtcctccgactttctgaagttaacaatcttgcaagatttttattgacctgatacagctacggttctcgatagcaacccaggtgtcctgtctccacggtgactgctgctttgcgaccttcggtttgcagcggtcgcgctgcagccgctgcagtggttgctgggcgacggcggagagaaagcctgggcttgaggtggtctcctagcaggaggaacgagagagcccagcagcgatacggtggtcttcgacccggcgaggggccaggccgtacggttgggatcccggggcagccccccgcgcagtcaccacgacgcggcacccgtgggcgggcgttggctttgtgtggtgggcggctgggacgggtctcgccgcctggccacagtgaccgcgctggacacagagcgcgatgtgtgggaggcgtggacagcgacccctggtgactgcccccccaccggcctcagtagtcacacctgcacccgcatctctgaccgagagctgcaggtggctggccgggagggcggtatccacactcagcgacgctatggaaatatctacacattaaggctggaccccagcgcccgcacgtattgctacaagcaagaaggctgccacatagcctcacgctcaggtcactgtgcggccctgctccaaactcctggaccccatccaggtcatcagctattgctcttcggaggttgcaacttagctgaaccagaagtagctaggcattggagtcatgggaaaataaaggaggaaccacctgttgctcctcatttgatggaaaagcttgcaaggcttgtgagcagtgggcaggggtcccagaaggggccccatggactacggcatcactcgtgttctgtggttgggccctttgctgtgctgtttggtggagaaactctgaccagagctagagacaccatctgcaatgatctctacatctatgatacccgcacatctcctcctctgtggttccacttcccctgtgcagatcgcgggatgaaacgcgtgggccatcgcacctgcctttggaatgatcagctttacctggttgggggttttggtgaggatggcaggacagccagtccacaggtttgcgttctggactcccttatctaaatagtgccgagacacaccactaagcctcgttttgttttgctttgttgcaaatctataaagcattatcaccagagctatctgcttcacttcaaatgcttattaaatttcaatctagactcaaaaaaaaaaaaaaaa

SEQ ID NO: 4343 - DNA, 717 bp, Macaca Fascicularis
  misc_feature (1)...(717): n = A,T,C or G
gtctgctatacnnnctagaaggannnnnnnnnnnnnnnnnnnnnnnnnccacagggccaatcaccannnnnnnnnnnnnngaacatgaagaatgccaagannnnnnnnnnnnactgcttccttcctgtggctttccatcttccagtcggcctgatcttttgccttgaagggcctcaaaacatcagcccnnnnnnnnnnnnnnngcccaaaggctgagaagatgggcaggcaagaacacggagggtgtcacagagaggttcccatcaggnnnnnnnnnnncccgctgtacctcttggagatgtcagcttcaatnnnnnnnnnnnnnnnnnnnnnnnnnnnnnnnnnnnnnnnnnnnnnnnnnnnagtcagtcccctcagacactgcctctaccccannnnnnnnnnnnncnnnnnnntcctcnnnnnnnnnnnnnnnnnnnnnnnnnnnnnnnnntcgctccaccacagagggctctgtccctgtcctccactcatacaccgttgagtttccccgcttctgcacgnnnnnnnnnnnnnnnaacacctcctctgtggggcnnnnnnncacaaaccccacagnnnnnnnnnnnnnnncgatggcttcccccagggactgctgagccgctgccccaatctcagccagctgactcggcaggtcnnnnnnnnnnnnnnnnnnnnnnnnnnnnnnnnnnnnnnncgtgatgccatactgcttgc

SEQ ID NO: 4344 - DNA, 1704 bp, Macaca Fascicularis
gtgcacgcagcagccaagccagaccagctggtcccctgctggcccgagggaaaaggcggtaccatgagccacgcagtaaccatccaggagccccaggcccagcctcaggtgtctcaaactcggtaccgggagaggtcgcgggctgggagccacatctcctccaatcgagcgtatgattttctgtacgatccattgtttattgtgtcaagtgagaaagaccacacacaggcaaatatccaagccaccctgattcgcagcagactgagaaaagttcccaggtttaaaaccatgttcaataacctgatccatgcctttgtcatgctggccgagcgccagcggcggatacgagaggctgaagagagtggtcggcgccaggtggaaaaacagcgcctgcgggaggaggacgagatatttaaggaggtagttaaagttcaccatagtactataagctcctacctagaagacataatactgaatactgaagcgaatactgcagaagaacaagccagggcagaaatagagaagatggctgagaaaatcaatgacattgcttatgaaatggaaagccgccgaacctatcttcagtcagaggagattgttgctgagttggtttatagttttctgatcccagaggtgcaaaaatactttgtcaaagaaaaagtgaggaacgcacagcggaaacatattcttgcagcccatcagatcatccacagttgcacagaaagcatggttcaaaagagattaactgagggacagcaagatgaggcctcaaatgctgctatgttacttgaggaagaaattcaaaatgagaacaacagctaagattgtgattaaaaaaaataaaaagaagcagtgcgaatcatcataaagaattccaatggtctgcacttctcccaaagtgtgcactgctcataaacttgccaatgtatgtttcgtgagaaaggagatttgttttccttaaacacccaataatttataatggttttcagtaataataatcaaatgaaaaatcttcattctcttcagtgtcttctagacgtcctacttaaaaagaacattttcttatgtctcatttcaatattttgttaactatgaggatgtgctggtttgttgaatcaaacaaaaggaaatgttgtggaatatttttccaagtagttttggttcactattcgcaggacattggtattatctactaaagctgaaaatgtgcatattccatgactcaggattttatctcccagatatatattcaacagaaatgcatgagtatgcgcaccaacaggcatgacaaaaatatttatagtagtggtattcacaatagtcccaaactggaaacccaagtgtccatcttcattggaacagaaaactatgctttggtctacttctacagtggcacatcaacccacttctgagctttagatctatgcagtatgttcatgcaacagccatagagatggtgctgttgaaaggcaatctgcccatcctgtgtattgacaagcatcaggattccatgaggattctttctcaaagactggcaaataggaaaaaacagtaaatgagcaaaaacatcaacatggagctcaagtaaagaatttataaaggaaagtgtgtgctaccctgaaaacaataaaagcttatgttagaaaatatcttactgtaaggaacaagtaaaatttcagaaacaaaaaaaaaaaaaaaaaaaaa

SEQ ID NO: 4345 - DNA, 1357 bp, Macaca Fascicularis
  misc_feature (1)...(1357): n = A,T,C or G
ttgttataacaaaaaccagactcttagaatccttgattctgaaataagttactggcaaaaacgccttcactggaggtattttttaaaataggacaaaatttggtgtctttagattgataggggaatagtactacttgggagaactgaaatggattaaatgtttcttgccaaactttattatatctatgtcctttgttggaatggataataaaggggttttgagagttataaggaattggcaacagttaattctataaaataggaactccaaatgcatgtaagatatgtgggaggccacacagatatggaaccatctggcctctatcctgtttggctgtctgagagcgccagactatgcagaatacacattcaacttttaaacatcctctttgcaatgtcttcagtcaacgatgtcacacgcaggtgttaatatggcgctgttcttggttgccctggcaatttgacaaagtaaacttggagttttagcccttaaaatgtacaggtgctaaaacttttttttttttaaaaggattagctattttgagacttcaatagaatttaactatttttaaatgtcaaagaaaatccaaagttcactaagatgcaataaagaagtgaaaacattttcttcccacatttaacggaagtggttttacatgctcaaaaagagatactgacttcaggaccagtgttttagcaataaggaaactactcacaagtgaaaagttctgctttttaaaaaccctggaaatgtcattactaaaattgatcacgtacctaattacttttggttttgagtaacttctagggtgtttaaaaaataaaacccaccctcacaggacaggggttttccaccagtgaatataaacaaatagaaaggaatatgctctagagttggcactctgttctcaaaggggagtccctcaattagtttggtcagtttttctttgaagtaaatctagtctcttccaaggtgatactttgataaagacaattatttttccatccgagttctatcatgcactcttcttggagtatggctgccagcgcatgcttcttttttcacaaccagtagggggagcaagagtgcttttatcgagcatttgcaaggaaaagttccgggattcatcctgactggtctagcttaggtcacataccagtaatttttgctgggggaatggattccgcagcttggcttaaaccagactgaattacttccaaagttagaagcaggactcagtttcccgaaagctttgtggaggagatgtgaagaattcgtatccgnnnnnnnnnnnnnnnnnnnnnnnnnnnnnnnnnnnnnnnnnncaaaaaaaaaaaaaaaaaaaaaaaaaaaaaa

SEQ ID NO: 4346 - DNA, 830 bp, Macaca Fascicularis
  misc_feature (1)...(830): n = A,T,C or G
cnnnnnnnnnnnnnnnnnnnnnnnctttttgacttcatactttgaagaattgatgtatgcctctttgcctctgctttgtcatgccattcagctcacaataaggaagaaataacagataagtccatttgtggacagcctttttctcttaataatcttaatcttaagattattttcagaatttaatctttgaggaaaaggtttaaggaattgtgtctaagaaattgtgacactgagttctgtattctggtgagttaatggggttgcctctcagcttctcataagactcacagtataactaaacatgatatatgagcttttgccttttaatttatcaatctcttgaagataatccagctttattactattagtatatgatcaaacttccatatttgccctggcaataatggacaaagggaaatactcttaattcatgaataaaaactttgcagaaaattagacagtgtttaatttttgaaaacttccctctctagtcagtagataccacctactgatggttacgtatactagggaaatcttaaaattaggaaatgctgacatctcacattataaatttctaaatcctaggaagaaatgcttggagtgcttctgaatatagaggagttccattttagggcaagtttcctcttgtaaagtatcaaaatatttccagttctaaactgagatttaattctcaaatgtgttctacttgttctaaaacaaatataaaactcttaagtaataaattgttattttcgcacaatgggaatctctaatgtgaaaatgtattctatgaagataatttttttaaaataaaatgttgtataataaa

SEQ ID NO: 4347 - DNA, 740 bp, Macaca Fascicularis
  misc_feature (1)...(740): n = A,T,C or G
gaggttgggctgggattgannnnntggtgtcttggctctggaagctgccctggcaccttggtgatctgcatgggtcagtgtacgcaggcacacatcagccgtgaggacgtaggcacatccgttcacaggagcagcgccacgtgtcttttaagtgccaggaacggggcgggagggtgtgagggctcagtggccagaagactcagaagatgcaaagtgcctgagagnnnnnnnnnnnnnnnnnnngcagcattcttagaggcacaggcactggacctccttggttcttatcagaaacctgtctgaagccaggtgatgagctgcacattccaggtggggataaggggcctggagagccctgcgggctcctaggaaggcacagcagcagcccctgagacagccctcctggggcccctccacgctcccaggcctctgtattttacctgtgcccacacttctgtctcctgccttcaccttttgacccactagaaagattctccacccagcagacaaggtgatctcttaaaaacatctgtcggccgggcgcagnnnnnnnnnnnnnnnnncccagcactttgggaggccgaggaggggtgggtctgttaggcccagtccgnnnnnnnnnnnnnnnnnnnnnnnnnnnnnnnnnnnnnnnnnnnnnnnnnaaggatctttattannnnnnnnnnnnnnnnnnnnnnnnnnnnnnncgaaatgagagggtcaagagagagagtccccca

SEQ ID NO: 4348 - DNA, 692 bp, Macaca Fascicularis
gccctatacaccaaggggaataattaaggaggtcccgggtgggaaaagggagagttggggggacagggtgtgtgcgaggtgccgggataccgaaaactcgggtgtcaaaagggagcaagaacctgttttggggacacttaaggatccaagtgtcacggggtttgggcgatgtaggaagggaggggctgcgtgggagggcacagaagggaaatgagtaagggggcatgggatctctgagaaaatcaggggcctctgagcaaagtggaaaggacgagcgccgcagctaccctggccgtagctcgcccccgccttcccttttgcgcagaatccttgccttggttgcagcagcgcgctgcccccactggccggcgcgcagtgatcgatcgcaggctgcgtcaggagcctcccggcgtataaataggggtggcaggacggcgcctagccgcacacagccatccatcctcccacttccctctctcccctgtcctctctctccgggctcccaccgccgccgcgggccggggagccaccggcagccaccatgagttccttcagctacgagccgtactactcgacctcctacaagcggcgctacgtggagacgccccgggtgcacatctccagcgtgcgcagcggctacagcaccgcgcgctccgcttactccagctactcggcgccggtgtcttcctcgc

SEQ ID NO: 4349 - DNA, 722 bp, Macaca Fascicularis
gcttcccagtggagctctgtaaactctagtaaacacaatctataaatttgattttgccacggtgcttagaaacagtctaataaataaaagggaaaaaagtgtacagagagagaaaaaataactacactaaaacagaactgtttttaccttttaaaaaatttggtgggaggttaggaacatattctgaattggttcagtaaacctcaaaatactgtctcccccacacatggttttaccacttaagaaatgatgattgtatctgctcacaaccattttacttgcatctcacttacagatgctaaatctagtctcagaggaggcaaaacatgtatgcattcttaagttataaagtgtactgatttcacaaattgaagaattttagaaattcagatttgtcatggatgtgtcaccatccatagctgtcatcctgcatagctgatatctgctgcaaatcttgaataaatttccaattcagttgggcagcaaaaattcaattagatcttaaggcagtttgtgtttcaggattccacctctgcccattttccccaatatgtcaaaatatggaataggtgaaatcagcccctcttatgtacagcacatggacacatctgttgtgactacaccatgttcgaactgctactaagtatcagcgtgtgtatgaatttacagtgttgaatgagcaccgagcaatgtgttttaaatagatttgtgtatatttgtag

SEQ ID NO: 4350 - DNA, 755 bp, Macaca Fascicularis
  misc_feature (1)...(755): n = A,T,C or G
aaactgaattaagatcatnnnnatgttctnnnntctctttttaaatattttataatttttaaatagaaaaacctgttgggtaaatggaaataatctttgaaaatattttttgatgttttgtgatttttaactggtaactttctactttagnnnnnnnnnnnnnnnnnnnnnnnnnnnnnnnnnttatgctatcattgctagatttaaaggggcttctaagcatttctggaaatatttgatttaaaaacatatattaatagatgttttccctagcagacttttggagcaaaaatattattttagttcagcaaaggattactgatattatgggctgatctcagaaaggaataagaatgaggcagagaggagtacttgagtttctgtgtgtgtttgtgtgtgtgtgcgagtgtgtgtttgtgtttgtgtgtcacataagttctccatattgccttatgtcccaaagccaaatataaaaatataaatgatgctttgtgtaattcattttatcaaaacttacccataactttcatttgtttttatatcgacaatgaagatgataatatttcattttgcagatgtggccataaaatattatttatttctacataggtgattttaccagatttagttatcttgagaaaacatctgnnnnnnnnnnnnnnnctgcttccctacaaagatctttaaaattatttttaggcacatttgtgataaacaattacttgatattgaaatctccttcagccattagaagc

SEQ ID NO: 4351 - DNA, 685 bp, Macaca Fascicularis
  misc_feature (1)...(685): n = A,T,C or G
ctaagtgctttcttgtttgaaacgcctacaaacctccatgtggtagctcctttggcaaatgtcctgctgtcgcgtttcatgtgttgcttggagtctgtggggtcgtactccctcccctcccgtccccagggcagatttgattgaatgtttgctgaagtttttgtctcttggtccacagtatttggaaaggtcactgaaaattggtctttcagtcttggcatttcatttaggatctccatgagaaacgggcttcctgagccctgaaaatgtatattgtgtgtctcatctgtgaactgcttcctgctatatagaactagctcaaaagactgtacatatttacaagaaactttatattcgtaaaaaaaaaaaaaagaggaaattgaattggtttctacttttttattgtaaaaggtgcatttttcaacacttccttttggtttnnnnnnnggtagttgtggacagnnnnnnnnnnnnnnnnnnnnngagccccgtgagaccaccaagatgccagcaggaaannnnnnnnnnnnnnnnnnnnnnnnnnngcttnnnnnnnnnnnnnnnnnnnnnaggtctccaaaagtacaggctttttcttcattacctttttnnnnnnnnnnnnnnnnnnnnnnnnaaggaatgattcaagatccaccttgacaggaatgaactttgttgtgaacaa

SEQ ID NO: 4352 - DNA, 725 bp, Macaca Fascicularis
  misc_feature (1)...(725): n = A,T,C or G
tggnnnnnnnnnnnnnnnnnnnnnnnnnncgagaccccaacgccaccttaacccccgcgccctggctcaggggccctggtgggcacggaagcggctnnnnnnnnnnnnnnnnnnnnnnnnnnnnnnnnnnaaagtcaacaagaataagnnnnnnnnnnnnnnnnnnnnnnnnnnnnnnnnnnnnnnnnnnnnnnnnnnnnnnnnnnnnnnnnnnnnnnnnnnnnnnnnnnnnnaacaacggttnnnnnnnnnnnnnnnnnnnnnnnnnnnnnnnnnnnnnnnnnnnnnnnnnnnnnnnnnnnnnnnnnnnnnnnnnnnnnnnnnnnnnnnnnnnnnnnnnnnnnnnnnnnnnnngccagagtaccatccccttgaacagcctcaagcaaggataccgccatgtccacctcttatctaagaatggggaccagcatccatcagnnnnnnnnnnnnnnnnnntctccctccaggactagcctggaggaagccaggagggtcccccctgagtgggctgggccctctgtccacacgtggggacagggctggtgtggctgctcccagcctcttnnnnnnnnnnnnnnccccaaactgcctttnnnnnnnnnnnnnnnnctgctgctgcctccctggggaccaggagctagcccannnnnnnnnnnnnnnnnnnnnnnnnnnnnnnnnnnnnnnnnnnnnnnntccaccctctggctggccgnnnnnnnagg

SEQ ID NO: 4353 - DNA, 694 bp, Macaca Fascicularis
  misc_feature (1)...(694): n = A,T,C or G
tgnnnnnnnnnntactccaatgcacccaccacaacaaagtgtgatcttacacaaaatgtcaannnnnnnnnnnnnnncaagccctggtgtaatataataaataaaggtggggagtgggggatagaannnnnnnnnnnnnnnnnnnnnnnnnnttacatttagactcagctgtgtgacctaggaccagctgtcaaatgtcagagagccttagttctttcatctttaaaatggaggtcatcgnnnnnnnnnnnnnnnnnnagtgttgtattagtnnnnnnnnnnnatacacaggaaaaaaaaaaaagagggacagtattattatctttattatcatcactattattgttaatattgtcatggaagattttacaaatgaagaannnnnnnnnnnnnnnnnnnnnnnnnnnnnnnnnnnnnnnnnncttgagggatcaaggacatgattaagccatgaagtgctttgtcagctgaaaacctgnnnnnnnnnnnnnnnnnnnnnnnnnnttttctctctgtagctcataaactagccctaacgggtatgaacttccctcagtaacatcaagtagggaaacctgtcatagggactacctcgaagtagccagaaaaacccatgtggatatgtccagtgtggtggattagtccaaagactcactataattgtacgaatatgtttcccactttcacctattca

SEQ ID NO: 4354 - DNA, 896 bp, Macaca Fascicularis
  misc_feature (1)...(896): n = A,T,C or G
cnnnnnnnnnnnnnnnnnnnnnnnnngagatacgtttgcttnnncatagtcatgtcctttctnntggcactgcttcnnngcagtgtnnncaaatggatttgtgtgtggcagtggagtgattgcatgaatnnnnntgtaatacattaactttgtattattattaagggagtttgagaaagctttgcttataatgtcaaggcaaggaggtaaaaacgagcccaaagaaattcccttagggcaagattatgttataatagaaaattgaatttcctgaggtagtggctgccaccccttttcagatgtttagtcctgcgaatagcatctttcttgtagtctgtgacatggatggggatgctagggccctcaggggcaaggggactaaactaaatcaagttaggttttttcccagcagggattaggagaggtacttgctgttgatatttgacactagaaagtcatcttttttacaaaactttttctaggttggtggaaagtgaaactgccacatccttgttggtttagttcaagagatcatttgcaacaacagtagatgtctgggttttgtttctgtctttttattatgaaaaactttgttaagggggaaaatgtggattatggtaaccagaggaatccgtagccttgttttccttagaacactttttgtgttttatcagacgtctgttgtagttgtagacaggaaagcttgtgagaaaaacaccacatggagcctgtaaatgtttttgcacaacctgtaaagcattcttggaagtggccagtaaaaaagggttttaccatttaaaaaaaaatgtaactgtgtcattgtttacatctgtaacttttcctcccctgttctcattnnnnnnnnnnnnnnnnnatgtaggcaaagtagcttccag

SEQ ID NO: 4355 - DNA, 734 bp, Macaca Fascicularis
  misc_feature (1)...(734): n = A,T,C or G
caggttaaaatcagcccggggaagaggcacatggggcagggcccaggagccaccaatggaaggactccatttgcattaggtttgtttggttttttaggtttctgggtttttggtttttgtttttgagatggagtcccgctccggtgtgagcttccggctgtcctctcccattggggtcatgcggacagcacagtgcctgtttccccatcgaggatgtatggcagtctctatggagtgctgccatccagggaagctcacctgagcctcgagatccagagtttttactggggattggccacagagacacagctggccccgtgtggccggccttagtctccagccctccagaggtggagcgggtgctgtacgggcttgggctgtaagggatattggcctgtagttttgttttcttgtgatatctttaggcaatgcttgcccaatagaatgtgttgggaagtgttccctcctaattttttggaagacagtgaagcactggtgttaattcctctttacatgtttcatagaattcacaatcaagctctctgcatctgggcttttctttgtgggaagttttaaagttaattaactgtgcgtagtgttccattattggaacactaagcttgtgggagttatttatatcctgctgaaggtcatcgccaaggtctcatttttcacagaanagatttacaacctccagcataagtaagttaatttctttactttgtagagggttg

SEQ ID NO: 4356 - DNA, 767 bp, Macaca Fascicularis
  misc_feature (1)...(767): n = A,T,C or G
cannnnnngnnnnnaggtgcaagnnnnnggggtggggctgggcctaggacgcagcgagtagtggaggtctgtggctcagtttgccctctttggagtcagcagcagaagggactccctctgcaggagagacaggtgtgtcctgagctctgttactgccacccgccgagacagcacctgtgactgtattttcttctaacttccaaatggtcgtataaaaaaaaacacatgttcataaaagcgtgtgaaacacacacacagcttggtgaagtgagcagtgtggggcccacagcccagtgaagtagacagtgtcagggccctggccgccgcagcgcacccggctcgtcgtcctcttccctggagcggagcgcacttcttgacttggacacagttgggttgtgctgtttgaacttcatagaaatgaaatgacactgtgtttacttgtgtgtgtgtggctgatggggggcgtggattctggttcctttttttcccattatcctgagagccttaaggtatctggttcttgtattcagtgtgttggtgagactcagtcctgtcatctagcagaagtgtgttccttttcattgctgtatagtattccattgcatgacggtcctgtgctctgattttaatgcactttattgtgggggatatttgagttgcttcctttctgggtaagaacacccacttggaaataactggtgaacactcgtgtgtgtgggcgggggaggaacggctctgggcataccccaatggatcttaacgatgtg

SEQ ID NO: 4357 - DNA, 2422 bp, Macaca Fascicularis
gagaatggttggatgttggaaattttctaatcgctgatgaatgttttcaagctgctgtggccagtctggagcaattatacatcaaattaattcaaaggagctcccctgaggctgacttgatcatggagaagattactgttgagagagaccacttcagagtgctttcttaccaagcagagtctgcagttgctcaaggggattttcaaagagcatctatgtgtgtactgcagtgtaaagatatgttgatgaggctcccccagatgacttcaagtcttcatcatctctgttacaactttggagtaggaacccagaagaataataaatacgaagaaagttctttctggcttagccaaagctatgatattgggaagatggataagaaatctactaggccagaaatgctggctaaagttctacggctactagccaccaattatttggattgggataacaccaaatattatgataaggctctcaatgctgtaaacctagcaaacaaggaacatttaaattctactgggcttttcctaaaaatgaaaatcctcttgaaaggcgaaacatctaatgaagaactccttgaagctgtcatggaaatactacatcttgacatgcccttagacttctgtctgaacattgctaaactgctgatggatcatgaaagagaatctgttgggtttcatttcctgacaattattcatgaacgttttaagtcatcggaaaatactggaaaagttctgctactctatattgacatgcttttacaaaggaaggaagaactgcttgccaaggagaagattgaagaaatcattttagctcaccaaacaggaagacaactgacagcagaattaaagaactggttacacaacattctgtggagaaaagccaccagtagttttgaggtacaaaattacgctgatgctctacaatggtactattattctctgaggttttattcacctgatgaaatggatctggacttcgccaagctgcagaggaacatggcttgctgttacctgaatttgcaacaacttgataaggccaaagaggcagtggcagaagctgaacgacatgatcctagaaacgttttcactcaattttatatattcaagattgcagtaatagagggcaactctgaaagagctttgcaggcaataattactttagagaatgtattaacagatgaagagtccgaagataatgatctagttgcagagagaggttcacctaccatgcttctaagtttagctgcccagtttgctctagagaatggacaacaaattgtggcagaaaaagctttggaatatttagctcaacattcagaagaccaggaacaagttcttacagctataaagtgtttgcttcgtgttgttcttccaaaaattgctgaaatgccggaatctgaagataagaagaaagaaatggatcgacttttgacttgcctgaatagagcctttgtgaaactttctcagccttttggtgaagaagacttaagtttggagtcaagagttaatgaagctcagtggtttcgaaaaatagcttggaacttggctgtgcaatgtgacaaagatccagtgataatgagagagtttttcatactttcttataagatgtcccagttttgtccttctgatcaagtaattctgattgcacggaaaacatgtttacttatggcagctgcagttgatctagagcaaggcagaaaagcttcaacagcttttgaacagactatgttcctgagtcgtgcacttgaggagatccagacatgcaacgatatccagaatttcctgaaacaaacagggaccttctcaaatgattcatgtgagaaattgcttctgctgtacgagtctgaagttagagccaaattgaatgatccattactggaaagcttcctggaatcagtgtgggagctgcctcatttagaaactaaaacatttgaaacaattgcaataatagcaatggaaaagcctgcacactatcctttcattgctctcaaggccttgaaaaaggctttattgctctacaaaaaggaagaatcaattgatgtatcacaatacagcaaatgtatgcacaacttgattaacctctcagtgccagatggggcgtcgaatgtagagctctgtcccctggaagaagtttggggctattttgaagatgctctgagccacattagccacactaaagactacccagaaatggagattctctggctgatggtcaagtcctggaatactggagcaagtcagattaggcaagctcacggccacatgaagaagatacgttgtcctgagatgctgactgtttaaatttttgccagagtttctcttgagcttttgtttctgtttcctcagaccctgttttcatgttgttgaataaactttctaaaataaaagcatgttgaatttacaaaaaaaaaaaaaaaaaa

SEQ ID NO: 4358 - DNA, 280 bp, Macaca Fascicularis
gaaaagcacagggagagagagtgtgtgtgagtgtgagtgtgtgtgtgtgtgtgtgcgcgcgcgcatataaatatcggcatatgatatctgactctctctccacacaaaagagaaaaaacccctcaccacccccatatgcgggacactttactttccaactttccgtgttttttccaaaaacaagattttgaaaaaaaaaagtggccagagccagggcccacaccatatgtcctgcccaccctctgagtcactctgtggcagggtggggtggggggtgggc

SEQ ID NO: 4359 - DNA, 770 bp, Macaca Fascicularis
  misc_feature (1)...(770): n = A,T,C or G
cttaatcacagatatgtgctnnnncagatacagtaattcttgttcaaccaatgtacaaaatccataaagaaaccnntgttggataatgtttgatgtgtctattccttccatggaaagcagcactacgtataaatgttgggtttctttgtacttgttaagccacatttgaggtttatggtaaaaatcatcttttgagtttgctctttggtttttcatcattccttttgaggaatgggaaaacagaaggattctttgatttgggtaatgaagaggtaatgtgggacagtgcggtggtgccaggaagaaagaggattgnnnnnnnnnnnnnnnttttagttgcttggcactactggttttgtgttcatgtggttgccctgtccactacatggttctgtcagtagtgtaatccattttcaatgtaaagctctttcagtttttgtcatagacataaattaatatttttagaggcatccctcgcctgttcatttcttctgtgttgaaatgaagtacctaaaataaccgttacacatgaactttgtggactgtaagatttgttatatatgttcaaatgccttttagctggctttttaattaatnnnnnnnnnnnnnnngcttaatacaatgtaatgtgattgtaaatcataaacctattttaaatcattccttcctgtatgtttgtactcagagagccttattttattcttccagcagaattactacttgtgatagttcatttacattccnnnngaatgtgcnnnntggtgtgaatt

SEQ ID NO: 4360 - DNA, 728 bp, Macaca Fascicularis
  misc_feature (1)...(728): n = A,T,C or G
aaatactccagttttgtgggtttcgtcatttttacttacaaatttccctttttgtattttgcaatttacatgtgtttggtttgttttaaattctgtgaaagtggcttgattaaaagactcnnnnnnnatggaagccnnnnnnnnnnnnnnnggaagcttagaggaccttgcctgtgagcgctactctttgtgtttggttttgtgtatgtaatgatctttgctgaggttttttgctttgttttgagggaaatgtcttggagtaaattttaagttcctgaagctaatttgttttagaggaattttgttttttaaaaagataggatcattgtgaactttggaatgaccccctnnnnnnnnnnnnnnnnnnnnnnnnnattagttacatgaaaaaaaatttccaatgaagatnnnnnnnttttatgaaaaaccagaagttattagatgaaagcagtgannnnnnnnnnnnaacagactcgatcatgcacaaacannnnnnnnnnnnnnnnnnnnnnnnnnnnnnnnnnnnnnnnnnnnnnnnnnnnnnnnnnnnnnnnnnnnnnnnnnnnnnnnnnnnnnnnnnnnnnnnnnnnnnnnnnnnnnnnnccaaagtgatttgagtttgtaaaaatgtaaaatagtatgaacaaaatttgcactatgccagatttgaacatctagtgagattcacattcatactaagttttcaacattgtgttctttttgcattc

SEQ ID NO: 4361 - DNA, 222 bp, Macaca Fascicularis
  misc_feature (1)...(222): n = A,T,C or G
gcnnnnnnnnnnnnnnnnnnnnnnnnntgttgcacgattccagaggcggcgtgggtgagagagccacggggcacatgacacgggtctcgaaagagtctggagagacaaggtcagagagcacgaaaaggtgcgggcacgaaggatatcacgaagatcacggagacccggcgggtagatataacacagaggagggagtccaaggaaacaccccctctggtgaaa

SEQ ID NO: 4362 - DNA, 785 bp, Macaca Fascicularis
  misc_feature (1)...(785): n = A,T,C or G
agcagctggcgagcacagtnnnnntnnagannngacaaggaggacaagagcgnnctgcagttggagcagcgagtaaaggagctgcaggagaagctgagtgaggagcacctagaagctgccagccagtggaaccaacagctagaggcccactnnnnnnnnnnnnnnctccctggagaaggagatgaaggaggacatctagacagcgaggaggaggaggcacctcggcccatgccacacatcccagaggnnnnnnnnnnnnnngaggccatggagactacatcaccgaatatgagagccagggggcagtgccaaacactcggcaccaggagaaggaggacgtcatgggtctggcnnnnnnnnnnnnnnnnnnnnnnnnnnnnnnnnnnnnnnnnnnnnnnnngttgccgcttgtgtgcaaccacgaggggcatgacaaattcccccccgctgcccagaaccgtggtgatgagcccgctccaggggccccagccccccaggagcttggggctgcggaggagcagggtggacacccaggagcacccaggcttggccagcaaaccctgcgtccctttcttttaccgggcagcggagaacagggagatcaacatcgtcatcatctgagagctggtcaagaaattgaaaacaacaacaacaacaacaacgaaaagttatggggttaatcccctgcacaattcatttacctcatttgaatgttacagcccctcatgtttatttgtgtttctaatttacagtttaaatttatttataaaaagtaagggagagtg

SEQ ID NO: 4363 - DNA, 765 bp, Macaca Fascicularis
atgtggcagctgctcctcccaactgctctgctacttctagtttcagctggcatgcgggctgaagatctcccaaaggctgtggtgttcctggagcctcaatggtacagggtgctcgagaaggaccgtgtgactctgaagtgccagggagcctactcccctgaggacaattccacacggtggtttcacaatgagagcctcatctcaagccagacctcgagctacttcattgctgctgccagagtcaacaacagtggagagtacaggtgccagacaagcctctccacactcagtgacccggtgcagctggaagtccatatcggctggctattgctccaggcccctcggtgggtgttcaaggaggaagaatctattcacctgaggtgtcacagctggaagaacactcttctgcataaggtcacgtatttacagaatggcaaaggcaggaagtattttcatcagaattctgacttctacattccaaaagccacactcaaagacagcggctcctacttctgcaggggacttattgggagtaaaaatgtatcttcagagactgtgaacatcaccatcactcaagatttggcagtgtcatccatctcatcattctttccacctgggtaccaagtctctttctgcctggtgatggtactcctttttgcagtggacacaggactatatttctctatgaagaaaagcattccaagctcaacaagggactgggaggaccataaatttaaatggagcaaggaccctcaagacaaatga

SEQ ID NO: 4364 - DNA, 770 bp, Macaca Fascicularis
  misc_feature (1)...(770): n = A,T,C or G
cacgtctagatgggatgaaaggtgagatctagtttataatggtggaggaactaaagagattgtgatgggtgccctaagcaggggaaactgaacaaaaggctagaggcatgggccaggtaaaaattgggcctagnnnnnnnnnnnnnnnnnngttaagagccttcgaggcaggagtacttactcctcaatggtgatgaatggagaaattcttttcaggattgctaaaggagaattgaaggggttaaagtgttaaatatgtggcgtagacacgggttctttaaagaaatacaacgcaagtttgaatgcttgcttgcttgttttgtgacctgatttatgtgggtgattgttatttcattaggatttagtaaaatcttattttttttctgtttctaaacttattgtgaaaattgagctgtgcagacattcttttgatttcaattgggaacatttggaagaacaatagtctttactttcctgtacaatatagagacatatgaatattcataacagttttcaacttgttcttgtttctgttaaactatattcctagaaacatagtttgaacaacttggtctttgttaggcttgtcaaattgccttcgtggaaaaataatctacaaaagtgtggtttaattgattgtcttacatgataattttccctggtaacaacttagtaagtgatgtgtcttttttcctaaattgcttaaatactgtgaaattgctctgacaaattggaagtgtaccattggcatatttgtcttcctttttatg

SEQ ID NO: 4365 - DNA, 696 bp, Macaca Fascicularis
  misc_feature (1)...(696): n = A,T,C or G
agcggcgggcggagggntnnncggccgcggggcagaggaaaagacgtcaaagactcagacagaaggcagcgtgaatccagggcccgggatgcagggtttgctggaannnnnnnnnnnnnnnncgcgcccctgggattccgcttggcccgcgcgtccatttccctgcacggtggactcagtaaagccggatctgtccagcgcttacagcgtggaggtggaggcggactaatcaagcaatgctctgttattatttctacccatccccttttctccatgctaatttgcttagaactttaacgtcgnnnnnnnnnnnaatgtcatgttgtttaattttcannnnnnnnnnnnnnnnnnnnnnnctctcccgaacaaggtgacgcattgttttaagtaacagtgatcaactcatgtactctttttgcaaattgtatgaattgaagggtaaaannnnnnnnnnnnnnnaatttgaatgctaaatttgaacatttgacacaatattttgaaatgcttctttgcnnnnnnnnnnnnnnnnnnnnnnnnnnnaaatatttcattttcagacatttctttggtcaacaaatacttcttgaacgtttatatgcaaagcaatgcatgtaacattttcattgctttacaagtgtatttatcagtaaaagaattttgttttaaattctagccttcatttaaatgtatctt

SEQ ID NO: 4366 - DNA, 739 bp, Macaca Fascicularis
  misc_feature (1)...(739): n = A,T,C or G
cagggccagtgccctgtgtgcccactggaccaaggccnnnnnnnnnnnnnnnncctcaccccctaagggctcctcgcccaatgccaagtgcaggggnnnnnnnnnnnnnnnnnnnnnnnnnnnnnngaccctatttctaaagccaaactcagtctcctagaattagggctacgttggaaacgctgtcgcagcaacccgggcagcacagtgnnnnnnnnnnnnnnnnnnnnnnnnnnnnnnnnnnnncctcccacctcacagctgcctctggcagccgagcctcttttcgcccagccccagccccgnnnnnnnnnnnnnnnntgggcctcctcagcagcgcggctgcctttcaccttgatttccccagggctctccgcagcatcgacaaactagcctcgcccgccagctgggtcctccccccacccagtctgccaggctgggagctggggcctgctgagtctggaatgcccttctagaaggcttctctagaggctcccctggcaagagagggtcccaaggggagccctgcaaagcaaaggctccttgtctggggcaggacagagaatctcgcctgtctggtgtgnnnnnnnnnnnnnnnnnnnnnnnnnnnnnnnnnnnnnnnnnnntggcatggagctttgaaagatgagtaggtgttagcaaggaaataaggaggagcaagggttacgggcagaggagaaagcacttgccaagtcagcaaacaaaaataaatcaagaa

SEQ ID NO: 4367 - DNA, 790 bp, Macaca Fascicularis
  misc_feature (1)...(790): n = A,T,C or G
ccctgtcnnnnncaaggtagatgaggagatgttgtcaatctaccaagcttggtagactatnntctcaanctgaaagaacannnagaagatatctatataggaagagttattcatcaggttacacccaatagagatcctcagaacagagactttgtccctcttagtgagtacccagaaaaatactacccagattactgcagtggcgaggcctttataatgtcccaagatgtggctcgaatgatgtatgtggttttcagagaagtacccatgatggtgccagctgatgtgtttgtaggaatttgtgctaagtccgttggccttatacccatccacagctcaaggttttctgggaaaaggcacattagatacaacagatgttgctataagttcatttttacatcctcagaaattgcggatcctggaacgcccctggcatggaaggaaattaatgatggaaaagaatgtacactgtttgagacatactatgggctcgtttcctgcaaacttctgacgtaccttgacagctttaaacgttttcacatgaagaccataaaaaacaatcccacgtattttggtgattaggatttctttaattttccttacgagtcaattattttaaagttaccttctaccctgttatggaaagcatcccttctttctgtgttttatgtaggttctctgaatctttaattttacttgcaaaggtacaaaatgttttctgtgctctggtgtactcaattactgagatctcattttaagaaatttaagttggtgtagcnntgattctttt

SEQ ID NO: 4368 - DNA, 643 bp, Macaca Fascicularis
  misc_feature (1)...(643): n = A,T,C or G
tccntgagtccattgtattagcccgcaattggttgaaaacctaactcaaacagctttaagagggagacaaaggaatgagttggctcagatagcattggaagaccaggaagagtccactggctgcaggtgtggcttgatctgggagctaacgccactcagttctgttcacctccatggtgactttatcatcaggtgccatattcaagaaaaggggataccagctccttcaaggttcaagcctggcaggaaagagaatgtccccagaatgatcgaacagaggtcctaggcctgactcatttccaactctgaatcgaacaccgtgttctggggtgtgtcatacaccagtcaggaagaagtcacaggccctacttgtggaggcagatcgtcttcagctgcactcgagcatatgtggaaagagttgatgggggcnnnnnnnnnnnnnnnnnnnnnnnnnnnnnnnnnnnnnnnnnnnnnnnnnnnnnnnnnnnnnnnnnnnnnnnnnnnnnnnnnnnnnnnnnnnnnnnnnnnnnnnnnnnnnnnnnnnnnnnnnnnnnnnnnnnnnnnnnnnnnnnnnnnnnnnnnnnnnnnatctcagctacttgggaggctgaagcagtgagaattgttgaacctgggaggcaga

SEQ ID NO: 4369 - DNA, 786 bp, Macaca Fascicularis
  misc_feature (1)...(786): n = A,T,C or G
gatacagggatagaagttacaaaaagatataggacactttttttactcctacanntgatacactttgaaaatgatgttttgttctttttgactttctttaccttttgaagtagaaagtgagaaccaaaaggttcacagcttcattcctcatgaggaaaataggccctgggagaagaagagcaggtgcccttttatctaaacatggaagactctgctcaactgagcactggatttgctacaaaccagcatcatcttcttcctcctgccctcacagcttgtcccattctctatgttcacttcaggagccacactagagattctgcatggcgtggaggggggcaaagttttagcactttctgcatctcctagtactttacaaatgagattacatttgaattcgctaatactttatgagcaggcaatggggtttccaaaatctcatctaaatactctccagactattagcaaaaatcagagtaaaatacagaggaaaggcactgctttctgttaattcatttaacatgcataaattagctcgctctgagttccaggcactgtactgagagtacaaagaagacataagtctgctttcaagcaactccctgtgaaagtgtttttgaagggaggaacagaaatgagacccctatctttctctacaaaaacaacatttttactgtcttttgcctgccaatctgtgtttgaaaccattgcacactgattctctggcctggtaccttggtattgatggttttctgcctttcttctcagccccctgtctctgtgcat

SEQ ID NO: 4370 - DNA, 755 bp, Macaca Fascicularis
  misc_feature (1)...(755): n = A,T,C or G
agtttgtatgtggaatactggttatnnnatnggtggtgtaggagaagagagatgatttagcttcagggctggggcatttgttggccaagtgcagagataaagagagaggcagcctgcagagggaaaacaaggggagcagacacacacagaggggtgaatgttagaaactgtgccatctcagaggaagagcagacacacaaagaggggtgaatgttagaaaatgtgccatctcagagggccgagtggctgcctttggnnnnnnnnnnnnnnnaggtacagannnnnnnnnnnnnnnnnnnnnnnnnnnnnnnnntgccctttatatctgtgagagtcctaattcttccaataaattccnnnnnnnnnnnnnnnnnnnnnnnnnnnnnnnnnnnnnnnnnnnnnnnnnnnnactgtttctaaggatgaaaataatggtgatnnnnnnnnntaacatttattaaatgccatgcaatgttctaagaacttcatatatgtnnnnnnnnnnnnnnnnnnnnnnnnnnnnnnnnggctcnnnnnnnnnnnnnnnnnnnnnnnnnnnnnnnnnnnnnnnnnnnnnnnnnnnnnnnnnnnnnnnnnnnnnnnnnnnnnnnnnnnnnnnnnnnnnnnnnnnnnnnnnnnnnnntggctatggcagcacatggcacatnnnnnnnnnnnnnnnnnnnnnnnnnnnnnnnnnnnnnnnnnnnnnnnnnnnnnnnnnnnnnnnnnnnnnnnnnnnnnnnnnnnnnnca

SEQ ID NO: 4371 - DNA, 900 bp, Macaca Fascicularis
  misc_feature (1)...(900): n = A,T,C or G
aacctattgatgaaagaggtcccatcaaaaccaaacagtaagttgctcttaatgcatctgtggacgaagaaacttatgttatttgcagttttacacattaaggtgacacattctcataaagcagaatttgtcttctgataccttcgattattaaaatcacacagcgcagtttcacctgaagaaattaggatgcagaatttctgattgacaaaaacctactacttgagggtttttttttgtttgagaaggagttttgctctcgactcactgcaacctccacctcctgggttcaagcgattctcctgcctcagcctcctgagtagctgggattacaggtgcatgnnnnnnnnnnnnnnnnnnnnnnnnnnnnnnnnnnnnnnnnnnnnnnnnnnnnnnnnnnnnnnnnnnnnnnnnnnnnnnnnnnnnnnnnnnnnnnnnnnnnnnnnnnnnnnnnnnnnnnnnnnnnnnnnnnnnnnnnnnnnnnnnnnggctagttgagtatttttaagacttgctcttactgcttaggtttaggagtctccaaaacttgtaggtttttgtatttgctattgctatgtgagggaatgctgttaggttaaggctcagtaaaatgaaaaatttatgacagttaaagtaagggaatgggattattgttccctaagataatgattttctttattgcagaaagttgggttagatcctggatgatagttgatctaatttatacaacaaaggggagataagactgtggttccttaagtaaagggatggacttgagagttgatagggaaggatatataagattatcatttgctttcaacaaggtgaatagataccaatcctctcttctacttttacagatttgctgccattcatgctgaggctccagagttcatggaa

SEQ ID NO: 4372 - DNA, 615 bp, Macaca Fascicularis
  misc_feature (1)...(615): n = A,T,C or G
ccnnnnnnnnnnnnnnnnnnnnnnnnnnnnnnnnnnnnnnnnnnnnnnnnnnnnnnnnnnnnnnnnnnnnnnnnnntgcggctttataagcgnnnnnnnnnnnnnnnnnnnnnnnnnnnnnnnnnnnnnnnnnnnnnnnnnnnnnnnnnnnnnttgatgagagcccggtttgaagaacataagaannnnnnnnnnnnnnnnnnnnnnnnnnnnnnnnnnaaggaggctgaggaagaatnnnnnnnnnnnnnnnnnnnnnnnnnnnnnnnnnnnnnnnnnnnnnnnnnnnnnnnnnnctatgagagatacgattgctacaaggtcccagaatggtgcttagatgactggcnnnnnnnnnnnnnnnnnnnnnatcctgattactttgccaagagagaacagtggaagaaactgcggagggaaagctgggaacgagaggttaagcagctgcaggaggaaacgtcacctggtggtcctttaactgaagctttgccccctgcccgaaaggaaggtgatttgcctccactgtggtggcatattgtgaccagaccccgggagcggcccacatagagagagacccctcatctttcatactnnnnnnnnnnnnnnnttacacaa

SEQ ID NO: 4373 - DNA, 771 bp, Macaca Fascicularis
  misc_feature (1)...(771): n = A,T,C or G
tccataagcacttnntagaagagtgtagcatctgtctaccatnnnnnnnnnnnngttgtatctttgctcacagtatttcaaaaatttttatgggtgaaaaaaatgtacattttttaatttattggaaaagtgtattgagttgttgaattaaattctcaaatgggacaatttagtgtaaagagaagcactggttttggagacaaaagcacagggctgtggtccctgttcnnnnnnnnnnnnnnnnnnnngacctcgagcaaatgatttaacttctctgtgcctcagtttctccatatacaaaatggggataatgataccaaccattgcctacctcatagagatgttatggggacaaacgaaataatagagataagcacgaatgcttnnnnnnnnnnnnnnnaaaggtgctatataaattgaagttgtgtttttaatgatccaattattaattatgtttagggtttaaataacaatactgttagtcacgttaagaataagttttgttttgatgcatatttccaattctcttctgtgaccagatcttgatcattcaaccagtaatggtacctgaggaattgaaatgggtatttgttttctgtgtgtttctgccggtagtatttcaattctgaatatccagaaaagactggagtttaatttgtaatatcttatagtttacatgtaataaaacttattcaagctgtatataaaagtatggttacatgtaaatagcaggtatgttgtaattaaaggcacttatcaaattgtcttgct

SEQ ID NO: 4374 - DNA, 748 bp, Macaca Fascicularis
  misc_feature (1)...(748): n = A,T,C or G
atcaagagtgnncnnnnnnnnnnnnnnnnnnnnnnnnnnnnnnacctaatgggtatgccggagttagatttcctactttaccgaatataacttctttcctagccttcatcattcaccactgcttcaacattctgtcacaaagaaattctcagttctacaaattgctactgaaaagaataactgcaaaggattaaacataccactgtgtttcaatacataagttcatggtggcataaagccaccttagggggacgctaggaagtcaacttcttattctgcaaaaaggcaaagtcaaaggatcaaggcggtattctgcctttcccatgaaagaggactgcccagtaacccatagttcaagaaggctctctttagataggnnnnnnnnnnnnnnnnnnnnnngaaggaatgctagacttgaaagtcaccattttgcagtccctaaccttagccctgatgtagtggctgctaacatcacaaaagacagcctctgtcccttctaatccaagaccacacacagcagcacttannnnnnnnnnnnnnnnnnnnnnnnnnnnnnnnnnnnaacctctagatctaaatgacaacttaaagcaaatacaaggacagaggctcatgttcaacagcaccatggggacacagtacgactcagactgggaaatcgtagannnnnnnnnnnnnnnnnnnnnnnnnnnnnnnnnnnaaaagaaagaggcagaactcacagattaaaaaaagttcacattttgag

SEQ ID NO: 4375 - DNA, 697 bp, Macaca Fascicularis
  misc_feature (1)...(697): n = A,T,C or G
gtgccatgttgaaatgtgnnnnngtataaatccttgattttttcccgtttgnnnctgatgcccttgatccattgtttccttcctattacnnnnnnnnnnntctgtgacactttctcttcaactctgattggattcactgtgcatgcttcagtgggatatgctccacctttcagtgnnnnnnnnnnnnnnnnnnnnnnnnnnnnnnnnnnnntctgatcgtctttaccagtgnnnnnnnnnnnnnatttagtgctaccaaagggnnnnnnnnnnnnnnnnnnnnnnnnnnnnnnnnnnnnnnnnnnnnnnnnnnnnnnnnggattgagaactgcacatgtgacagaatggattgaccctagttggttnnnnnnnnnnnnnnnnnnnnnnaaattgctnnnnnnnnnnnnnnncataatatggattggaannnnnnnnnnnnnnnnnnnnnnaggaataannnnnnnnnnnnnnnnatagtcagcaaacttggatagtctctagggctcatcgtttttcatactacctctctcttctggcctgtgtctaaggaattgtacagcataggccagggccaacaaaatggannnnnnnnnnnnnnnnnnnnnnnnnnnnnnnnnnnnnnnnnnnnnnnnnnnnnttgttattctgtattttcctcaagtgagtacatactatttggtttcaggatttctttcc

SEQ ID NO: 4376 - DNA, 3379 bp, Macaca Fascicularis
acttgcgggggcggggaggctgcggggtcagaggcgcctggagggagcgaatcctggcccaccgcctgcccaaccgcgtgaccttgaacggattaatgaacttcacgcctcaacgtccaggtctgtaaaatggggtatctaacgcagaccgcacagcccagctgtgtttagcaaacttccgggagccggttggagcctctccccgtccctagcggtgataccaggtgacgatatgccgcggggggtccagcggaggccaccctagggcgttgctgctgcctttgggagtatggagctccaaatcatgtcgcgacaggaggatttcgggaggcctggatcctcgcgccagggggatgtgcgaggcgatggaggtgccccagccggagcccgcgccaggctcggctctcagtccagcatgcgtgcgcggtggcgcccagcgtcccggccacctcccgggcctcctgctgggatctcatggcctcctggtgtctccggtgcgcgcgaccgcttcctcgccggtcaccaccctcacccagaccatgcatgacctcgccgggctcggcaggtaggacaccccaaggaggctggatatgggggtgagaggcccggtctggagtcctgggcctcctggagaaccgggcatggtattcgaatccaggaggtggagtccgaatccaggagggggaggcatcctgggcagtggagagccacagccgcctgacgcgcctatccctgtctcgacgggcatctgaatcctccctgtcgtcagattcctccgaatcttctgatgcaggtctctgcatggattcccccagccctgtggacccccagatggcggagcagacgtttgaacaggccatccaggcagccagccgggtcattcgaaaagagcagtttgccatcagacgcttccagtctatgccagtgaggctgctgggtcaaggccctgtgcttcggaacatcaccaactcccaggcgcccgacggccagaggaagagcaaggcgggcggtggagctgccagcagctctggggaagacaaggagaacgatgggtttgtcttcaagatgccatggaagcccacacatcccagctccacccatgctctggcagagtgggccagccgcagggaagcctttgcccagaggcccagctcggcccccgacctgatgtgtctcagtcctgagcggaagatggaagtggaggagctcagccccctggcccgaggtcgcttctctctcacccctgcagagggggataccgaggaagatgatggatttgtggacatcctagagagtgacttaaaggatgatgatgcagttcccccaggcatggagagtctcattagcgccccactggtcaagaccttgcaaaaggaagaggaacaggacctggtcatgtacagcaagtgccagcggctcttccgctctccgtccatgccctgcagcgtgatccggcccatccttaagaggctggagcggccccaggacagggacacgcccgtgcagaataagcggaggcggagcgtgacccctcctgaggagcagcaggagcctgaggaacctaaagtccgcgtcctccgctcaaaatcactgtgtcacgatgagattgagaacctcctggacagtgaccaccgacagctgattggagattactctaaggccttcctcctacagacggtagatggaaagcaccaagacctcaagtacatctcaccagaaacgatggtggctctgttgatgggcaagttcagcaacatcgtggataagtttgtgattgtggactgcagatacccctatgagtatgaaggcgggcacatcaagactgcggtgaacttgcccctggaacgcgacgccgagagcttcctgctgcagagccccatcacaccctgtagcctggacaagagagtcatcctcattttccactgtgaattctcatctgagcgtgggccccgcatgtgccgtttcatcagggaacgagaccgtgctgttaacgactaccccagcctctactaccccgagatgtatatcctgaaaggcggctacaaggagttcttccctcagcacccgaacttctgtgaaccccaggactaccggcccatgaaccatgaggccttcaaggatgagctgaagaccttccgcctcaagactcgcagctgggctggggagcggagccggcgggagctctgtagccggctgcaggaccagtgagggcctgcatcagtcctgctacctcccttgcctttccaggcctgaagccagctgccctatgggcctgccaggctgagggcctgctggaggcctcaggtgctgtccatgggaaggatggtgtgggtgtcctgcctgtctgccccagccccgattcccttgtgtcatcccatcattttccatatcctggtgccccccacccctggaagagcccagtctgttgagttagttaagttgggttaataccagcctaaaggcagtattttgtgtcctcaaggagcttcttgtttccttgttagggttaacccctcatcttcctgtgtcctgaaaagctcctttgtgtgtgtgtcagcggaggctgggggagagctatggtccctgaggatgggtcagagctaacctccttcctggcctgggagtcagctctctgccctgtgtacttcccgggccaggactgcccctaacctctgtaggaaccgtggtatgtctgccatgttgcccctttctcttttcctctttcctgtcccaccatacaagcacctccagcctgaacagaagctcttactctttcctatttcagtgttacctgtgtgcttggtctgtttgactttatacccatctcaggacatttccgtagactgtttaggttcccctgtcaaatatcagttacccactcagtcccagttttgttgccccagaaagggatgttattatccttgggggctcccagggcaagggctaaggcctgaattgtgagcctgctggaagcccagcccctactgctgtgaaccctggggcctgactggtcagaacttgctgctgtcttgttgcggatggatggaggttggatggatgggtggatggccgtagatggccgtggatgcacagtgccttgcacacccaaaccaggtggaagcattttggtgagcatgacagcctgcagcaggaatatatgtgtgtctatttgtgtggacagaaatatttacacttagggtttggatctattcaagaggaactattcaagtcagaagcagctaaaccaaggactcagcaccctctggattctgaatctcaagatgggagcagggctgtgcttgaaggccctgctgagtcatctgttagggccttggttcaataaagcactgagcaagttgtaaaaaaaaaaaaaaaaaaa

SEQ ID NO: 4377 - DNA, 1697 bp, Macaca Fascicularis
  misc_feature (1)...(1697): n = A,T,C or G
aaaaaaaaaagagaattttgataataggcccattttaagtggctgtacctctctatggttaactgcaatataagcagcattatggcacaatctcaaggtctaaggtcattggtggaatattgtgggcagaacactaaagacagtcttgaaagttctaatatttgattcatttcatacacttcgcacaggcatgcgacagcacaggagaaaaattgcaactgtaaatgatgccacaatagcaactatttctaaacagaatgtttactggctccagaagtgatgcaacaaaatgcaacgttaggactgagttgaactcagtgctaagtgcatgattctggctcaggtaatttctgaggtttgcctcagatagactgatggctccaaattcaaagatagtggcattcccaacaggatggcatggagtggctaagtaactgatcagtgatggcatatctactaaaaggaacattatgaaaattctggtaattgtggatatatgcttgttttctaattcatctgtacttagtattttatagaactcataatcttatagtcttcaaagtatactctgcagaacccatggggtctccacagagtcaaaaatcttttcataacactattactttttttttctctgttatttgcactgatggtacaaaagcagtggtggagaaaactgatggcacctcccacatatcaaagcaggggcaccattgtattcttcactgacctgcactcacattaaacactttcacttaatgtcctggatgaaactaaataggtttttttattttttgagacaannnnnnnnnnnnnnnnnnnnnnnnnnnnnnnnnnnnnnnnnnnnnnnnnnnnnnnnnnnnnnnnnnnnnnnnnnnnnnnnnnnnnnnnnnnnnnnnnnnnnnnnnnntagctgggatcttacaggtgtgtaccttcacacctggctgattttttatttttagtagagcatgnnnnnnnnnnnnnnnnnnnnnnnnnnnnnnnnnnnnnnnnnnnnnnnnnnnnnnnnnnnnnnnnnnnnnnnnnnnnnnnnnnnnnnnnnnnnnnnnnnnnnnnnnnnnnnnnnnnnnnnnnnnnnnnnnncacagctggtgggacagggattttaagttttaaaaaactcttctgtggagcttatggtaggtaatttgcctaagagttgtaaagcagtgcaacactaggcgaggggctatgtgtagctattgaggattaagggatagtgaaatgaactttaggaacattctcagccataagcaagagctggattcacacaaccaatttttcaaaaaaaaatcaacttaagatacccataatttgggcacctttatatttcatgatgagaaagcgcatgttaactacatgtttaaatatattttatttcaagttaatataacagccatgatttgttcatttaagtgaaatgcctagataaaaacctcaagtgtcacttggctaaaatgttggagacagtaaatgtaagccactagagtaatgactctggttctttagactactgcatgtaccttactgaaatacaggaatgcacattgataaaatgcataatgtcttcacatgtctcaatcctcattcctcttcctttcatgcctccctgtaatgcctcagtatccaatataaaactacaaaaactacaaaaaaaaaaaaaaaaaaaaaaaaaa

SEQ ID NO: 4378 - DNA, 692 bp, Macaca Fascicularis
  misc_feature (1)...(692): n = A,T,C or G
ccaggatgctnnnctttctccttcacgagagtcccccccaggatccacacagcgactcgagcagccttccgctcagccagaggagggccgggctcccccgcctgctctcagtggtggcgtctggcccttcctgcggtttccaaggcctccggaagcaccaacccagttctcagttacctcctctggccggaaggcctcacgttgtcctccagagctgctctgggcccagggctggctccgtgaccacccgatggacgtgccgggcagcatgggctccaaaagcagcatccccagctgctctcccaccccaccccagctgcccggcagctgggccctcgagggctctggggacacttccataggaaggggcccggcactttgtgattgccacgtgtttcgtgttaagccgcctgcccccagtgcaaatctctgtgttttgctctctcctgaacaaaaatgtaaaccgacgccggaaagcaaatggtatcgaatacctttcttgcccataagggtttttacaaagaatgtgtctcactaggaactaggacactcatcggcccgagaccaactcctggataaaaggaataaggagaatcgtgtttgtaacgagttacaggattgtttctttcctggattttaaacttttgttaaattgtgaaattatggaggagttttatagaaaaaaaaagtga

SEQ ID NO: 4379 - DNA, 653 bp, Macaca Fascicularis
acgagagatggtagaaataaaggatacaagacagagagataaaagacagctgggcgtgggggaccactaccaccaaaatgcagagactggaagtggccctgaatgcctggctgcgctgttatttattggatacaaagctaaagggtaaagagtgtgagtcatctccaatgattgatgaggtcaggtgagtcacgtgtccgccggacagggggcccttccctgttaggtagcggaggtggagagaggacagcttacatcattatttctcctatgctcttttcagaaagatcaaagactttaatacttccactagttttgctactgctatctagagggcagagccaggtgtacatgaaagtgaaacaggagcgtgaccgctgaagcacagcatcacagggagacggttaggcctcccgataactgtgggcgggcctgactgatgtctagctctgactaccactagaccatggtctgcttggtgacaggcgtcttcccagacgctggcattaccgctagaccaaggagccctctggtggccccctctgggcatgacagaggctcacactcttgtcttctggtcccttctcaccatgccccttcagctcctatctctctatggcctggatttccctaggttataattgtagagcaag

SEQ ID NO: 4380 - DNA, 631 bp, Macaca Fascicularis
  misc_feature (1)...(631): n = A,T,C or G
tgaaattaatatgtctgctataaaaaannnnnnnaagannagatattaaattaaattnnnnnnnnnnnnnnnnnnnntttctataaaatattatcgagatgtgcataacgtaaaatgctcccttttggtactgggggatagagaagtgggaaagaatttttctgtttctcaaaatatgtctttaggaaattcagaatcattttggttctgtgttttcacatttgggctggacttttttcccctagcttataacaatatgttcaaatattctcaatgcacagttgttaaggagtaattgtcattaaaatatatttcatgannnnnnnnnatatcaaactctccatctctcaatcctcctcctcctcctctctctctctttctatttctctctttctcttttccctctctctttttctcctccccttctctctcctctttctctttctgtctgtcaaatgctcttttggctttaacactctattaaatatattttttctagattgaatactgtgaatgctaagatttatgattctggtcatcttattttgatataaaaaatcaggatgctagctgagttctgaattactgtttcnnnnttgaaacatnnngagaaaaannnnntaataattca

SEQ ID NO: 4381 - DNA, 790 bp, Macaca Fascicularis
  misc_feature (1)...(790): n = A,T,C or G
catcagnnnnnnnnnnnnnnnnnnnnnnnnnnnacttctccaggactgtgtggatggcctgtgaaagaagtcaaagagaagtttaaagactnnnncagctactccacttcgaagcaggctgnnnnnnnnnnnnnnnnnnngagcgaaggacccnnnctgaggctttggaggtcaaccattgaagtctctactgtgccagaggaaatcttaaagcgcctacttaaagaacagcacctctgggatatagacctgttggattcaaaagtgattgaaattctggacatactgccaaactgaaatttaccagtatgtccaaaacagtatggcaccnnnnnnnnnnnnnnnctacgttgttttaagcttgatgttttaggttcctgaattcccnnnnnnnnnnnnnnnaatgaatgccgtttggatctgttccatgaagaagctggaggcgtcgtggagaagtggaannnnnnnnnnnnnnnnnnnnnnnnnnnnnnnnnnnnnnnnnnnnnnnnnnnnnnnnnnnnnnnnnnnnnnnnnnnnnnnnnnnnnnnnnnnnnnnnnnnnnnnnnnnnnnnnnnnnnnnnnnnnnnnnnnnnnnnnnnnnnnnnnnnnnnnccccagctacttggaaggctgaagtgggagggtcacttgagtccaggagtttgagcctgtggtgagctgtgatcacgctattgaactccagcctagacaacaaagggaaactctgtcttcaaaaaagaaaagaaaaagaaaacaagagaacagagaatgactggtgtcaaccaaataa

SEQ ID NO: 4382 - DNA, 543 bp, Macaca Fascicularis
ctcccaggatcatgccattttccagcctcgtcctcccaagtagctgggactacaggcacgtgcccccacgcctggctaatttttgtatttttactagagacaggtttcaccatgttggccaggatggtctcgatctgttgacctcatgatccgcctgcctcggcctcccaaagagctaggattacaggcgtgagccaccgcacctggcctgccattatttttttaaccaattttctattggcaggaatttgggttttctcaatcccttaccaacacaaaataaccttgtatgaacatctaatattctttcaatttaggaatgaatgacttagccacgtttgagtaaaatggtgtctgttctggtctagattcctttctgtcttgaattgtccaaagttctcctcactctaaactcttgtgccaggatgtatcctatgtaagactcattttcttcatctctgcttatgaattatctaaaagcaagtaaaaagtcatattatttgtaaagcattcattcctttaagacagttatgtaataataaa

SEQ ID NO: 4383 - DNA, 734 bp, Macaca Fascicularis
  misc_feature (1)...(734): n = A,T,C or G
agatgatcaaacttatagatattgnnnnnnnnnnnnnnnnnnnnnnnnnnnnnnnnnnnnnnnnnnnnnnnnnnnncagagacctcaannnnnnnnnnnnnnnnnttnnnnnnnnnnnnnnnnnnnaaataggtgattttggtctagctacagtgaaatctcgatggagtgggtcccatcagtttgaacagttgtctggatccattttgtggatggcaccagaagtcatcagaannnnnnnnnnnnnnnnatacagctttcagtcagatgtatatgcatttgggattgttctgtatgaattgatgactggacagttaccttattcaaatatcaataannnnnnnnnnnnnnnttttatggtgggacgaggatacctatctccagatctcagtaaggtacggagtaactgtccaaaagccnnnnnnnnnnnnnnnnnnnnnnnnnnnnaaaagaaaagagatgaaagaccactctttccccaaattctcgcctctattnnnnnnnnnnnnnnnnnnnnnnnnaaaattnnnnnnnnnnnnnnnnnnnnnnnnnnnnnnnnnnnnnnnnnccaaacagaggattttagtctatatgcttgtgcttctccaaaaacacccatccaggcagggggatatggtgcgtttcctgtccactgaaataaatgaatgagagagttcaggagagtagcaacaaaaggaaaataaatgaactatattttttcttttttttttttt

SEQ ID NO: 4384 - DNA, 344 bp, Macaca Fascicularis
  misc_feature (1)...(344): n = A,T,C or G
ggtgcacacgcatgtgcactgtggtgggagtggggcaatttggggaatatgttacatgtgtgactttgttttgccctggtgaagtgaatnnnnnnnnnnnnnnnnaaatgtttggacacttgcaattgctcatggatgactttatatgttttagtcttagaaaaattgtaccctttggtagaagcacattttctttccaaagttggttattaaccacagaattatagcagttactcataacaggtttgaaaatcaatagcatctgcaaatggattaacagattagagaatcaacagcatcggaaactaggtcaaatcttttagcttgtaacaagtgtatgagga

SEQ ID NO: 4385 - DNA, 735 bp, Macaca Fascicularis
  misc_feature (1)...(735): n = A,T,C or G
atcaatacttnnngaactatctgtgaaaatattgctatgcaaaaataaaaaatatattttcatcctgagtttcataattagctttcactcatgtctgtgattcattctgagttgttttcttgtatagtttaaagtcagagtgggtatttgtttgcttatatatgtatagatatttctaattatttctagcaccatttattaaaaagtctccttttttacccattgcattattttgtttaaattattatgactaaaatcaaattaccaaatacacatggtctattttgaactatttattctgtttcattgatttttatgtgttccttttctccaatatgattgtcttaattactgtaaatttgttggaaatatgggagtcaaatttaaggattttaattttgtcctcttatcaagttgttttggctcttctaggtcctttgcattttcctgtaacatttggaattagatggtcaatatttccctgaaataaagcctgctgggattttgaacaggattgtatggaatctataaatcaatttagtgagaattaataacttacattaattagtctaattgatgaacatagtatcatcttccatttatttaggtctttgacttctcagaaatattttatagttttcagtgtgtaggtctggaagttcataaaattctaagtgttttatggttttgactgtaattgtaaatacctcccannttaattgttannnacagaaa

SEQ ID NO: 4386 - DNA, 789 bp, Macaca Fascicularis
  misc_feature (1)...(789): n = A,T,C or G
gtggtttttagacccatgattantnggaaaacatgtatggaatgtttaagaaagtcaatgccagagaaannnnnnnnnnnnnnnnnnnnncaggccctaaactacacnnnnnnnnnnnnnnnnnnnnnnnnnnnnnnnnnnnnnnntgtcctaattccgnnnnnnnnnnnnnnnntgtgaagccgaaggacctagggctgcccnnnnnnnnnnnnnnnnnnnnnnnnnnnnnnnnnnnngatggaaccccaacctcaaaaacannnnnnnnnnnnnnnnnnnnnnnnnnnnnnnnnnnnnntgaggaagttggagtnnnnnnnnnnnnnnnnnnnntcaaagacacgacggtgggcactctgtcccagcggatcacaaaccaggtccatggtttgaagggactgaacnnnnnnnnnnnnnannnnnnnnnntacctggaaaaagtcgccacaggcaagctgcctannnnnnnnnnnnnnnnnnnnnnnnnnnnnnnnnnnnnnnnnnnnnnnnnnnnnnnnnnnnnnnnnnnnnnnnnnnnnnnnnnnnnnnnnnnnnnnnnnnnnnnnnnnnnnnnnnnnnnnnnnnnnnnnnnnnnnnnttccgtggtcgccctgcacaaccnnnnnnnnnnnnnnnnnnnnnnnnnnnnnnnnnnnnnnaaagaagggcaggagaaagaagacagcaaaaaggataggaaagaggacaaggagaaagataaggaaaagagtgatgtaaagaaagaggagaaaaaggagaaaaagtaaaacatgtattaaatagctt

SEQ ID NO: 4387 - DNA, 708 bp, Macaca Fascicularis
  misc_feature (1)...(708): n = A,T,C or G
gcatagtaagaaggagtgatcagcatcctccccttcccctaccctaagcagcagcctgggtgactgactggcctgggcctggggtcggggggggggtccccaagccaaattaccccagggtttctgctccttgtggctgccaggggcctgcagggtctgggtgggtctcccaggagagggatgctgagggggagatcagctgtctggagtgttctgatgcaagtctctcctgagcctcctgatacggctctaaagggagaagtgaggcccagccctgcctctccagggtgcaaacggccctgccaggccccagttcttcctccctccttctttcccaggaaagggcagcccagtccatggccttcttgggcctctgggcacagagccaacgttcgnnnnnnnnnnnnnnnnnnnnnnngtcatagcattctccaccgctcagcctggagcctgggcagggctcccagcctgcactgcctcccactgccagtggggcgtgatgctctcaggcttctgtcccgaggnnnnnnnnnnnnnnnnnnnnnnnnnnnnnnnnnnnnnnnnnnnnnnnnnnnnnnnnnntcccagggagaagaagccatgcgccagggcagggcccgtgccttagacttctcccgacccccagagccctggcacacaggtctgggcaccacacagtgcttggaaattctcagtgaatgatgttaa

SEQ ID NO: 4388 - DNA, 159 bp, Macaca Fascicularis
gaagggctgggacggctgtcagcgcctgtgcttccaaggtaagagccaaggactaatgagggccatcaggttctgggcagggacagggggcatcaggaagccttaccccacgcccactgcctgcacaagcctcaggcctatgggggtcactggccttga

SEQ ID NO: 4389 - DNA, 1192 bp, Macaca Fascicularis
  misc_feature (1)...(1192): n = A,T,C or G
tcaactatttctgcttctctcaggccctccttgctggaaaaaggagggctagtgacannnnnnnnnnnnnnnnnnnnnnnnnnnnnnnnnnnatatagaggtaaaacngcacttcttggatgnnttaataataaattaaggttataatggttgccatattagagaaaattacngaaaggaggcccagcgaaagtaaaaattagtttggaagtattaagctagggatatcaaaactgaaaaaaaaaatagcttcccagatagcattctactatatgcaattttttnnnnnnnnnnnnnnnnnnnnnnnnnnnnnnnnnnnnnnnnnnnnnngacatatagtagctannnnnnnnnnnnnnnnnnaattctattacgttttaaacaaattactgagtaatttccctcagtaatcatttctgtaactcagataaaaatagaaatttatgtttttatttttgttacttataaaagtatatttcctagagaaagtatcagcagtggtagagaccagaaaaagtaagtgtgtgtgttctaaacagtgattccaactccgtgtgttcagagaagaacactttgaccctgtctgtgtttacagtccctgatgacagtgttctgtcagtttcctcagccttgttgtatttctttctttattttggctttacagacattaggtctcaagttatgagaatctccctggccttcaggacctaaacttttttctgtcattcttttgcttttaccaggctcagaaggacatgccaggtgggagacgtgtttctcttcagaggtgaagaaaaggtctgagctgtggaatcagtagagaaagccttcgtctcggtgactccttggttttcaacccacctagcctcaggcagcccggaggcccttttaccgctggatactgatgagatgttttaggtccttgcactttgcaaaactcctttctcccagtgggatattattaggacatagccaggctagaaagaccgtgggaagctttggaggtaggaggataggatccagacagggttgcaataagaagtagggcattctctttggtgcactccatagtccagcggcagtcctgagctgattccagtaaggaactaagggtggactttcttctttggttctttggcccgtttgatttcctcagctggggcagggtgannatggtgaannnnncagcctc

SEQ ID NO: 4390 - DNA, 519 bp, Macaca Fascicularis
  misc_feature (1)...(519): n = A,T,C or G
agtggggaggaagcagaggcagggcaagttcagggtgggagtctggggggaatctcatttcagtggggacaggaaggctcagcccagctggtggccccacaaaaatgcctagcacacagtaagtcctatgcaactgtttgctatttctattaatgtgaaagagagtcacgtggtccacaagcaaaaannnntctcccaaagagaccccatggtccccagtaccacagtctctgcaatccaggttcctgggacagaaggacgggacaagaggcagaaacagaccactctctaggaccttgtctctccaattcttcctctttcactcttgcttggtggaagtagcatcaaatcccacaataaggtttactgttgattttatgttaaatccccagtccagggggcaaacttccccaactccagggccctcccgggttcctcagtcaaggttctccttccctggatcttctgcctcccagtcggtgcttctgagatctccgagactgggggggggggcggggg

SEQ ID NO: 4391 - DNA, 722 bp, Macaca Fascicularis
  misc_feature (1)...(722): n = A,T,C or G
agtgatnnnnctgcctcagtnnctggagtacctgggatcacaggcgagcgccactggnnnnnnnnnnnnnnnnnnnnnnnnnnnnnnnnnnnnnnnnnnnnnnnnnnnnnnnnnnnnnnnnnnnnnnnnnnnnnnnnnnnnnnnnnnnnnnnnnnnnnnnnnnnnnnnnnnnnnnnnnnnnnnnnnnnnnnnnnnnggcccgcttttcaaagcagaactacaaagatgagaaattaccagaagcctcgccttttcctaagcaccagcagaaagagctgtgccctagggtggagtgagggtggagggcgtgtcagccacgagtggaccttgtatcgcctttgctaggcccaggtaggttgttggcctcttacttgggctgacttgaccaccgaaagagaaaaaaacaactctgttctcaggactggggacggacggctttggccgagcctttgagcctggctcactcaggtgtcagggacttgaaaccgccctgggccttacccttggccccactcagcactctgccaaccaagaccactgatgtggaaaacccagtccccaccccctcatgagctgttgacactgttgttccttgctgaattggattgttgatttgtagttcagaggcgtacagcgagttggtgattagacgttatgtgacgtnnnnnnnnnnnnnnnngatcacccaataggaaataaagcaggcatctctggaccttacc

SEQ ID NO: 4392 - DNA, 759 bp, Macaca Fascicularis
  misc_feature (1)...(759): n = A,T,C or G
tgccatttcatgtccataaaagagaccacccatatcatgcgcacaattagatttctcacactctaactgtatatttgtatgatattttgaaatctcctaannnnnnngcnnnggctattnnnaattaattgtcttgcactggccttctgatgaaatgttaacaatgcctattgtaatatagaaaaaaacattctatctactgatttgggctgaatgtatgtaaataggtttctaaaaagtcagatgtttgagcagtggcctacaaatcagtaattttcagatgggagagattctttacattgccatggcatcttaaaagctgtcttcatgtaaattgactgtactaggcctactggggatcagagttcccaagaaaggaaaccttttcttgtatctggattcaaatttatttccaatgtttcaagtggaaaacatgactctttattgtctgtaaatctaacattattacttttcctcttagaagaatattgtattgttagatgtttgttgagctnnnnnnnnnnnnnnnncnnnnnnnnnatcttcgttagtaatctgtataatactttgtatacaagtactggtaagattgttattaaatgtagcttcagtcgttaaattactatagcaaagtagtacttcttctgtaatatttacaatgtattaagcccacagtatattttatttcaatgatgtaattaaactgttacttattcaaagagaaaacatctcatcatgtctattgtccaaagttacctg

SEQ ID NO: 4393 - DNA, 764 bp, Macaca Fascicularis
  misc_feature (1)...(764): n = A,T,C or G
gaagtgttttggnnnnngtatgtttcagatttcagaatatttgcatttaagcagttcagcatcnctaatctcaaagtctgaaacttgaaatgtttcaatgagcatttcctttgagtgtcatnnnnnnnnnnnncaggtttcagattttgaagcattttggattttcaggttagggaagctcaatctgtataagctatatatctttgcattatttgagctttaaaaatttcaagtatttttccacaatattttattacaaacctactgtaaaatttctagaatagtacaatgagtattgttatactcttctcctgggtctcctaattgttagtattttgccacattttcttatccttctctatnnnnnnnnnnnnnnnnnnnnnnnnnnnnnnnnnnnnnnnnnnnnnnnnnnnnnnnnnnnnnnnnnnnnnnnnnnnnnnnnnnnnnnnnnnnnnnnnnnnnnnnnnnnnnnnnnnnnnnnnnnnnnnnnnnnnnnnnnnttggcnnnnnnnnnnnnnnnnnnnnnnnnnnnnnnnnnnnnnnnnnnnnnnnnnnnnnnnnnnnnnnnnnnnnnnnnnnnnnnnnnnnnnnnnnnnnnnnnnnnnnnnnnnnnnnnnnnnnnnnnnnnnnnnnnnnnnnnnnnnnnnnnnnnnnnnnnnnnnnnnnnnnnnnnnnnnnnnnnnnnnnnnnnnnnnnnnnnnnnnnnnnnnnnnnngaggttgtagnnnnnnnnnnnnnnnnnnnnnnnncannnnnctccagcc

SEQ ID NO: 4394 - DNA, 745 bp, Macaca Fascicularis
  misc_feature (1)...(745): n = A,T,C or G
agatgaaaacagacnnnnntgtggtnnnagtgcacactaccnntcncacccatacacatccacgttcactgtaacaaagtgaatattcacaataaagcttctgagtaactttctgattactcatgataaactgattactcatgataaacctaggtcagataaactgatatgactaactgcaagagtcaagtattctatcggagagtaatagtttatgatgactcagtgctgccagagtaaagtttctaaaataacattcctctcgcttgttccccactaaaagtattagtctacacattgcactgaagttaaacgcaaaattatcagtgttttagaaatatgagtctggactgtgtaaataaaagtacaaacattatttccatcataaagtaagtattgaaatcaagttgtctctgtgtgctattcccagaatacatacttattcctatttttaagcatttgcttctggtttttttccctacctagaatgtcagatgtttttctattatctccccatttgtcagttcacctgaagataacatttttcattaaagcatctgagatctaagactacaattattattctaacaatgattattagcttgttcacttattttgataactaatgatcataactattatactactttctcattattttgtgtgcatgcctcatttccctgtgacttaaacctcactgagannnnnnnnnnnnnnntcatactttatactttcaattgcctag

SEQ ID NO: 4395 - DNA, 2008 bp, Macaca Fascicularis
  misc_feature (1)...(2008): n = A,T,C or G
ctaggcagtcactaatggcaccagaagaacctttatgattacatagcgtaagttccttagcactcctctagcagagactgagaatgaataattacatgttttaaagtggaagcttcttttgcagaccaaaagttattgatatactgcttttccagttgatggataatgaacaagcatttattttggtgtctgtataggtgatggtatatagtgttaagaatgtgcctaatggtaaaacttttagagccccatttttatccctgtggcccttacatgtacattttaaaaccctaaaggctaagtatttactgaaagttcctgcaaaccagtatttgtgcaggatttccaaagtcaggttccattaagagttaatgggaaatgactgtggtatgggcagtttccagctttttttttctttttctttttctttttgnnnnnnnnnnnnnnnnnnnnnnnnnnnnnnnnnnnnnnnnnnnnnnnnnnnnnnnnnnnnnnnnnnnnnnnnnnnnnnnnnnnnnnnnnnnnnnnnnnnnnnnnnnagctattcgggaggctgaaatgggaggatcgcttgagcctgggaggtggaggctgcagtgagccaagatttcactactgcactacagcctgggcaacagagcaagaccctgtctcaaaaatatatatatatattgttactactatgcttttggcacattatgtgtatatgaatgtagaaagtgaagaaatgtttcaggttctaagcaactaccttgtagaacagaacctgttggtaagttacaaactgtctgtgttagcatttccagttaactcagatatttgatggccaaataaagtagaaatcgatgaagtatctttgagacatacttgttgtatttcagaagacagacttttaaaaattttcctaaatttctttattgttaccattgtctctttcttatctaatatcttttcgtaatagctcacatgccagagcaaattgaatttgaatttcttaaaatgcatttgttacaaaaattgcgttattgtgagaccaggcagtggagactgaatttaaataattctcactgtacatcagatttagagaaatgaaagggaattaactagaatggctaatggttttaatgcctcttcttttgcatggtataaggctatgtggaataagacttcatttttagcaagttaggattttttccccctgatttttctcctggctgagatgaaaacctagtctgacattagacacagagcaatgaaaaagtgttgcataaatccctggagatgtggaatgtgcttatatcagagctgatattctctaaggccagaattcctgaaaaaggaaaaattgcttttaagtggtaggtcattttctcacctgctttgaagcctgctggattaaatatgagagttcaaagtaagggtagccagcaaaccaactgaactggaatctgattctgcttatctgaaaggagcttctttatttaagaacagcactgccctctccttagagaaccaatcttctactctggcccctttcatttctctcttgcaagaaaagttttcttcttagcaaggcttgggagggtgttatcacaaccgtgaaaagacttaaagatggtcttgggggtttcactaacttattgataaactcaggcttgtggtatgtgactttagtgttttgaattcagaagtgtgtttaaatataaaagtccctagttggggccaggcatggtggctcgcgcctgtaatctcagcactttgggaggccgaggcctggggatcacttgaggtcaggagttagagaccagcctggccaacatggtgaaaccccgtctctattaagaatacaaaaaaaaaaggccgggcgcggtggctcaagcctgtaatcccagcactttgggaggcctagacgggcagatcacgaggtcgggagatcgagaccatcctggctaacacggtgaaaccctgtctctactaagaaatacaaaaaaaaaaaaaaaaaaaaaaa

SEQ ID NO: 4396 - DNA, 732 bp, Macaca Fascicularis
  misc_feature (1)...(732): n = A,T,C or G
catatatggtttaataaatgggggataatttttttgtaaacctgtgctagtgccaagtctcatatttctttgccatctcagaattatttatctttttaccaccactgtttataaaatttccttagagatttttgaagtgaaaatagagcaacagggaaaaatgaaagaaatgtcttggttactgagctctaaatagacaggtttgatagcacttctcatgacacattttagttattcttataaaagcaaacgaacaaacatgagtgtaaattaaagacaaaaagaaaactctggttttatatttgagaacaagtgaaaaatcatgggtcaacataaaatcttgagaacccttttactttctctaggaaagcattatatagtggtgcattagtttagaaagtcagctataattttgcctatatttctagttattagctttgggggttttttgtactttaagacatacctgtaaattgaacctatgtgaattatattccactgtctgtgtattatagttcttttcctattagannnnnnnnnnnnnnnnnnnnnnnnngtaaattttttaggtatatacttaatagtttacaatgttctaaatttggaaggacttcaaaaaaaacttgttttaatttccatctgttttgtaatatctagctctatatgtaaatgatgggtttgttggtatttaaaatgaatacaacttgaatgtaattaaaatgctgttttttg

SEQ ID NO: 4397 - DNA, 755 bp, Macaca Fascicularis
  misc_feature (1)...(755): n = A,T,C or G
catccatgannaaaaggcactgaccatggaagtgatccgccaggtgaagggagacctggccttcctcaacttccagaacaacctgcagcagactccactccacttggctgtgatcaccaannnnnnnnnnnnnnnnnnnnnnnnnnnnnnnnnnnnnnnnnnnnnnnnnnnccgagactttcgaggaaatacccccctacaccttgcctgnnnnnnnnnnnnnnnnnnnnnnnnnnnnnnnnnnnctcagtcctgcaccaccccgcacctccactcnnnnnnnnnnnnnnnnnnntacaatggccacacgtgtctgcacttagcctctatccatggctaccnnnnnnnnnnggagcttttggtgtccttgggtgctgatgtcaatgctcaggagccctgtaacggccggactgcccttcacctcgcagtggacctgcagaatcctgacctggtgtcgctcctgttgaagtgtggggctgatgtcaacagagttacctaccagggctattctccctacnnnnnnnnnnnnnnnnnnnnnnnnnnnnnnnnnnnnnnnnnnnnnnnnnnnnnnnnnnnnnnnnnnnntcagatgctgccnnnnnnnnnnnnnnnnnnnnnnnnnnnnnnnnnntcagagttcacggagttcacggaggatgagctgccctatgacgactgtgtgtttggaggccagcgtctgacattatgagcgcaaaggggctgaaagaacatggacttgtatattgtacaaaaaa

SEQ ID NO: 4398 - DNA, 715 bp, Macaca Fascicularis
  misc_feature (1)...(715): n = A,T,C or G
atagagccaaaggttttgcatttgtaacaattcccaggtgctgttgctgctactactattccaaggaacacnnnnnnnnnnnnnnnnnnnnnnnnntctgcacacccatccactctcaactcccacaaaaaaaatcaacttccagagctatttcggtggaagtcctggttccatatctggtnnnnnnnnnnnnnnnnnnnnnnnnnnnnnnnnnnnnnnnnnnnnnnnnnnnnnnnnnnnnnnnnnnnnnnnnnnnnnnnnnnnnnnnnnnnnnnncagccagttttcatttctgaaggggcaggagagtgttatgaaaaatannnnnnnnnnnnnnnnnnnnnnnnnnttcagattaaataactattttctgtctgttctgtgaccaaccacatacaaacagactcatccatgcaccctccccctccgccttcaggtatatgttttctgattaaagttgagaagaatctcagaccagaaaaaaaatatatctatatttaaatcttacttgagtagaattgaattactccttttgggtgttgaggggtctataagatcaaaacttttccatgataatactaagatgttattgaccatttcactctccttctctcaaaagtgtatggtggaattttccagaagctatgtgatatgtgatgatgtcatcactctgctgttagcatacaatcaatttatgctatnttaaaaagaataa

SEQ ID NO: 4399 - DNA, 245 bp, Macaca Fascicularis
aaacccgaagagtttttgtcattgtggtggtggtattgttattaattgcctagatttttaaagggaaaattatttttttctctagattgtttcactgaaaaaatagaagcagaaacttgctccaaagtctcagtggtcgaactggaaattgcaccgaaacttggcatattggttttaaaatataaagttttagcccctatgtatattggttaacttggaaggaagagatatatatatgttttgaa

SEQ ID NO: 4400 - DNA, 712 bp, Macaca Fascicularis
  misc_feature (1)...(712): n = A,T,C or G
tcctaactgctttactcagaggacgtgtggcaatccaaacatctgatatatagccagtgtccacagcaccttctcaaactacatacttgctatccatttcactaggattttggggggttgggggagctatgagaaaaaatttgttttagatatttaagatatgtatttaaaatatggtcggtatgctttttgaaagggaactataaggctttttgtttgtttttgtttttgagatgggagtttcactctnnnnnnnnnnnnnnnnnnnnnnnnnnnnnnnnnnnnnnnnnnnnnnnnnnnnnnnnnnnnnnnnnnnnnnnnnnnnnnnnnnnnnnnnnnnnnnnnnnnnnnnnnnnnnnnnnnnnnnnnnnnnnnnnnnnnnnnnnnnnnnnnnnnnnnnnnnnnnnnnnnnnnnnnngatcaggctggtctcgaactcccgacctcaggtgatccgcctgcctcagcctcccagagtgctgggaatacaggtatgagccaccacacctggcctatttttctggaatcttaatatgtttagttgggaagtgtcccagaaatcctgatgaaaagtatagcaaaatcagaattttggtaattattagcaagtacaatactgctttgaactcaatacttttatatgaagcatataaagttacaaaaaaaaactaatgtattcaaatatttggatatattttcactgtttgtataa

SEQ ID NO: 4401 - DNA, 711 bp, Macaca Fascicularis
  misc_feature (1)...(711): n = A,T,C or G
tcacgaggaggagatggaagtcttgcagtgtacagctggggngaatgtgaacgtggagatgaatgcaaccccaggagtggacctaactctcctgttaaacaacatgagggctgagtatgaggccttggctgagcagaactgcaaagatgctgaagcctggttccatgagaggagtgcaacgctgcaacaacagatttccaatgatgagggagcagccacagcagccagaaatgagctgaccgaagtgaaacgcaacctgcaaaccctggaaatagaacttcagtccctcatggctgtgaaacattcctatgaatgctccttggctgagactgaagaaaattactgcaatcaactccagcaaattcaggatcagatcgggctgatggaggaacaactgcaacagattcgaacagaaacagaaggccagaagctggagtatgaacagcttcttgatgtaaaaatctttttagaaaaagaaattgaaatttattgcaacttactagatggagaagaaagaaaaagcaaatccacatgttacaaatcaaaaggatgcaggcctgtgaattctggaaatcaaggcaaagactcagcaaaagaaactattgtcaaaaccagtggttgaggaactggatcaaataggcagtgtcctttcactgagagtccactcagtgaagaaaagtcctctaaaataagcaacattacagtagagca

SEQ ID NO: 4402 - DNA, 727 bp, Macaca Fascicularis
  misc_feature (1)...(727): n = A,T,C or G
gggtacataccatggagttcatgntcacaggagaatttaggacagacacacgaggagtttaggaaggggaggtttaataggtagaagagaagggaaagagaaacagcttcctctatagatatctgcactcacaccgtgcatacctccaggctttaaggcatggcccataatgccttaaaaaaactgatggtctccaagtggaaaagaccagttggtcgtgaatgtgccagattttctagtccggtttgagaaggtggtttctgattggttcgatcaggtatgacatttggatagtgcatgtggaaggctggtcgcccctctctgatcttgtgcaaataggctttccagttgattgggcccatcttgtctaacacgtggctggcagagaagggaagatgaagccaccatcttgaaaatgtctagtcgttagtttctgctggcattcacccatgcaagctcccagcttgtttgtctatgtctgcagctcagctttacagactgctctttgttagaaaatgatttggagctgcttttcgttaaagagaaaagccttaccggggactcccatacccttactatctgcttaagtgatttcttcttaactcctatatcacttttacacagcacaaaatgatgtgtccataaatgagcctttgcaagattaccatttatcaaacaaaaccagtgatgtttagttaactgtttgtaatagtaaatggttagtaga

SEQ ID NO: 4403 - DNA, 664 bp, Macaca Fascicularis
  misc_feature (1)...(664): n = A,T,C or G
caggagaatcactnnnnnannnnnnnnnnnnnnnnnnnnnnnnnnnnnnnnnnnnnnnnnnnnnnnnnnnnnnnnnnnnnnnnnnnnnnnnnnncaaaaaaaaaaagagaaaaaaatctttatctggatctgttaaaccatatattactgatcactgcaagtgaaattttgagatattgtttctagtatttagatgatgaaaacattttggtaatactgtttcagttcaaagaattttatgtctttatcttttagaagaaagcaattatatatatattttttgctaaattatataaacttttaattacatcatgttctaatttaaacatgtattactcacttgaggccacttttaaatattcatactctttgacataagatgctttgtatatttctcatttcttttagttcttagtaagtcagctttaaaaagtacctgccaaccagaaccttccatattctggactannnnnnnnnnnnnnnnnnnnnnnnnagtgcagtaactgtggatttgcaattttgaaggggnnnnnnnnnnnnnnnnnnnnnnnnnnnnnnnnnnnnnnnnnntctgaagactttttaattgataaaagtgcacatggctattttgatacacaataaaagttgtgtttgctactttagaagctttantggcagnnnt

SEQ ID NO: 4404 - DNA, 705 bp, Macaca Fascicularis
  misc_feature (1)...(705): n = A,T,C or G
aagtcatacataaaactaactgccctttnacacttatacactgcaagtgagctcatgtcttaacgtctgattaataataaagtcattgacttcatttaggattatggaatgaatttttgaaacagttctaattctgcaaattcttaattacacttaatattctttgaccagttatgattttgaatattcaaaatatatacagcttcacgtttggtagcaactttaggataccaactagattcttttgtatattcagacattctgaaaacagtttttgtttctatgttttataatgggtaacttataagattgatactctttttcttaatatttagaatgttttaatatactgcttttctgtggaaatacactgttccacaaagtatgcagtgctgatgtacttgccatatggcaaacaaattatatagtcactcaatacagatagcagtttcattgtcaaatacacatttgatggcaagaataagactaattttgtcatcatagcataaatgttttattatgtattataagccacatacttcttgttggaaagaacatttcctattataaaatcttgcaaatcagcagaggtagttgtcattatatgggtatgcttcactttggtaagtagacaggtccctaaggcttgtagatcagagctttcttaaaaatgaattatgtggtgattgcacttcagcactccag

SEQ ID NO: 4405 - DNA, 670 bp, Macaca Fascicularis
  misc_feature (1)...(670): n = A,T,C or G
tctntgttatggacattttcagacatgcatagaagtggagaggatggtccttggaccccatgtgtccatcacctagctgcatcatttatcagttatggtcaacctggtttcatctgtatctgcctctttttcatctgtattgtttattgaaaatccaagacactaagccaatgcaaccgtgactactttgggagattggtagtctcttttgatggtgatagtgatggggtgcactatcataatcacatcaggtctgcttttcgcttctaatgttaactaacgaagttccagagatgggccttagaaatgtgttttaagaattaacaaggagtctcaaaaagaaatgagagggatgcttcctttcccttgcatccacaaaacaagagagactgttctgttgtaaaactctttcaaaaattctgatatgataaggtacttgagacccttcagcagaatgtcaatcttttttttctgtgtaacatggaaacttgtgtgaccgttagcattgttaccggcttgtactggtctcataactctggttttggaagaataatttagaaattgttgctgtgttctgtgaaaataacctcccccaaaataattagtaactggttgttgtacttggtaatttgacaccctgttaataacgcaattatttctgtgttcctaa

SEQ ID NO: 4406 - DNA, 2524 bp, Macaca Fascicularis
aaaacacaagtactggtgtttaggacttgaacctatcttttcaggggacacagttcaactcctaacagagcaccctaagtgggtactctctggtagtaggacaggcatttccatcttgtggagtgctgctctgaggttcactcatccttcttagatttggaaattgctctcgatgtcagctttcccttaaacttcaaatccaccttgaaattaaatgtgggctatgaaagttttgagacttttatcaggttggtgcaaaagtaattggggtttttgccgtcatacaaaccagtgtctctaaggaattagagacgttcttgtgtgtgaatgtcatgttgaaacaaatcaacactcatgagtgtaaagagaaaataactggtccaatcacactgccgtgtaaataaacagagcgctgtcaaggcacgttagcatgctaggcgttgttggtttatctctgcccttcctgtcatggaagtgtttcttgttgattcttacattcatgacattgattaaatccttcttgcctgttacattaacaaacaaacaaacaaaaagtttgattcactttgtaaaccctaagcttttaggtgacattttatttaatgattttgtttttctttctttgtttaaaaattgagatggggtcttgctatattgcccaggttggttttgaactcttggccgcaaacaattcttccagcctcagtctcccaaaatgttgggattacagatgtgagccaccatgcccagcctgtttaatgattttctgacaagtatggatccatttcatctcagctgataattactgacttagaaccctcctctgagatggtttttttcaggcaggctggattgcctggaatgtcttctgctcattcatggggttaaagagccatcatggtggtcaggaaggataggaaagctgacccatatttgcatccgactccagctttcagcatttctctcgtactaaggctcattgaatagagttcaatagaaacttctattcctgacaaccccatttcagccttggcagggagaccacgctgaagttatttaacagatctgttaaattaccaccaactcgaaaggctaacatttttctctaggaagaagagactttctttgtcctgttacctaaaaggatgtcagacattcagcatgtgcatatgtgtcctttcttacaaaaataggacatcagtgtgcaaacatcttttttttttaattgaaaatgagtgaaaatgaaagaaaataaaggcctctcttagcctttggaatggtgcagaatccttttgctttccctttagtgcagtcacttggaatgcgaccaaagaatgtatttaccactggaagaactgagtagcatatgaatgaaagtagaaaaatgcaacctggaaagcctgcctctgtgcacccaagaaactcttctctgtgtgttgctgtgtgccagggtggcttttcagtgggggcgtttggacttactacgaagaagcacacacctgagaaaaattaaaaagcagttaaaattatttccgttaacaataaagatgaggatatgtttttgttgtttaataaccatgcctatcctgatgacacctgtgcatttgagggaagtgcaactgatctgggctcagcctgcagtgtgtttattgggagaccttcatgtttctggctctctggagcacaggaagcatttctgagttatcccgactgtgagttcccagccagagtgttgagaaaccaaactgactgatatggtttggctctttccctacccaaatctcgttttgaattgtagctcccatagtccccctgtgtcttgggagggacctggtgggaggtaattgaatcatggtggatacttgccatgttgttctggtgatagtgaataagtcgcatgagatctgatggttttataaaggggaggtcccctgcacacgctctcttgcctgccaccatgtaaaacatgactttgctcctcatttaccttccaccatgattgtgaggccttttccagccatgtggaactgtgagtctcttttctttataaattacccagtctcgggtatgtctttattagcgcgtgagaacagactaatacactggctgtgcctcgagctgaggatttaccctaaccctcacttgggccttcccagacctgatcttgcttgaatggacaattctgttggtctttctggaaaattctctctgcttctcatttcccctgtagtgcttttcttaagaggagcatgggctccaggtactgaaaattggcatcgtgactaaactgtcctctgtcctgcacacaggctctgtgattctccttccacctccacctctatagccaagtgtgtgttaaggagtccgatgcaaattatttggatgatggataccctaaaaccctgattcaccactatgcaatttatgcatgcaacaagattacacttgtaccccataactttgtacaaataaaaataaataaataaagactgtatggcctttgagacaaaaaaaaaaaaaaaaa

SEQ ID NO: 4407 - DNA, 3890 bp, Macaca Fascicularis
attctggctaacccgaccccggtgtgtcaccgcgcccattggcgggtttgcttttattcgtttgttctgcgctccctcccgccttctggcgcgggcaccagatgctagccgttttgctcccaggcaatatacgaagcccaggttttccgccttactgggagcgctgcggatccttcgcaggctgcccggcaccctcgcaaggtccagagcacaacctccagaggagaacagaaggaagccagttttggggaaacttggcactctattcactacaggaaggagaaggaacagtagaaacgggctagagagtcccaccagatcaaatgccaaaccactgtctcccaaagatgtggtagcctcttctaatctcccagagagagagagtgagaagagcagatctcagagcagccagctgaagcaagcggacacgagcgaggagggctccccccgggagaatccccgggaggcagagggcgagctccctgagagcggtggccccgcagccccccatgacgccgagctgtcacctcgctggaacagcagtgaagcggctgtggctgtgcagcagtgccatgaaaatgattcaccccaattagaacctctggaggcagagggagagcctttcccagatgccaccaccgctgccaagcagctgcattcctcgcagggaaattcctccaggcaagagaacgcagagacgcccgcccgcagtacgggggaggacgcttcaccaggtgctggccacgaacaggaggctttcctgggtgcgaggggtgcgccggggtcgcccacccgggagcggcccaggggagaactaggcgaggcccctgaaggagccccaggtgtgtgtgcggaagaaggctccctgggaccccgtgacgcccgcatccagccccgcaagggcgcgtctgctctgacaggtgagcctccggccgagggtgcagcgcacacggccagctccgcgcaggcagactgcacagcccggcccgggggtcgcgcccaccctactaaggtgctaactttggacatctacttgagtaagactgagggggcgcaagtggacgagccggtcgtgattactcccacggcggaagattgcggtgactgggacgacatggagaagaagtcgagcggccgcaggtccgggaggcggaggaggtcgcagaaatccaccgactcccccggagcggacgccgagctccctgagagcgcggccagggacgacgcggtgttcgacgacgaggtggcgccaaacgcggccagcgactgctcctcggcggaaaagaaagtgaaatctccgcgggcagccctcgacgggggcgttgcctccgctgcgagcccagagtccaagcccggccccggccccaaagggcagctccgaggcgagtcggaccggagcaaacagccacccccggcctcgtcccccaccaagaggaagggcaggagccgtgccctcgaggccgtgcccgccccgcccgccagcggcccgcgggctcccgccaaggagtctccaccgaagagggtgccagatcccggcccggtcaccaagggcgctgcggccgagagcggggaggaggcggcccgggccgtcccccgcgaactcccggtcaagagcagctcgctgctgccggagatcaagcccgagcacaagaggggcccgctccccaaccacttcgacggccgggcagagggaggtcggagcaaagagctgggcagagcggccggagcgcctggagcttctgacgccgacggcttgaagcccaggaaccatttcggcgtgggcaggtcgacggtgaccactaaagtgaccctccctgccaagcccaaacatgtggaactaaatcttaaaacccctaagaatcttgacagtttgggaaatgagcacaatccatttagccagccagttcacaaaggcaacactgccaccaaaatctccttatttgaaaacaaacgggcaaacagtagcccaagacacactgacattcgaggcacaaggaacactcctgcctctagtaaaacgtttgttgggagggcgaagctgaatttagccaaaaaagccaaagaaatggagcaacctgaaaagaaagtaatgccaaacagtccccagagtggtgtgctggtgaaggaaactgctgtagaaaccaaagttactctctcggaagaagagattctaccagcaaccggaggaatgaatggagacccttctgagaatcaagctcttggtcctcaacctaaccaagatgataaagcagatgtgcaaatagatgctggctgcccttcagaaccagtggcttctgctctgattcctgtcaaagatcataagctcttagagaaggactcagaggctgcagacagcaaaagacttgtacttgaaaatgtaaccaatgcagcacaagacatccccatcactgtggataccaaagatttacccccagcagccatgccaaagccacagcatacatcttctgactcacaggcccctactgagtcatctcctgagccttctctttcactgtctgcacccactcctggggatgttgccaaagacacatgtgttcaatcgcccataagcagttttccgtgcactgatctgagagtgtcagaaaatcacaaaggacgtgttttgcctgtgtctcatcagaacaatgagaaaatgccactttcagaacttggaggagagacaaaccctcctttgtccacagagcatagtccagaagctgtgggaagtgagtgtccatccagagtcctcgtccaggtcaggtccttcgtgctccccgtggagagcacccaggatgtgagctcccaggtcatcccagagagctctgaagttagagaagtgcagttgccaacttgtcacagtaatgaacctgaagtggtttccgttgcaagttgtgctcccctacaagaggaagtactgggcaataagagcatgtcacccgaacactctcattgcacagcagagctcgcggcaaaatctggcccacaagttgtgccaccagcatcagagaaaactttgcctattcaggctcaaagtcagggcaacagaacacccctgatgactgaatctagtcccaccaactctcccagcagtggaaatcacttagacactcctcaaaagccagatcagactgttagacatggctggcatagccctgccggtcttttgaacatttctgctggtagtgatgacagtgtatttgattcttcttctgatatggaaaaattcactgaaattataaaacagatggatagtgcagtttgtatgcccatgaaaagaaagaaggccaggatgccaaattctcctgctcctcactttgccatgcctcctattcatgaagaccatttagaaaaggtgtttgatcccaatgtgtttacctttggtttggggaagaagaaggaaagtcagccagaaatgtccccggctttacatttgatgcagagccttgacacaaaatcccaactgagacccaaacgtgcatctgctgaacagagtgtcctcttcaagtccctgcacaccaacactaatgggaacagtgagcctctggtgatgccggaaatcagtgacaaagagaacagggacatcacaagtggtagcattaagagatcgagactagaaaaaagtgcacttttctcaagcttgttatcttccttaccacaagacaaaatcttttctccttctgtgacatcagtcaacactatgaccacggctttcagtacttctcagaacggttccctatctcagtcttcagtgtcacagcccacgactgagggtgccccgccctgtggtttgaacaaagaacagccaaatctacccgacaactccttaaaggtcttcagtttcaactcgtcaagtacatcacactccagtttgaaaagtccaagccacatgg

SEQ ID NO: 4408 - DNA, 2353 bp, Macaca Fascicularis
acaaagactggacacacgaaaccgcgaggaacttgtcaggggaatttcttgcagactgatggggtgaaccaaataaattaacagcatctcagccgcaggctccgggttacaaagcggattcctcctgggcggcgggccccagtaggctttcacttttctgctggggcgctcgcccactccgagccaactccacgtcctggttttcgtccttgcctccttcccgccggcagccggctgcgggtaaacacgcgggggtcgcagaaagaggcggctgctattggaggagcccatccaggcctcccctacgcctagctccggagctgtcagttactcgaacagtgcgagcgagattttggcgccacagctgggagtgaggcttttgttccataacaaaaacaagcgcctgagtggcaaggctgccagcgcccagcccagccgagcaggcataaaggagcccgcgtcgcggatgtttgtgacctgtcattagagacagctccctcagcttccaaacgatcacatggagacaatgtggcaaattatgtttgcaccagcaaagaccctgctcgagccacgaaggtgaatactgtgcaccgggatctagtaaggggggcctgcttgctcaggcggaaaaacaccaacgagtcatttccagcgctttttgtctctgtcaaagaacttctgttttccctctgcagctgaaaggcaaccttctggttgaaacaagttaaatgatgaatccaagaggaaaaactaggtattaagatgtcataatgtagtactcccgatatggtggtcccccattatgagtacatagagatggagtctactatattatttgtttgatgtttgcacatatgatgctaaattagaacacgtccagacccaggttactctctactatggaaaaattcatgtgaaaaccagaattcaaaagtcagatagattaggggcgagtgttctcatttcagtctttgagtttcaaagcattccaaagacttgaaactcctctccaaatcagtaaatctgacatctaaagtgccacaattgagaatttatttattcagatttagtctggttagaatggaagtacctttgagaaaacgatgttaaaagatagtcgtttacaccttagtgtgaatttgtttaattatttttcttttgagagtaggcttttaggaaggaaagagactagttacaactgagttcctggaaggagacagatgaacaatatgggtggaaatgaatgcagaaacacagtctaggtgtcccagaagccctgtttgtggcttcacaattctggagaaacccagctttttaaagagagggttgttttgttttgtcttatttttgcaataatagaactttctacagttatggacatgttctatatctgcactgtctcatatgcgaaccactaggcacatgtggttattgaggacttgaagtgtgcctggtgtgactgagaaactgaatttttaattcgatcggatttaaatagtcacatgtgactaatggttcccatattgggcagcacagctttagagcattttaaaaggtgtccacaaatcttcaggaaaaaaaattgcacagtgtggtgggcagcctcaaagacggcccacaatagtccccacctcctggtattcatgcccctgagtgggattccctccttttgagcatgggctacaactagcaatttgtttccagcaatggaacatggccaaagtggtgggatgtcacctccaagattaggttacaaagggactccagctccatctggagcatcttctttggctctctcccttgtttgctctgagggaagccagctgccatgtcatcagctgccctatggagcggccccgctggcagggaactgatgtcttcagccaacagccagcaaggatctgaagccctcagaccaacaaccatcaaagaactaaatgctgccaaaaaccacgggaaggagctgagaactgaattctccaccagtcccggcctagacatgactgcagccctggctgacaccttgattgcagctttgtgaaccagagacacccagggcttggtttggtgcctctccccttcccatctttctcctcacgtcctgaagcctgtttgtgcccagtgttctgagcaccacagagaccaccaggagggcttgacccggccttggatgagaataatgacatgcctggagcaggagatgctcattaacccagaagaacaaataactgatgggagaactaaaataataagatgagccaaagcagtctcaaaccacaacataatcagcaactttaatattgtatttctttcttccttcaacaaaccattatgtgtgtgctgtgtgtttggc

SEQ ID NO: 4409 - DNA, 735 bp, Macaca Fascicularis
  misc_feature (1)...(735): n = A,T,C or G
ctctagttaaattgcnnnnnngaggaaaatcttagtctagacagatgannnntcccaggctctcctggaagccgtgcacgtcggggcacaggggccctgggacgtggttggcagccaggctgccagagagctaaaaaataacaagaacatcagctcggatgtttgtctctcggccctgacgcctgccactgtccttcccggggcacttggccctgtcagagggacatgaaatgccatccaaatggtgggagaaatgcagcgacgctgcagcgnnnnnnnnnnnnnnnnnnnnnnnnnnnnntgtttcagagaacatttatcttagtnnnnnnnnnnnnnnngaagannctcnnnaggtactctctgtccagaataaacatcggaacaatttctcaattggctttagtcactacacataatgtaatctcccttctttcagctcccccaacagtgagcatgtcttcccaaaaaattacaacgtcaaaaccaggaatgtccccgcatctactattaccaggcttggcaattggttcaattttcccataaaaacaggtgtgttcaaaagantnggaaactgtgaatttattccgcgcatgtaataaactctgcaagaagtttaaccccagtaggtttgcggcactgcaaaattgttcatgggtctatgtagcaaatgattctctgccttgacaatcatgtatacatatcaagatttctatcataatgataatgagattg

SEQ ID NO: 4410 - DNA, 725 bp, Macaca Fascicularis
  misc_feature (1)...(725): n = A,T,C or G
taactattagtgtgaataaacttctcatagttatgtacttgtnnnctcaggaaattcnnnnnnnnnnnnnnnnnnnnnnnnnnnnngggtaggaaaagcattaatgtcagtcctacacagcgaacttttgattttgaagaatgtgatagaaagaaaatgtttactgaaatacatgggaagcttgcatatttctaaagtcagctttatactttcatttctcaaagctaagtaaactgtggtataggcatctctaagatgttagcatttaaaacatcaattgtttaggtatttgtagaccttatttgatcccactgaaaattttaaatattaaaatatcttgcacagtctaccaaatgagttaaatcgttatagttgtgtctacctcttatttttctatctgtatttaggctgctgttttggtgagattctaatttctttttcccctggaactactttctgtggaagacaaggaacagactggggacagaggcctgaaaacaaattggaggcactcagagatgttgctgaccagccctattcctcatgagttggcggagggggaagccattgtttttaatttccacttaatatgaaaatgcttgtttttaaaatgttttttcctgctgaacaactgtatttttaaaaggaaaaaaattctcttttggctctaagaagtcagctgtatgagcaggcgtgaccatatcataacatgctgatatgataga

SEQ ID NO: 4411 - DNA, 2352 bp, Macaca Fascicularis
  misc_feature (1)...(2352): n = A,T,C or G
ataaaacaagcagaagaccgagctcacagaattggccagtgcagttctgtgaatattcactaccttattgcaaatggaactctagacacccttatgtggggaatgttgaatcgcaaggctcaagttacagggagcacactgaatggtaggaaggaaaaaattcaggctgaggaaggtgataaggaaaaatgggatttcctgcagtttgctgaagcttggactccaaatgacagttctgaagagttaaggaaggaagctttgttcactcacttcgaaaaagaaaaacagcatgatattcgatcattttttttaccacaacctaaaaaaagacagttgatgacctcctgtgatgaatcaaagagattcccggaggaaaatactgtagtgtcatcagaccctacaaaaacagctgcaggagataccattgattatgaaagtgatgttgaacctgaaactaaaagattgaaattggccacctcagatgaccactgcagtccctcggaagagataccatcccagtccagggaaatcagaactccactcatggaaagtgtccaggaggccaaggcccagtcagccaccccagcctttcctgtagagggctggcagtgtcgtttctgcacatatatcaataattcagtgttaccttattgcgaaatgtgtgagaatcctcaaggcagtgctgttatgcaaatagatagcctcaaccatatccaggataaaaacgaggatgattctcagaaagacgcctccaaaaaggttcaaactatctcagactgtgaaaaaaaagcccttgcacagtcagaacctgaccagttggctgacagcaaggaagagacatcaaaaattgagaaagaagatggacttacatcccagcaaggtaatgaacagttgaagagttcagacactttgccagtgtatgacaccttaatgttttgtgcaagtaggaatactgaccggattcacatctatactaagggtggaaaacagatgagctgtaatttcattcctttggatataaaattagacctttgggaagatttaccagcaagctttcagctgaaacaaaatcgctcactgattttgagatttgttcgagaatggagtagtctaactgccatgaagcaaagaataatcaggaaaagtggacagctattctgtagcccaattcttgctttggaagagatcacaaagcaacaaaccaaacaaaattgcaccaaaagatacataaccaaagaagatgttgccatagcttcagtggataaagtgaagaatactgggggccatgtccgtctgatcacaaaggagtccaggccacaggatcctttcacaaaaaaatttcttgaagatggagcctgtgtcccatttctaaatccgtacacagtgcaggcacatctcactgtgaagccctctacatccaaaggctatttgcaagctgtggataatgaaggaagtccactttgccttcactgtcagcaacccacttgccagactaagcaagcgtgtaaagtgaacgcttgggattcacggttttgctctctgaaatgtcaggaagagttttggattcgatctaataacagctacctgcgagccaaagtatttgaaactgaacgtggtgtgtgtcagctctgtaatgtgaatgcacaagaactctttttacgtctgagagatgcccctaaaagtcagaggaagaaacttctggatgctacctggacttcaaagctcccattagaacagctaaatgaaatgataagaaacccaggggaaggacatttctggcaggtggatcacatcaagccagtgtatgggggaggaggacagtgttccctggacaacctgcagactctctgcacagtctgtcacaaagagagaactgccagacaagctaaggaaagaagccaggtgagaagacaatctctagcatcaaagcatggatcagacatcacacgatttttggtgaagaagtaaagtagaaaaagatatgaatgaatgacaaatgttttacatgtggaagactttaatacaaaagttttccatgtttgtttaatatattaagagtaaaggccnnnnnnnnnnnnnnnnnnnnnnnnnnnnnnnnnnnnnnnnnnnnnnnnnnnnnnnnncacaaggtcaggagatcgagaccacannnnnnnnnnnnnnnnnnnnnnnnnnnnnnnnnnnnnnnnnnnnnnnnnnnnnnnnnnnnnnnnnnnnnnnnnnnnnnnnnnnnnnnnnnnnnnnnnnnnnnnnnnnnnnnnnnnnnnnnnnnnnnnnnnnnnnnnnnnnnnnnnnnnnnnnnnnnnnnnnnnnnnnnnnnnnnnnnnnnncaaaaaaaaaaaaaaaaaaaaa

SEQ ID NO: 4412 - DNA, 692 bp, Macaca Fascicularis
  misc_feature (1)...(692): n = A,T,C or G
tctatggtcttctagcttctactactttctttgagaaatctatttaattgttgtttctttataattaatctatcttttctctccagttgcctttaagacttttatatttgatattatgtaatttcactatgatttgtctaaatgtggatttattttgctagagattcataactcaagtcnnnnnnnnnnnnnnntttttcaagtttagaaaatatccggttattatctctttattnnnnnnnnnnnnnnnnnnnntttgaattctttctctcagaaatttatgttagaagtttcctagacttcattctattctcatgactcttaattagtcttgccaaatttttatttcattatctcattgcattttaggtaatttcttaatctctatcttccagtttgctagttctttcttcaactgtttatctattttattgtttaacctatttattttctatttcaatgattacattttttgagattttattagcaaaatggttaaaaggatggtttcggaggattgtctggatttacattttgcctccattatttactagctctccagttttggttaaattaattaaccttttgtgcttcttgatgtgtaaaattgaaataacaattgtatataaataaatatagtgttgttttggtaattcagtaaaattatttgtgtaaaatgcttaagacagtgc

SEQ ID NO: 4413 - DNA, 683 bp, Macaca Fascicularis
  misc_feature (1)...(683): n = A,T,C or G
gaccccagcaggacggtgtttgttggtgctctgcatggannnnnnnnnnnnnnnnnnnnnnnagcnatcttgaacgacctatttggtggagtggtgtatgctgggattgacacagataagcacaagtatcccattggatctggtcgtgtgactttcaataacnnnnnnnnnnnnnnnnnnnnnnnnnnnnnnnnttttgtggagatcaaaaccaccaagttcacaaagaaggttcagattgacccctacctagaagattctctgtgtcatatctgcagttctcagcctggtcctttcttnnnnnnnnnnnnnnnnnnnntnnnnnnnnnnnnnnnnnnnnnnnnnnnnnnnnnnnnnnnnnnnnnnnnnnnnnnnnnnnnnnnnnnnnnnnnnnnnnnnnnnnnnnnnnnnnnnnnnnnnnnnnnnnnnnnnnnnnnnnnnnnnnnnnnnnnnnnnnnnnnnnnnnnnnnnnnnnnnnnnnnnnnnnnnnncctgccattggcgaccagggagctggcttcccgaggacaagggaaaattgtagtcacctttgcacttgctgaatctgtctttgtttctgcactaattaatgcacattgagttttgtcgggttttgnnnnnnnnnnnnnnnnnnngggcaaggactctctggcttaccctccaagcgactctgtagttttccc

SEQ ID NO: 4414 - DNA, 1664 bp, Macaca Fascicularis
gaacttatggttgaacttggggagtgggacaaagccctgtcagttgcaccaggggtctctgtgaaatactggaagaagttaatgcagaggagagctgaccaattaatccaggaagataaggatgatgtcattccatactgcatagccattggtgatgtgaaaaagctggtccattttttcatgtcaagaggtcggcttaaagaagctctgcttgttgcacaggctgcttgtgaaggaaatatgcagcccttacatgtttctatgcctaaaggagcttcatattctgatgatatctacaaggaagactttaatgaactcctgcacaaagtcagtaaagaactggcagaatggtattttcaagatggtcgagcagtactggccgcatgttgccatcttgccgtagataatattgagcttgctatggcatacctgatccgcggaaatgaactggagctggcagtctgtgtgggcacagtactcggagagtctgcagcaccagcaacccactatgccctagaattactggcgagaaagtgcatgatgatttcaatatgctttccatctgttggatacaggaatttggcagccgatcttctcctgatgattcctgataatgaactacatttaataaaactctgtgctttctacccaggatgtactgaagagataaatgaccttcatgataagtgtaagctacccacggtggaagaatgtatacagttagctgagacagcccatgcggatgacaatatatttgaaactgtaaaatattacttgttaagtcaagaacctgaaaaagcccttcctattggtattagctttgttaaagaatacatcagtagttcggactggactttggataccatataccctgttcttgacctattgagctatattcgtactgagaaattgctcttgcatacgtgtactgaagcccgaaatgagttgctaatattatgtggttacactggtgcattattggctatcagaagacagtaccaaagcattgctccagcactttatgagtacacaagtcagctattaaaacgtcgggaggtgtcagtacctttaaaaattgaatatctttctgaggaactggatgcatggagagcttgcacacagtccaccagcagatcattagaagactctccgtatacacccccttctgattcacaaagaatggtttatgcaactttattaaagagactaaaagaagagtcactgaaaggaattattggaccagattatgtgactggatcaaatcttccaagtcattctgatatttacatttcttgtcttacgggattaaaaatccagggccctgtgtttttccttgaagacgggaaatctgctatctccttgaatgacgctttgatgtgggcaaaggtgaatccattctcacctttagggactggaatacgactcaatccattctgatagaagatttttttccatgctggattttttttttttttttttaaagaaaaactctgtgggttcctattaccttaatctttgttgttcaagtgccagaggttgggagaaggatcgcaggttgggagagttgggaaataaccgtgaatttattcattcacttcaaaaaataaaatatgtatataatttaaaggagaaaaaaaaaaaaaaaaaaaaaaaaaaaggccaca

SEQ ID NO: 4415 - DNA, 860 bp, Macaca Fascicularis
  misc_feature (1)...(860): n = A,T,C or G
agccatagctccannnnnaagaatcaccagagagnnnnnnnnnnnnnnnngcctgttgagtgcagtgaatgtagcaaatcctttagctgtaaatctaacctcattaaacnnnnnnnnnnnnnnnnnnnnnnnnngccttatgagtgcagtgaatgtgggaaatcctttagccaaagttctagnnnnnnnnnnnnnnnnnnnnnnnnnactggaaaaaggccttatcagtgcagtgaatgtgggaaatcctttggctgcaaatctgtcctcattcaacaccagagagttcacattggagaaaagccttaactgtannnnnnnnnnnnnnnnnccttttagtgtaattatactgaaggagtacaccggtgagagagacaagtacctgaactggaagccccaacatctaaggatatatatacagtgggcagattccccttaagttccaggtatgtgttacactttctaacctgccatttagaaagtgttagactttctcacctgccatatatggctcttgccatttatnnnnnnnnnnnnnnnnnnnnnngaagccgtatcnnnnnnnnnnnnnnnnnggtccacataatgtgcatcatttacctcctgaacctgctgaaggaagcagacctctgtttctccctatttgctagaagaaatcatgaatagtcttgagtcttcctctctgacaagnnnnnnnnnnnnnnnnnnnnngctttgtgccagagaacccaatatgagtgttgttggcagcttnnnnnnnnnnnnnnnnnnnnnnagacatgttggtttcatgtgacacctccatggattttttccagcctctaagtcaccaacttggaactgcctgcctcacattgctt

SEQ ID NO: 4416 - DNA, 2977 bp, Macaca Fascicularis
  misc_feature (1)...(2977): n = A,T,C or G
acaaacacgtctttcctccttttccctaggaatgctttgccttttatttttcctttggaaacagtatccataagccttcatcagaagcttctaaaagtggaaggaatttttctttgtaaatgtggtgtctatatttgaacacataagttcagatatcttgagctgaatcgcgtaggtgtggtaccccctgggacttggacactgtttcccattaacacattttgttacattttttttggcatctgctcacactgcattaatatcccttattgtcacaatagcaggttaagccaagtctcccaaatcctggcccttttcaaatgatttttctgaacaaagatattgtactttattgcagtcaaatctcatctttttaaaaagattctttgcaacctatggagatgattctgagtaattattctgaaatctatcacactgttttatatctcctttaagtttaataagtaccttaactcaaaacattgataaaaatattacccggccgggcacaannnnnnnnnnnnnnnnnnnnnnnnnnnnnnnnnnnnnnnnnnnnnnnnnnnnnnnnnnnnnnnnnnnnnnnnnnnnnnnnnnnnnnnnnnnnnnnnnnnnnnnnnnnnnnnnnnnnnnnnnnnnnnnnnnnnnnnnnnnnnnnnnnnnnnnnnnnnnnnnnnnnnnnnnnnnnnnnnnnnnnnnnnnnnnnnnnnnnnnnnnnnnnnnnnnnnnnnnnnnnnnnnnnnnnnnnnnnnnnnnnnnnnnnnnnnnnnnnnnnnntgcctgaaaaaatatatgtgtattacacaagactaaagaggggaaaatttgtgttgcttttctagagaactctcaagattccttgtcatgccatcaattggcactctgaatcaacctttctctgctataatctaaacccacatcactccatcttatccacaaaggtgtcttgccttcctgaaatgaccaatttcttggttaagtaatgtaaaaatcctattaagaaaggaagtggtatttctctgtaatgacttacttgaagagaagtcatgacgacctgttacattttccctaacatactgtctttaatgatttatatcagacattttccagggtttaccatcaaatgtagcagtttgtattgctaaactctattttccatccattttgaaaatcaaggtatttgatagtttatcttcatagggtaacttaactggaagaagataaaacaagaagcctaaagagggaacttaaagaggtaatgtgggagcaactgggtgacttaacacacatctctgactcatctaagcattcaccaagtccactttacccaataatctttcttgtattaccatctccttcctcagccagtaaaggtacaataaccatctaaatatactgtgtctctctcatgagatacagtttggtttgacttctctattacttgcaacagaaaaaaatttttacttacataggaaagggaggctccttagaggacatgggagttttgttaccagaagaccatacattggatacaaggcagaaaaaacaatggattcttctacctgctccaggtctccaatctcttgctcaatctactcttcctattaatgccggtgttatattctaaaatactagttgtatcctttacattcctctcctagttttggatgaaatccgaaagtaatcaaggccttctcaatgtggtgctaacttgtcttcagtctcccaggcctatcagacttctcccattttccaaagtgtgccctgcatgctcatgtctttttttccagatactacccgatggaatcaagcccagttcaaatactctctctccctgtgtccccagttcttatcaattgttccttccattatagtccaacaagagcaagtaatttgcatctctgctcaggaagcactcatctagctcacgctgtacttattttttctctcctgcgttcctccactatggcagtgactttcaaactttcagcaatagcatagctcatagcaataataagcaataactagaaatacattttacattatgttccaagagacacattcatataaactatatatttcatcaattttaagaagtacttcctctattttaatgcctgaaatcaggatttaggccaaggtgctgggatttcaggtgtgagccaccgtgcccagcccttatttcacttcttgatgcacacacattgtactcacactccacctttgacttactgagtaagaaagtactaaaaggcaaaggaaatgtcctcagcacaagcagtcagctaacacagggaagtgacacaagaaagaaaagatacgatacggtaccttggactttaatgtcttaggatgccattgccttctttctgtttgaagttctggttccagtggaaagcatgacttctcagaaccatcaggacccccacttactcagtcgtagacaaaacaggcttaccttgtataaatacttatttgctttgtctcgttgaattctgaggcactgtgggctcaccagaatcctgtgcacgtgggtcatggagaatgatatatatgaatggagaatgatatatatgaatggagtggcaagaaatagtgaacatacttattgcatctatctcctctgctcacctgcggcttcactgccacatctgatttcactacacaacgtgagttcaaagacaaaatcatcaggaatgtcggccgagcacgnnnnnnnnnnnnnnnnnnnnnnnnnnnnnnnnnnnnnnnnnnnnnnnnnncacgaggtcagnnnnnnnnnnnnnnnnnnnnnnnnnnnnnnnnnnnnnnnnnnnnnnnnnnnnnnnnnnnnnnnnnnnnnnnnnnnnnnnnnnnnnnnnnnnnnnnnnnnnnnnnnnnnnnnnnnnnnnnnnnnnnnnnnnnnnnnnnnnnnnnnnnnnnnnnnnnnnnnnnnnnnnnnnnnnnnnnnngtctcaaaaaaaaaaaaaaaaaaaaaaaa

SEQ ID NO: 4417 - DNA, 656 bp, Macaca Fascicularis
  misc_feature (1)...(656): n = A,T,C or G
cagggatnnnnnnnnnnnnnnnnnnnnnnnnnnnnnnnnnnnnnnnnnnnnntacgagacggccaagaactactcaaaaaaaagcttgaaggatatgggctatgggaactggattagcaaaccccaggaggaaaagaacttttatctctgcccagtatagtatgctccggtgacagatggattagggtgtgtcatactagggtgagagagaggaagagcgcgaggcatccctgaattccatgcatctgctnnnnnnnnnnnnnnnnnnnnnnnnnnnncccgcgcccccatgcccctctgagtcacacgggacagaggaggcagagcttccgcccactgttatcttcaatttctttgtccagtcttttgtttttaataagcagtgcccctccccactcttctttttaatgatttttgtagttgatttgtctgaactgtggctactgtgcattccttgaataatcacttgtaaaaattgtcagtgcttgaagctgtttcctttactcacattgaagggactttgttggttttttggagtcttggttttgactccaagaacagagtcaggaagaccccaagcannnnnnnnnnnnnnnnnnnnnnnnnnnnnnnnnnnnnnnnnnattccggttttatgtgtcccttgataacagtga

SEQ ID NO: 4418 - DNA, 669 bp, Macaca Fascicularis
  misc_feature (1)...(669): n = A,T,C or G
tcacaaaagccnnncccagatgctgtacttgaagaattacaaaaaacagtcatgtccaactcaannnctgttnnnnnnnnnnnnnnnnnnnnnnnnnnnnatcagtcccaaggaatgatgagagctgcagagatgtgttacagaaagagtctacaagtggcatctcagcagggcagttggagtgggaagctctcaagtctgttgagactagcactgcttgcattaaaagtctgtatggctaacatttccaatgatcactggccatcttnnnnnnnnnnnnntacagctgaggccctaaaactttgcttttgtccactggctgttcttttacnnnnnnnnnnnnnnnnnnnnnnnnnnatgggggcaagagagacacgnnnnnnnnnnnnnnnnnnnnnnnnnnnnnntgggtatcccaaatcnnnnnnnnnnnnnnnnnnnnnnnnnnnnntgagacacttatatgccaaagatgactnnnnnnnnnnnnnnnnnnnnnnnnnnnnnnnnnnnnnnnnnnnnnnnnnnnnnnnnnnnnnnnnnnnnnnnnnnnnnnnnnnnnnnnnnnnnnnnnnnnnnnnnnnnnngaagcaaagaaaaagctgtaagaatgaagcaatgaatcaagacttcttcccaaagcaacgttttttaaactatatttattcc

SEQ ID NO: 4419 - DNA, 2515 bp, Macaca Fascicularis
cttttacgtgaaccagcagctccacaaagttccccgttgcaaaatccaaatggagcctgtggaaggagaatctgcttttttgctcccaataagaagtagggctttctgctgttgctagtatgagaccctcgactttctggcagttgtaacccattgttcatttgtttctctgcatagcccaactcctagtaaccagattttttagtagttggggaattaaaagtattcaggaacacacaagtaatggctagacacatgggctatgcagtcatacttcttgggctctgaacttggtttttcacttacaagaggtgtagcgaaatatgttaacctgggtgtatctacctctaaaatggggttattaatagtccttgtctcttcatcgatgagatagtctatatgagggatttagcagtaattggcatacagtaaaaaatcatctctcattaaacattgtttacctgaggagattggttattggggggctaaaaatgattgtagtgaaaggattgtttcatgtaatagttctatgtataattccattttagattcaaggcctagttttagagacattgatgaggctgtacttttaaaaattagatttagttttaagttcttgaaagtgtgttgttgttgttgttgttaacgtgtttctatgaagtcagtaggtggggggaacatctcaaagcagccaaattgccagcatattgaacaggatgaaaatgttagaatttttactatgctaagcatcttctctcagtccaagatctgcattgcagtaaagaatcattcacactgcttagatccagaaagaataaacccttcttacgggtttatagttagttcttgttactgtgtctaattgtaatttttctcgttataggcttttggttactccccttcccaccccattccttaattttattcttttgaagagtgcatttcaagctgccaaggtggagagagggattacagaaaggagaacaccttatttcaggtatcttaccttctaccccttaataggagaaccattttgactcaggatctaacatgagaatacaaaatttactctatagccaggttataaagtttaaatcaaaagtagctatacttggatagacataatttgtatgccttaatttatagagtgaacagtattctttagcaatccttagattgcattattcttttaattttgatttgttttattatatgaaaaataaacctcttaaatgagagtttattttttttagatcccagttaagtcttcaactgttgtataaatagaatgcagagtaatttgtaaaaatatacgttactttcattgagtcttaatttggataatataaacatttatataatttaagtccagagaaacagtacctaacttttgatatacaatttattcttcattgttaacatagcatttaggatacagtagaattatgtttatgtatctcgtaaaacttggaactgtctgtgtatttaattcacttcttcagaattgttgctaaccctgaagggacttcagatacataatagtatcaacaactaatacatctaatggcagtaggcatcgaaagctaaaagagatttcacaatactacataccatgagacagggctgataaattgtggcccatgctgcctggttttgtacgtaaagttttattggaacacacccgtgcccgttctttcatgtattgtctatggctgctgtcatgttacaactacacagttgagtagttgcaacagagactatatggccctttacaaaaaaagcctgccaacccctgccatgggacgtattcttcaaggtccctttcttaaaagtatgtataacaactcttaataatttcttggctcaatgattcccaaattatgttttatagaatataaatattctctaagttaataaatgttttgagaaaaagattgaagctaatagtagttttctttatagttgattttaatatgtttaaatatgagattactaaactcatttctatagcttttatttttatgtgataatctacctttaagaaaaggtgtaccatacctgagagcaccaggaagtcgcatgagagatcacctgatacatgaacgtatgatgttccatctgcgcattgatggataggcagcatttagaaattaacggatgtgttgctgtatatcatctctttgatgattgctcgtcttctttgtatcctgtcttaaagtttcatcacatttgcgatactcaatgtctgttctaaattaaccatgttttgtaccacaaactcattgcccatggatctgttgctgaaacaaggaagtcttaaacaagaagtggaatctttctgttatcagattgtgtctgaatcaaatgatcagaaggttgggatattacaaagtgaagataaacagctgcaaccttcagtttctaaaaaaatcagaaggtgagctttccaggattaaatttatatccaattccaacaaaataacatttagtaaaaaaccaaaaaaaaaaaaaaaaa

SEQ ID NO: 4420 - DNA, 726 bp, Macaca Fascicularis
  misc_feature (1)...(726): n = A,T,C or G
aggaacagnnnnnnnnctgnnnnnnaaccagagctcttaattctatctaacattaattattattttacacctgccagcaaaacttgaaaatgagcagtacctcatttagtgttgataacaaccccacagggtaggttccctgatttatccagtttcatgggtgaagtcaccgagactcagagaggtcgaatcatttcccaaagcccatatagctaacagtagtagcagagatgggatctgaacccagaaagtatgaccctggaacctggaggctcagcggctgtgccagctaggctgtgtcatagcgtgcctcagttggtcaagtcgttacctccaagaacagactagactgagaagtcagcatttctcatgctcagccttttcccttctcccatcctctgatgttaacagctccccctttttgttgttgttgnnnnnnnnnnnnnnnnnnnnnnnnnnnnnnnnnnnnnnnnnnnnnnnnnnnnnnnnnnnnnnnnnnnnnnnnnnnnnnnnnnnnnnnnnnnnnnnnnnnnnnnnnnnnnnnnnnnnnnnnnnnnnnnnnnnnnnnnnnnnnnnnnnnnnnnnnnnnnnnnnnnnnnnnnnnnnnnnnnnnnnnnnnnnnnnnnnnnnnnnnnnnnnnnnnnnnnnnnnnnnnnnnnnnnnnnnnnnnnnnnnnnnnnnnnnnnnnnnnnnnnnnnnnnnncacgcccagcaccccctgcccca

SEQ ID NO: 4421 - DNA, 362 bp, Macaca Fascicularis
  misc_feature (1)...(362): n = A,T,C or G
gagtagctgagactacgggtgcgtgnnnnnnnnnnnnnnnnnnnnnnnnnnnnnnnnnnnnnnnnnnnnnnnnnnnnnnnnnnnnnnnnnnnnnnnnnnnnnnnnnnnnnnnnnnnnnnnnnnnnnnnnnnnnnnnnnnnnnnnnnnnnnnnnnnnnnnnnnnnnnnnnnnngcccaagtgcctgtttttgtgtggcccatgagctaagaatgatttttccatttttaaatggggaaaaaattaacagtattttgtgataggtaggaattacatgaaattccagtttcagcatccataattttgttggaacagccatgctcacccattttacatgtttcatcgtgagttgatatttgtgata

SEQ ID NO: 4422 - DNA, 745 bp, Macaca Fascicularis
  misc_feature (1)...(745): n = A,T,C or G
acccaaatgtgcagnnnngctgactgaagcatttgacccagagttcacccaggaagctgtgtccaaatccattggctgtannnnnnnnnnnnnnnnnngcagctctggggcctcaagtgcatttctgggattttctnnnnnnnnnnnnnnnnnnnnnnnnnnnnnnnnnnnnnnnnnnnnnnnnnnnnnnnnnnnnnnnnnnnnnnnnnnnnnnnnnnnnnnnnnnnnnnnnnnntaggaagagcgactcaaagtaacaatggcttacatgagaagcaggtttattttttccaccacataaaagaaaaataatgttacggagtccannnnnnnnnnnnnnnnncattggctactcagaggctgtatttctgccctgccaaccttgacannnnnnnnnnnnnnnnnnnnnnnnnnnnnnnnnnnnnnnnnnnnnnnnnnngccaattttgtgtttggggaaaggaaaacagaggaaagggggagaagagcaaagggtgcttttaaagagctttccctctgcttccatctcactaaccacccacccctacctggaatggaggctgggagatgtggcttatttnnnnnnnnnntgagtatcccttgtaacaaaggggttctgacactaagggagaaggggagaatgttgggtaggcacccagcacgctttaccagagggcctcctggtgtttggattttgatctcaatgtgtnnnaatgacagagatgtaacaagcttatcgggtatc

SEQ ID NO: 4423 - DNA, 1704 bp, Macaca Fascicularis
agtagatttgtaacataaaaccaacttgccatttttaagagagggcgatgtgaatggaatttatttattagaaatcaaagtttaacccagctggtgtcattgctgaaaattaaaaaaaaaaattaaaggcaagaataaaatggttggaacaagtaccgtgggatgattgtcttgacaaattaccctttcttttttttttccaatgctgattaatgcaggcaatggggcaacctccctgtaaaagacatccttgggggaggaattgtaccccaggaaagtggtcaggaggtagcccgatggattctagggtttcagaaaaagagtccaaattcactcaaaagtgatattgttggtttaggggactctggggttgggccagaacatctgtgaccaatctggatccttaccagatccaggatactcagtcttgtctgatctggatcttttctcccagaacttgactacatccatgccaagcttatggaactggggaaggaaagtcacgtttactcgagatttttctgcgtgtcaacaggctgactttgtattggattatcccagtggggtttgaacatagacattggtcacatattctaaatgttaaatttgaatatttccagctcctataccagaggtgattacagctattccctaaaaaaatactgccctagacaccagatgggcttagattgttaagatgttcgtgcactgtaacgaccttcaagcttactctgcagacttctgctttgctaccttatcagggcagagcagacctggacacaggttgagagaattgaatgtggaggtctaaggagagaagacaaggcaggaattgagaacacaagattcggagacaaactacctgcactattaggtttgtgcaaaagttactgtggcttttgccattactttctaattaattttaatggcaaaaacagcaatagcttttgcaccaatttaatatcatatgcatggattcagccctgatgacttcccacaatccttaaaggataatcttgccttccttcctttactaggattacacagacatttgtatgtctactctcaaagatttccaggaatgaggaagctataaccatttcctcttttctagattgtgtagagttcaatttcagaacttatagcagattccttaaaaaagtcagaaagactttaacaattgaggcttttatttaaatcctttatttactggccattcccatcaccacgatgatataagcaagttctggttttcctaaaagagaaacagattttctttttcctacccctcagctttgttggttttatttatttgagtaggcaaaccctaacatggcactcagagataaaactctccaacaggtatactctgggctgggcacagtggctcatgcctgtaacagcatttttgaaggccaaagctataatcccaacactttgggtggccaagaattgcttgaggccaggagttggagaccagcctggggcaacattgagaggctctgtctctacaaaaaaattagccaggcatggtggcacaaacctgtagtcctagctactcaggaggctgaggtgagaggatcactggatcctgaatgatcaaagctgcagtgatgctactgcactccagcttgggcaacagagagacagagagagcctgtctcaaaaaaaaaaaaaaagaaaaagaaaaaaaaaaaaaaaaaa

SEQ ID NO: 4424 - DNA, 1822 bp, Macaca Fascicularis
tagctgcagctccgggttggggctgacccatcaccctcgggagcctcagtcccagcagcttctctccctccgccggcccgctcctggagagacacagaaacccttttctgtcgcgtcccctccttgagagccgcagggggacggagcggaggctattggagccgcagccccagcccagggcgcttgaccctctctcggaacggggcggggaaggggcgcgagtgacttcggggagggaagggcactggcaggaaaggacgcaactgcagatcggtagccggaggccgccacggtaaaataagcgcctcgcagatgtccgcgcccgggttacgttagacctgggaggcagaatccacgccctgcgttcacgggcccacgcacgcacagctgaactttgcagtcagtcaccatagttccagatcattcagtgttcaggatccaactcctccgcgtcctggtgcctgaacgcggttggacccaggagcccagaggctcgcagttttggacattgcctttctctctgaccacgggcttggggatctgtcaggtgcaaagtgccaaagtatatcggggggagtgtggcttcaggcttgttcagagccctgtcctgtttagggccaaaggaataactgggaaggtggatgcgaggccagcgaatcctaccttgaaactcggctcgcctgctggctctgccactccagcatctgaaaggagtaaataatggtttcccttgaaactgcaggcaattaggagtgggaggctctgaccagaattacatagccacaactgcctgtcatttggcatcctctgtaatttgggccaaagtactgcagctgcctctcttctctactactagtatgaaagattcagtgacagcacattcgtgttcacaggaagatgaggctgtgttctgaaccctacccagctggcacgggttctcccttgagcaacggctgtatccggagccagtgcttcctcagtgcggtgggggccctgatttcacagttgaggaaaggggaacgttgactgagaacgaggaggaagcgagttgtagatctagccttgtgttcacacgacaccaggctgaatatgagtcactcgcagggagctcagcttggtgaggtcctctggctgttgcggccttttctcctgcacgttggaccacacacattttcccgtgtcttttccctaggataaaggctcactgatggctcagttgggagcagttgtggctgtggcttccagcttcttgtgtgcatctctcttctcagctgtgcacaagatagaagagggacatattggggtatattacaggtaagacagagacagggcaaagtcggcaacttctgttaaatagctccctttcctggtcactgctttcctagcagatactgctgaacatctctgtttatatttccttgaacaggggagtcttttcagattgagctttttatgtcagtaaccatggaaaagagaatacacacacacacatatatgtaaatttagaacttagcttagtagtccaagatgatgccatgggtggtgattaataaatgtttatatagatttagaggcaaaatctaaaggaaactggtgctcctcacagatcatccctaaaatactgttttctcctacatccctctggcagtcttagctctacactgctaggttacctttacaaaagccagctgagtcccagttcttgatggcaacttgagaaggtagcctactctgctaatttaggatactcttttgaaattaacatttcagccagcctgggtaatatgtgagaccctatctctaaaaaaaaaaaaaaaaaaaa

SEQ ID NO: 4425 - DNA, 439 bp, Macaca Fascicularis
  misc_feature (1)...(439): n = A,T,C or G
aaataaacatttctcattggcaaaagtgtgttgactgtaatggttctngttttcattaataaaatatgtttgagcctagttacaatgatttaaaattcgcagtctggaaattgacttttgcacccaagctaatattttgtgaggtaaatccttgcaaacatggaaactgcatttggcccagtgctttgtggttgtgtattcttcctttttttaatagatggcattggctgagcatgnnnnnnnnnnnnnnnnnnnnnnnnnnnnnnnnnnnnnnnnnnnnnnnnnnnnnnnnnnnnnnnnnnnnnnnnnnnnnnnnnnnnnnnnnnnnnnnnnnnnnnnnnnnnnnnnnnnnnnnnncaaaattgctacacgtggtggcaggcatctgtaattccagctactttcggaagctgcaacaggagaatcatttgaacccagg

SEQ ID NO: 4426 - DNA, 739 bp, Macaca Fascicularis
  misc_feature (1)...(739): n = A,T,C or G
gnnnnncagagagggcacggtggctgagtggcggtggcctggcnnnnngagaaaagctgtcctgtctctggacatttggcatggcnnnnnnnnnnnnnnnnnnnnnnnnnnnnttaaatatgcattgggagggtccgagtcattacctggcccagccccctcattttacaatgagaagaatgaagtctggaaggagaggggctcattgcaggtnnnnnnnnnnnnnnnnnnnnnnnnnntgagaattcctggttccaagctttgnnnnnnnnnnnnnnnccagttgactgttgccttccacacaaacagcctctgaannnnnnnnnnnnnnnnnnnnnnnnnnnnnnnnnnnnnnnnnnnnnnnnnnnnnnnnnnnnnnnnnnnnnnnnnnnnnnnnnnnnnnnnnnnnnnnnnnnnnnnnnnnnnnnnnnttggaatttgtgctcttcaccaattttctcagggaaagaccccttccgcttgccagcagaggaacctgtagttttttccatttctttcttcagaaccaaagtgtgtatcactcctcatgctcacagggatgggcaggagagaattcaccaggctcttagctcaaaagacacagcctcagaatggccagatggatagcacgaaacccgacttggattcactatcttcctcctgccataaggctgtgctcccacataacaagctccagggaagctttctaagagccaaggcttggaaattgagtgtaaga

SEQ ID NO: 4427 - DNA, 1874 bp, Macaca Fascicularis
tacttagcttagatccttaattaatgtgttataggtaagagaggggcccatttcctggagcatgtagtcattcatcttaaatgagttccatcacctagggaaggtattagggacttgccctttgggaggcaaccagtagcagtcactgcaaaaaatagctaggtaagatgtataagatcttgtcccacctttgaggggcttacaatcataaagagttaagtacatgttctttgttaagtgccaacaatatgtataatacacaatgtagaagaaaagaatttgaaatcttctgaactaagtataagtttactggtgttaactgttaactggtatcttgccttcccactatgagctgaaaaatcaggtattattgagtatcataaatgcaagttgcctcagctcctacagcatgagaccaaactttattttgttaaatctgaagtacagatttattttgacatgcattgttataaatgaatttttaaataattaaaattataaatttatggatgggatcacatcaatatttcacaatctgaaattttaaaaatatgtaggccagtcctgttactataatctgcttagaagaatgaacgaaaacaaaaagactacgtttttgaagatttgatttttaagaagtacttaattcttggagaggagaagatagtcatataaataaaatgtatcatgagagtgatattactgtggtatatagagtatttctttgcattagacccagtgttaaatagtttgcatatattctcatgtcctcattgtaacaatttttagcgaatcttatttttcaggtgagaaaatttaattcagagattaactggtggaggtaacataataacaggaagagccaggattatcttaatttcaaatcctacttcataccattatgctataaagatatgtgttcacaatgtacctactgcagttgtgtcatctggttgcttctttgaaattttcattctggttttaaatttagaattgagtttgatttttgtggagttctttatttctttttaacctcccatccttatatgtcaacgattctttttcatttttgttgcttttagatttacctgtagtttgtaactttcctccaaattacttgaatccttttccctcccttctctccgtagaaataccctgatgtattagaagaacgaagatttaaatacaaaattttgttttccacacagcttttcaagcacatttcatacagttatactctagtcatatttatatttaaatcacttaaaatttcgtcaaaataaaaatgggacctttttttaagagatgataaagtgcctaaaatatgtcagtctctgtacaaggtgctagagaagacacctgccattttgaaattttgcaatataatgaaaaagacacagtgaatgtctttgcaggattcaatgaggtccctatagcagaggtggatttttatcagtagtatgcattctccccttcttccttactgtaaaagtccttgatttttagctgagcacacagccatctgaccaaaaggctacagctgccaacttcccttgcagttaggtggagacatttaccaagtactcaaagagatgtaaccaaaaggtttgggtgctacttcttttgcagtgttcttgtccttcctctctgctggctggaatgcaaatgtgatggctataactcaagcagccctcctggacttcatgttaaagacacatgctgagtatgattgagcaacaagatacaaggagcccaaggcctgatgactttgggagggaagctgcccaagtagtcctgactgcttacctgtggatgtgttttacatgagagaaataaatttctttctggtttaactcaaaaaaaaaaaaaaaaaa

SEQ ID NO: 4428 - DNA, 791 bp, Macaca Fascicularis
  misc_feature (1)...(791): n = A,T,C or G
caaggtcattagctgaagtaagaatgcagatagagggttggatgtgtgagcagagagaaggtgtgtgagagtcannnaggccagcaggaggctgagggtgaaccatgcgtggagagggtgattgctggccatggtaggggctccctatgaggtttgggtcatgaagttggagagagtagtcagtgtgctgtgtgctgctctccagcctcctgcagcttatgggggcaggtgcagtgtaggcagaggtcgagttacccacaaagggaagcccatcagactaacagtggatctctcggcagaaaccctgcaagccagaagagagtgggggccaatattcaacattcttaaaggaaagaattttcaacccagaatttcatgcccagccaatctaagctccataagtgaaggagaaataaaatcctttacagacaagcaaatgctgagagattttgtcaccaccaggcctcccttacaagagctcctgcaggaagcactaaacatggaaaggaataaccagtaccagccactgtaaaaacatgccaaactgtgaagaccttcgacattatgaagaaactgcatcaattaatgggcgaaataaccagctagcatcataatgacaggatcaaattcacacataacaatattaaccttaaatgtaaatgggctaaatgccccaattaaaagatacagattggcaaattggataaagaatcaagacccattggtgttctgtgttcaggagacccatctcacatgtaaagacacacacacgctcaaaataaagggatgga

SEQ ID NO: 4429 - DNA, 1011 bp, Macaca Fascicularis
  misc_feature (1)...(1011): n = A,T,C or G
cactgtgaaannnnnnnnnnngtnnngagattaaacaaactctaagattattaaatagtatattttccttgatagcctaacttttgatgtcttatgtataaataaaccaaaggaagtgagcagtcatattgctaatctgctaactcatatctattgaatgataaagttttaaaagtttccccaggtaagtttaagattcaaacaccatctattgagcacgtagattgtgtgccaggtagtaaaacaggggctttcacacacattgtctcaattcctcaaacaatcctgtgaggtnnnnnnnnnnnnnnnatttgaaacttgaggaaacatgctcagagtgcaagaagcttccttgcctgagatcacctaagcaggaaccctcagagccagcaactgaatcttggtccctgtgatgtcaagtccactgctcttcccactgcagaacatggcctctagattaatgccactgattcaggaacatctccgacagtcttgaaatacccccatcttcccttgttgtttttttccttctggcttcttctattatagtctctttatttgaaactctgtaggccaaggccagagctgataccgacacggagccagtgcagatagcacatcagatgctaggggtcgctgggaggattaagggatttaatctgctaggaacacctgtacttgaagtggaggaggttaggnnnnnnnnnnnnnnnnnnnnntaacatagaggttttggatttttttctcttgtggtttgttttttaagtggattggcagactccttattgcttaagagtggctttctaggcaggccactggcatctgaattcatcattgacaataaatgtaagaaattggaataaaaaagagagacccgctgttatttgcttttgttctccaatggtttggnnnnnnnnnnnnnnnnnnnnntatcagggtatatcgcaccgaagaataacaatccattcagtaatgttatagttatcctcaatctaaacatgttaactgtca

SEQ ID NO: 4430 - DNA, 763 bp, Macaca Fascicularis
  misc_feature (1)...(763): n = A,T,C or G
agaagacagatgaggtcaaatactcagttggctgtctcnnnnnnnccctgccttatgcgaaagcagggagatgtccaccnntcaggcacagccctagtttggcggctgctgctccttggttttgccnnnnnnnnnnnnnnnnnnnnnnngttggggtgtttttgcttagaaaggtccccttgtctcagccctgcagggcaggcatnnnnnnnnnnnnnnnttccactgcccccttgatctttgaaggagtccccttgatctttgaaggatctttgaagcataaggatgttttgcagctttcnnnnnnnnnnnnnnnaaattagggctcaatttgctgattgtagtagnnnnnnnnnnnnnnnnnnnnnnnnncagataaggggccaagagaagtaaactgggtcttnnnnnnnnnnnnnnnnnnnnnnnnnnnnnnntggaatttgaacaaggaagaggagaaaagggaattttgtctttatgggttagggatgattttctcctnnnnnnnnnnnnnnntggggtttttaaggcagcacagactgccaagtgctnnnnnnnnnnnnnnnnnaaatcactttgggatatttttttctacaacactggaaagttttagttttttaaannnnnnnnnnnnnnnnnnntatatatatttttttcccaatcctttttttaagagacagtctttattgggtctgcacctccgtctttgaccttgttagcaannnnnnnnnnnnnnnnnnnnnnnttagagttggcccta

SEQ ID NO: 4431 - DNA, 2780 bp, Macaca Fascicularis
  misc_feature (1)...(2780): n = A,T,C or G
tacgtgttacacaagatgtgttttccccaattttccatatttttccacaataaagaaaataatacattgttttaaaagttggatataaagtttagcaaatttaatatcagacaaaataaaacttaaggaaaaaattcagtggcctatattctcctagggcccctccctgtgagaagccagcctctgtgactcggggaacccctccagttgcgtctcctgttcgccgctttgcgacttcgttcgggttcctgtttctcttcttcccagctcttggcttcgcttcgcttggctggggttggctggaacttcggtttctctccttcggctgcgccagcctgggttcctgccctgcctgaccctggcactctgcgtcctgacttctcccttgtctgggcagggggaattgcacatttacagagaggggcgatcacctccttttcaggtgcccacagcacgcatagagggatagtgggtaaacccgacggtaacacgcctgcaccacctgtgaattccgaaaacaaacgcaaggtagggcttgtttcccacgccaggtgatttcctttcgttggtagggtggggtggtgggaaggccaggcgctgaaaactcaggccgccttattttcggaaacccagaagtagaaagtggacctttgtgtcctcggtgttctcgttgcccggtctccccagatgcccccaagaaagcaggtgccgtttaaccgggcggatgctggagcgcgcgtagctcggctgggaggtcccgcctggcggagacccctcccaatagcaccctccgcatcccaagccggctgacgcccgagccgccaagacaccactaggtggcgccaaagcgcagccgggacctggtgggttggggcgagcagcctcaggactagcaaagtctaaaagaccgtgagtctgatgcagcgtgggtctctgggaagcggctctgccctttgtccactgtaccctctcccgggggttgaaactgccctgaatggggtatgaaaatcccctcagctagagatgtgagatcgtcacgtgcacatttccggaacatacggaatcaataagccttgcagaagtcagcccacggtagccacgcgaacaatgaaggttgtcaaaggactggaggagatcggtcagccttacgtttcctcagatcctagagttgctcgcaagaatatgcaaagatttccctttgcccaagaggggcactcaggtgggtgggagagtggaagtggccagtgaatgccctgaatgaagcttatgctcgtttagggattgaagtctctgcttgcttgggagctcactgctctctggatgacaggagcttcctcttggagcaccacagtggcttcaaatgatattaaaaccttttccttttactaggctctgagcagccccgtgctcccaccagtaacccctgcttctctgagatttctgactcctgtcgctaaaagtgtgttccccaggattctgctcctgctcatgctacagtcttcctagtagcaattccatccactctcagcttcaagtttacgaaatcatctgtatgtacttccaggttgccatcattttcttgacttctgcaatagctttccctggattcagacccttaggacaggtccttgtgcagttcatgatggtgtggcagcggtgtagagagaacgggtcctgcggcttggccaggtgctcctcagtcaaatcgtctctggagtcaatcatccagcggtaggcctgcataagaactgcaggccccaggtaatcgtctccgttccaccagtagctggggcagctggtgctacagcaagcacagagaatgcacccgtagagcccgtccagtttctcatgctcttctatggactgcagacactgctgcttgccttcctgagattaatccttcttcttcaaataaggctcaatggatttgtactgtgcatagaagttgctcaaatcgggaacaagatcctttatcacatacatatgcggaagagggtagatttttgagaccttattgaggttggtgtcaatccttcgggtgcaagccagagtgttgcctccattgatgtttattgcacaagagccacagatgccttctctgcatgatcttcagaaggtcaaagtagagtcaatttcattcttaatcttgattaaagcatccagtaccatggggccacatttattaaggtcaacttcgtaagtctgcatatgaggtttgtctccagccttgtctgggtcccatcgatagatggcagatgtcttgatacgggcagctgcggctgcggctgtccgggctcctccggaggcctgcaggcaggctccgccaagggttgtggcccgtaaccagcgcctcaaggagagtgagaccaccgccgccatcttggctcctcatttaaaagttttattggtgcacaaaaccaacaccaacacctgaagaaaatgcatcaaaatgtgggccaggcgcgnnnnnnnnnnnnnnnnnnnnnnnnnnnnnnnnnnnnnnnnnnnnnnnnnnnnnnnnnnnnnnnnnnnnnnnnnnnnnnnnnnnnnnnnnnnnnnnnnnnnnnnnnnnnnnnnnnnnnnnnnnnnnnnnnnnnnnnnnnnnnnnnnnnnnnnnnnnnnnnnnnnnnnnnnnnnnnnnnnnnnnnnnnnnnnnnnnnnnnnnnnnnnnnnnnnnnnnnnnnnnnnnnnnnnnnnnnnnnnnnnnnnnnnnnnnnnnagcaaaccaacactccacttcaaaaaaaaaaaaaaaaaaaaaaaaaaaaaaaaaaaaaaaa

SEQ ID NO: 4432 - DNA, 710 bp, Macaca Fascicularis
  misc_feature (1)...(710): n = A,T,C or G
tagctattctggtgtctccctgattttctacaatgccaggatcctagtttggtgaggttttaaatttaatcttatttttatataaaatgattgccagacttatattaagcttgaagaagcagcagatccctgttaatgtgtatggtccaggccaagagctgtcaaatgaaaaactttgtgcttaagcaggttttcagtatgtatatctttttgatggtatgaagaatttatttaggcttgactgttttaaaacaccataatgaatgtataattaatttatgttaaagtaataaccctttgtcacaagggaatggtaatgttgtgattggctgccccttagcccatcgactattcccatcatggtagtccttacctctgttggcagctcagagcctccacatttttatatttaattctcatgataaattagccagcataatctcatggaattaggccttgttaaaatctaggccaggcacggtggctcacacctgtaatcccagcactttgggaggccgaggcgagctgatcacaaggtgaagagatcaagaccatnnnnnnnnnnnnnnnnnnnnnnnnnnnnnnnnnnnnnnnnnnnnnnnnnnnnnnnnnnnnnnnnnnnnnnnnnnnnnnnnnnnnnnnnnnnnnnnnnnnnnnnnnnnnnnnnnnnacccaggaggcagaggttgcagtgagctgagatcgcacca

SEQ ID NO: 4433 - DNA, 1828 bp, Macaca Fascicularis
ctagaaatccagtgtatgtagtaaaaataattgcaactaaagtggccctggacacaaatttcaacgaggcagaaacagaaattctgattgtcaaatggaagatgtgactatgctgtgaaacaagaaatataattgatggagagagtatagaagagattctttgattaaacacacagacacacaaatactaaaacgaatattacaaggagaattttaaaagccttaagaaggacccgatgctaatcaacatagggatgtgttgtaccaggggctgaatacactaatcgtgaggtaaaactcaattttattctttttggctcagtgctgatgtctggcccacttcagagccgtctgtgactcgacctctgctcattttcaacgttattgttggttgggaggccaggcgcgcagaactcctagcacacctctcactcgcagcagcccggaccccacccacagtgccggccgcgtccggctcctgccccgcccccttctctacgccaccgagaagcgaccttccgcagctagagtggcccaaccgggagggcggccgcgagctccggaaggcgcgggaccccccccaggacccggtcccaggctgcctttgacccgagggcactgtcctcaacgcctggaaaatggtttccgctagtgggacatcattttttaagggtatgttgcttgggagcatttcctgggttttgataactatgtttggccaaattcacattcgacacagaggtcaaactgaagaccacgagcaccatcaccttcgtccagctaacaggaacgatttcttaaacacttcgaaagtgatactcgtggaactcagtaaaagtattcgtgttttctgtatcatctttggagaatccgaagataagagttactgggctgtactgaaagagacctggaccaaacactgtgacaaagcagagctctacaatactaaaaatgataatttgttcaatatagaaagcaatgacaggtgggtacagatgaggaccacttacaaatacgtctttgaaaagtatggtgacaactacaactggttctttcttgcacttcccactacgtttgccgtcattgaaaatttaaagtatcttttgtttacaagggatgcatcccaacccttctatctgggtcacactgttgtatctggagacctcgaatacgtgactgtggaaggagggattgtcttaagtacagagtcgatgaaaagacttaacagacttctcaataactctgagacctgtgcagatcaaagtgtgatttggaagttatctgaagataagcagctggcaatatgcctgaaatatgcaggagttcatgcagaaaatgcagaggattatgaaggaagagatgtatttaatacaaaaccaatcgcacagcttattgaagaggcattgtctaataaccctcagcaagtagtagaaggctgctgttcagatgtggctgttacttttaatggactgaccccgcaaaagatggaagtaatgatgtatggcctgtaccggctcagggcatttggacactatttcaatgacacactcgttttcttgcctccagttggttcagaaaatgactgagggctggagaattatagacctgtgctgtccaagagcacttgaaatgtggctagtccaaattctgatacagtgtaagtgtaaaatacacacttcattcaataattcatatattatttgaaaacagtatgaagacataaaacatctcattagtaatattttatattgacaccacactgaactaatgtttgggtatttcgcattaaataaaatatactattaaaattaaaaaaaaaaaaaaaaaa

SEQ ID NO: 4434 - DNA, 2366 bp, Macaca Fascicularis
agtttgacgacagtgatgatgaagaggacaccagcgcagccctgggagtccctagccttgctcctaagagggacacagaccccccgctgatccacttcgaccccattcctgtcactgacccagacccagcggctgctccacccagcacagaggtgccggcctgggtgagcaatggggatgcagcggatgcagccttctccggggcccggcactccagctggaagcggaagagttcccgtcgcatcgaccggttcactttccccgccctggaagaggatgtgatttatgacgacgtcccctgcgagagcccagatgcacatcagcccggggcagagaggaacctgctctacgaggatgcccacagggctggggcccctcggcaggcggaggacctaggctggagctccagtgagttcgagagctacagcgaggactcaggggaggaggccaagccggaggtcgagcccaccaagcaccgagtgtccttccagcccaagctttctccagacctgactaggctaaaggagagatacgccaggactaagagagacatcttggctttgagagttggggggagagacatgcaggagctgaagcacaagtacgattgtaagatgacccactcatgaaggccgccaaaagcgggaccaaggatgggctggagaagacgcggatggccgtcatgcgcaaagtctccttcctgcacaggaaggacgtcctcggtgactcggaggaggaggatatggggctcctggaggtcagcgtttcggacatcaagcccccagccccagagctgggccccatgccagagggcctgagccctcagcaggtggtccggaggcacatcctgggctccatcgtgcagagcgaaggcagctacgtggagtctctgaagcggatactacaggactaccgcaaccccctgatggagatggagcccaaggcactgagtgcccgcaagtgccaggcggtgttcttccgcgtgaaggagatcctgcactgccactccatgttccagatcgccctgtcctcccgcgtggctgagtgggattccaccgagaagattggggacctcttcgtggcctcgttttccaagtccatggtgctagacgtgtacagtgactacgtgaacaacttcaccagcgccatgtccatcatcaagaaggcctgcctcaccaagcctgccttcctcgagttcctcaagcgacggcaggtgtgcagcccagaccgtgtcaccctctacgggctgatggtcaagcccatccagaggttcccacagttcatccttctgcttcaggacatgctgaagaacacccccaggggccacccggacaggctgtcgctgcagctggccctcacggagctggagacgctggcagagaagctgaatgagcagaagcgtctggctgaccaggtggctgagatccagcagctgaccaagagcgtcagcgaccgcagcagcctcaataagctgttgacctcgggccagcggcagctgctcctgtgtgagacgttgacggagaccgtgtacggtgaccgtgggcagctaattaagtccaaggagcgtcgggtcttcctgctcaatgacatgcttgtctgcgccaacatcaacttcaagcctgccaaccacaggggccagctggagatcagcagcctggtgcccctggggcccaagtacgtggtgaagtggaacacggcgctgcctcaggtgcaggtggtagaggtgggccaggacggtggcacctatgacaaggacaacgtgctcatccagcacgcaggcgccaagaaggcctccacctcagggcaggcccagaataaggtgtacctcggccccccacgcctcttccaggagctgcaggacctgcagaaggacctggccgtggtggagcagatcacgcttctcatcagcacgctgcacggcacctaccagaacctgaacatgaccgtggctcaagactggtgcctggccctgcagaggctgatgcgggtgaaggaggaagagatccactcggccaacaaatgccgtctcaggctcctgcttcctgggaaacctgacaagtccggccgccccatcagctttatggtggttttcatcacccccaaccccctgagcaagatttcctgggtcaacaggttacatttggccaaaattggactccgggaggagaaccagccaggctggctatgcccggatgaggacaagaagagcaaagccccgttctggtgcccgatcctggcctgctgcatccctgccttctcctcccgggcactcagcctgcagcttggggccctggtccacagtcctgtcaactgtcccctgctggaataaaagacaagagttacatccggaaaaaaaaaaaaaaaaa

SEQ ID NO: 4435 - DNA, 708 bp, Macaca Fascicularis
  misc_feature (1)...(708): n = A,T,C or G
gcagttgtgtgtatgtgnntgtgtgaagaaaaacagactctgtccanntagaaatggtgacgaggggaagataattacatttccagggtcaggaacttggcaacagttttcctgaagtgactcagacacaccacagtaacaactcnnnnnnnnnntttattttcatttgagaaataaagatttcccccaagccacgtgaggactctggcacccacccacaaagcaaacctgtatttataagccgagggctcagggagcctaagtgcgggacctttcagggcatcgtgacctatacccctcccccaggcccatcagtgtgtgctggggnnnnnnnnnnnnnnngggggtgaggagacaacagacctcgggaaacagagccagagctgtggccnnnnnnnnnnccttnnnnnnnnnnnnnnnnnnnnnnnnnnnnnnnnnnnnnnnnnnntggttgtttccacaaatctctctcaaatgtattattttggtgacaaaaatgaaggagctttgtaaatttttaaaaaattatgaatcatatcaagtagttgtttacatttcttgaaaaaataggaactctggctgcagaatcagattggcagaatccttagcctacacaggcaataatcaagtctgctgttttggccttttctagtaggagaagtggttgtagtgtttagatatgtgtttggtcttgcttccttatattgc

SEQ ID NO: 4436 - DNA, 1461 bp, Macaca Fascicularis
agcgttgacatttggttagacacttcttgtaacagatcacacagaaatggtgggtacagattcaggtcaaagtgtagtttggttgatgtattttcttattgaggtgggtagcaagggcatcacctggtaaaagacagggtggattgtgaaattaataaaagtagagttttactttcatgacttgacttagagtttaccgtaaaaatataaagaggtaggatccagaaattccttatgaaaccctctgacacagatcttgaaagaatggtttaaataaagcatcctcctaattctaagttttattgctatggcataatacactttatgtagaactaaataaaattccaatgtttaagtttttttctaaaaatttattagttgtgcacttgtagcacataaaaatattatgggtcttccatttcaaaactaagaaaaatggcattttttatatatctttttgcctatataacactgtatcccaaacaatagcagtaccataaggaaaattgtttttaaggaacaactttatcattaaatcaatatagcctctgacttgaagtcaatttgcttagagttgtatatggctttattgatttgaatcataaaagatacaaaggaggatacacttgtacaagttcaataagaaaaaaggagaaaaatgtcttgtgaaaacctcagatggtaactcagtgtgttgatgagtacagaacttttagaacaaagtagattgtttccttttctatcacaaacctggaagaaatctgtagtctgtctgttatgttgtgttttactgtcttctgacctagatattctgtgtggaatgtattgagatgtatactcttggctcattctctagaaagtagtaagtcacaccccagagaccggaacataaattgaggaaatgttcactttgacctttattttaaaagcttgaccaatgtgttgaattctcctgcccagattcatctttagtaggtttattttctgacctggaagagtgaagcatatttacatgcataaaaagctttgactttgatgactaatggatgttaattactatgacagtgacattttatatcttgcatatatttctaggttaccttttataggaaaatcttttgagaactaaattaccagggcttttagaaaaactaaaatatattgctttctaaaaatacaaaattattgctaacataaagcttactatacatgatatgagattccaagattttttcttacatttctgtgaaattttcttgtttcacattaataattctgaaattttaaaagctaagtaaatagctacatggacaaaaatagttattctgttttgggggggcaaaaaaaaaaaaaaaaaaaaaaaaaaaaaaaaaaaaaaaaaaaaaaaaaaaaaaaaaaaaaaaaaaaaaaaaaaaaaaaaaaaaaaaaaaaaaaaaaaaaaaaaaaaaaaaaaaaaaaaaa

SEQ ID NO: 4437 - DNA, 6452 bp, Macaca Fascicularis
agacagacttgaacagggcttttttagtcatcaacaggtcattaaagatagcacatctcactatttttcccttcaactgcatacattgtgaagacttaatgggggaaggtgtaagattttgatctctcgtgatcctaactgcattaatggcctgtagttcaaaggttactaagattgcaatagaagaaaaaaaatatgaaaacaaaaaaatttcccaagaaactaccacaagtatatacttttatactgcacataatgaacattcctgactgtacagtgctgggattacaggtgtgagccaccacacctgtaatgaaacacagtgaaaatggtttgggcgtacagaaaatgctctgtgagtgggatgagccaatggaaatgttctcgtgctgcaaaacactcagcggtagatgaagggtggtttgggtatcttaatgactgattccctgctcgtggctatcccattcacttgacttcttaacgtggtttatctcccacttgaaatgttttttacctttctccccatttgaaagttactccacacacattcatgaagccttttacaaatgctgcagcctccataagactggatgctgatacacttctcaagaggcaccatttcctttctttcccctagcaagctttgtatagctctgtcccctcactgcatacacaggaaacagtcctgacagagcatctgccatatatcttcatgcttcattcccttccttgtcctcattgcatgtgtgctctgagttatgcatggctgctattgtctagctgaggttgttaattcattcagtattgaggacctccagttagctgtgctaggtgcctaagaaggaagtcacagtgctgttaaccatagactccaggtcctacatctccttcctctgcagggcgaggagatgtttgcatctgaaaaggtgaacaggggccaggtgagtggtgcaagggacattcactccggctgcacttatttgtagtaattcctgtttggtttttaagatcacaaacttctggagctaccagttgcaacattgactagctgtgggagaagtcactttggcattcagggcttgtttatggagtggaaataatagtagtgacagtaataaaaatgtttgttgtgtgtgcctcctgggggacctggaggggagctcatggggaatcatggctgtgagcgtgatctatgtgaatctataggcattggctaatgtcagtgactactacactctgagattctgctttaatattacaaacaccaacttcaaaagcccttttggcttctttgccggagagtatcaggtgtaaggtccctcctagagcttgcatctcaggtctgtccagaaaggatcatttcctcagccttggcttgggtcaaatgatggcattctcactggccatgccctggctttgtcactaattgttaggcagtttcagagatcgtgttgcacgttactttaccccctttctgctgactggctgcctcctgggtcctgcttactgcagttcatagatgtttctgaaaactgcttatgggtgaccctgagtaaacaattaaaagtcactgtattttctgttagaattaaaaaatcaaccttgccaagaaagcttgtgaccttgtaaagattgggaaaactccacttgtcataaacttaaccagtttccaactcatgtactaaagcaaagctttgggccactttgccttatcaaaaagccatgaaactttcattctgtcttagcctcatcactaacgagtggcatcattttgtacatcgtcgagccttttggattccttgacctcactcaccagacctggagggccccggccactttttggcatttaattttgactttttgatgacagaattggtttccaagggtgtttgagattccctatgggattgtgttctctacaatcaagtttccattgcattaagatgagtgcaagttagaggcaacacatcacagggtttacttagcctggaacagagctggatgcatggttgctcctcagtaattagctaaataagatgtgatttacatcagaagctgtaaatgactgagaacattggtgttgcaataaagattatactcgttctgcattaaagtactaaaatcctaattgtgattataggttcattctctaattggtcagtgactttttaattttacctgccataataactgctagcaaccactgggtacaaaaaatatgctggttattgaacaaatgtacttgttattccttctgcaaggtcatcgttattattcccatttacagatcaagaaactacgtctcagagaggttgcataatgtctcagggtctccctgctagcaagtggctgagcttgaattcaaactcaaatctacgtgtcactaaagccccctctctctagagccatgtaacccctgatgtggtatgtgacctgtagattagtactggatcagtttataatgttaaggtacatttgttgccttaagtcttttctccacataagctaaatatttttcataatttttctgtactcatgtacttagccctttacatcatgtgtggttgatgtattacctggtgagactatgacttgtctaattgcttggtgagaatctggcttgtctacacaacaaaagaactccttgagaagaggagctactatttgtacatttgcattccagccctagttgcggtgatgaactcttgctatagtactttacaaaaatatgtcattgatttgtatgttgagtatagttgctttattattttcacctgctgaatttgcagaatttgtcattcatcattcattcaacaaagctatattgagttcctgcagtgttagtcactgggcatatagtaatcaatgtaaaccatcatgtattactatacttgaagggctgtgacctggaaaatcactgatatgttattccagaaggaataaaagtgaagatgaactaaaggcatatactttaaaataatggactttttaataatcattgtagcacaaccagaaatttttgctaatgaattatccaattaacttttctgaagcctaaaataattatgctatcatttcttttgcatatgaataacttctgtttgtattaatccttgatgcatttacatctctgcccaaatgatatgacattcctatctagtagggaaggatatttattagcttattcttctctagattgatactactgattcttttaggaaaagagagtaattcctaaagttacaaactcaggctaacagggttctcacaaaacatcttgtaatagcttcatgtgctatagggaatcttttttgtttaaaaagtgctccctttctataatcactttttggctgtggaattcctgaaacattgtgttttggttattctgaaaaattctgaatcttccctaatacctttggtaataaaataggacctgataaaaatcatgaagtgtctttgaatctggctgaatatctagacttaatgagtgtttaaggctccacgtcaacctgcaaagacacctggtgaagcacgtttgtgtacttctcaaaaaaaccctgtcctgttccatactttaatcaatgactaaacaacatagaaggcatctacatagtgttttcatatgacataagcccaaaaaggatggcttccactacatatgcctgcgatcatgattcagaatgacttcaataggctgcaatgctggatggaaaccaacaagatgaagttgagcaaggaataagtgtacatttctgcttttagattcaaaaggcaattgcgcaattacaggatggggagcaactgagcttggcagcagttcatgtgactaaaggcttaatgtgaaccaacagtaggaagtggtggctaaaaaagaatgaatatagctgtgtgcttcctcagtagaaatactaatagtcactgtactctgcactgaccacactgcatcgggagtaatctgtttcattctgtgcaccttcaggagagactttgacaaaccagagtagctactaagagggtgttgaatccaatccaagatacatttattagactcctgttttgggcaggcaatgtgctaaccagggcaggcaataaagatacaaagagacattgccagtctctaggcccaaggagttgaaaatttaaatagagagccagacaggtacatgcatgactataaaacaaagcaccccatgaaaccaagaagcataaagaaagtgttgtgggaattcaggggctgggctagtggtcagatttccacaggaaatgaggacgagagcagaggaagccttgagagcaaagagacagagacaggaaaacccaaggcatgtctagggaatactgagaagtctgggttgcctggcagaatagggtagacctgcgtaggaaatgaagcttaaaaaagatttgggccagagtgtgaggacgttaaccggtaggcggtgggaggcattacaggttggtgagcatctggaaataatgacacatgaggatcagttggagaaatgatgcatattgagtctatagaaaagaagaccaaagtcccctggtaaacatatatcagacttgttttaggttcctccagaaacaaaagtgtatctcaaagggaaagggttaaaaggaatgagattttagatttctaagcagttttttttttgttgttgtttgtttgtttgtttaatcaaagctgcccaatggtgaagatttaccgtagaagattgtgaggaccattgtggtgggactcagagaaagtttggtaactgacactctaaatagagttggggaaggaatgctgcagcttcaccaagtggcctgggcattctagggattacccatggccattgcaatgtgtgattatccatggttgaggtttttttctttcttctttgacttcagacatccattagtatgtcattttctgaataaagccaccatgttatgactctccagttcaatgagagatgtcaaactaactccagtgcaggtcccagggctgtgacagtagccactcaccatgactgtggcactttacaacttatccttttttttttttttttttttttactgtgatatatggcttcctttcaaacatgattttaaggagatactgtcacaattccacattgagtagatcaaatgcaaatcaatgattgacaccagtctagtgtgaagaagaatttgttttatagaaaatctccaagacagcaagcatagtgatcaaacagtgggctctgtagttggagagacttcagatgccagcaatgccacttattagctgtgtgatcctgagtgagggacttaacctccctgtttcctaatccataaatgcagagtgaccattgttagcccccaccttgaagggttgttaggagggtaaaggaggtgaagcactcagcacagtgcctggcagtaggctctaatttgactgagttcttatggtttacagtggtgtttagtatggttttcagagctaaaaatacttttttaaaaacaaaaataaaaacatcactgtcatcacatgccacatatttttaaggcatcacatatgttaacttattgaattctcaaaaacatccatttgccaagacagtgaagggttacataccttgaccagtcacaagctaataagtgggaaagccaggattcaagccaagcagccctggggttcacgctgatgacaaccatttccttccaattcctaccaacacatttccgttttcctccgattccattccaaatcactctgctggataatttgatgtgttttatttgtttaggccagtttcacaatttttttttaagttctattgactgtaaaaaatatatcaaaggcttaatgtttatgtcctttgccagagtatcaagaaggtccttaataaatgttgaaagagtacaggaataagtaaaaaaattttaattgtaggagtgattaatagtcacttttaaaagaagcacgttatcctgaatgtcacttaactaccttaccaactcattccattatttgtgatgagccatagtcctttgaatccttcatttaaaaataatggttttgtatctgacttatctttaccttatgtataggtattctattccatacttctttttaacaacaatgtccccagttctatcactcactgtctttttaaatcatttagtgtgactatattttactcaaatgtatctatccaccaattgtgtttgttccaaaccctggtgactgtgtcttcatcactcactctattcctaaattccagattaaacaattattttaccaacccgtctcatgcaactcaggtcgaccaaatgttacttccacatcatttctctatacgccttcctagacccctgaaatctattcaggataagtgaagtttgctataagggactgtccacagttttcttgcataatttttgggattcctaaataccccttgattaaaaaaaaaaaaaaaaaa

SEQ ID NO: 4438 - DNA, 724 bp, Macaca Fascicularis
  misc_feature (1)...(724): n = A,T,C or G
ccagggcagctaaccgcnnngacctgtntccaccctttgcctgtgtcccacagactggcagccgctggcctctttggccatgtcctcagggccactttccccctctccnnnnnnnnnnnnnnnnnnnnttccctcgagctgcttcccagtccccacctccctgggcttccccttggaactctgctgtcaccccgtctggcnnnnnnnnnnnnnnnnnnnnnnnnnnnnnntcctctgttttgctcccgcaggtgtnnnnnnnnnnnnnnnnnnnnnnnnnnnnnnnnnnnnnnnnnnnnnnnnnnnnnnnnnnnnnnnnnnnnnnnnnnnnnnnnctcaagtgaggccccagcggctcagggcagggctggccccacccctgtgaccactgccctggaggtggcggcctgctgctgttgtctttttaactgttttctcatnnnnnnnnnttatatttaaactctgnnnnnnnnnnnnnnnnnnnnnnnnnnnnnnnnnnnnnnttttttgtgtttttttaannnnnnnnnnnnnttttttctaagagatgaannnnnnnnnnnnnnnnnnnnnnnnnnnnnnnnnnnggcttgtgcccaggaagagccattcactcctgcccccgcccacacggcagttagcagggggagtgctggccacacccctgtgtgacgtgtgatgcccttggcaaagaatctaccggaatagattccaaggagcagga

SEQ ID NO: 4439 - DNA, 731 bp, Macaca Fascicularis
  misc_feature (1)...(731): n = A,T,C or G
tatttatatacatttgccctaacataggaagtattgtgtagtttctcatgtcaattttatctgtatcaagtatcttttaattgttaaataaagtctgctaggactgtggcttaataatttaaaactaaagataatcatatttaaagcatatgttaaagtttttttactcttaagattgggcaccatgaaaagctatcaataataatagctaatttatcttttactaagactcagacatgaatgacattcactaggaaaactcaaaattttcaaactgaagctcactagacnnnnnnnnnnnnnnntttattatcttctctaacttctaccctgttatagttcatgagcaaactacacacgttcatttccgtttcccgggatattattttagtctgtccagctaacaccatgttggattttacctgtcctgcaagcttttccgacatcttttctatagcactttgtgcttttattacattgttatacttaattggccttttgggggacaaatccctactttcctttgtgtttgcaattggaataaaaggtaattaatagcatactggctcaggtttcgagaggaacagtttttgaggcagttttcccttccttatccttaagggctcaagttccctttatgtgttacttcaaattgtnnnnnnnnnnnnnnnnnnnnnnnnnnnnnnnnnntcatggaaacaaatcacagttcctgggttgatatttctcat

SEQ ID NO: 4440 - DNA, 714 bp, Macaca Fascicularis
  misc_feature (1)...(714): n = A,T,C or G
taggcctnnnnagtgctgggattataggcatgatccaccactcccggccatatttaaatagaactcttaagctttcttttaattgaaattttattttagagccttttaaaaattctaactagaatgttaactgtactcattagttccctaattcttaaagaattttagcagataaggaatttgtgatatacatctaacgatagtaataattttaaaaattagtacattttagagggaaaaaagtatcaattccattttcctgttgctttggggagtatatgtatatcagctgtcatagtaaaattatcaacatacttacgtctagctttatagaactgacagacttctatatgactcactgatgtggggaggagatgcacagggtcgatcctggatagtgcatctaaatatgtatgtacagatggtccctgacctattgatacgatttggctctgtgtccctacccagatcgcaccttgaattgtaataatccccacaggtcaaggacaggaccaagtagaggtaattgaatgatgggggtgatttcccaaatgctgttctcatgatggtgagtctcatgagatctgatggtctaagtgtctggcatttcccctgctcgcactcattgtctctcctgcgcccctgtgaagaggtaccttctgccatgattgtaagtttcttgaggcctctccagccatgcagaacttgagtcaa

SEQ ID NO: 4441 - DNA, 752 bp, Macaca Fascicularis
  misc_feature (1)...(752): n = A,T,C or G
ccaagcaagtagactgaaaagaaaatgaaagctgtcaacactggatgcacnnnnnnttcacagtcntcccttcaacaaaagctgtctgcagaatcgtaagccagatctaggaggtttcatgcaatttttcaaaattaaaactgatttctaaaccttaacactggctgtcccagactctggatggcacataatgtggtatgtttcataaatgtccacatccaggattacctccaggtaacccaagaactggatttctcagtgagaaannnnnnnnnnnnnnnnttgattgtacagagagccttacaagccaacagtgctttctaatatatggcattcagtggcagtaagttgctcaggacaggaagcagctgtgatgttaatggaaatattattacgcgtgcagacatgaatctaggtttgttctatcacttaatagctgtgccatcttagacaagtcattttacctctcagagccccagtttttcttccataagatggtcccaataatatccacctcagagtattgtgttgattaaatgaaataatgaatatttagtcatctagtaaaacgcctggcacagagtggatgctcannnnnnnnnnntactcactatgctcattttgtagctaacacactctctggggagctgggtatcttggccaaggaagagaagtatgaacccaagtctcccgatctgaaatgtcaagccctctccactgtcacatcctgccatgggaactccaactcctac

SEQ ID NO: 4442 - DNA, 714 bp, Macaca Fascicularis
  misc_feature (1)...(714): n = A,T,C or G
aggccgctgannncnccacggtcctgtgctccgtgnnnnnnnnnnnnnnnnnnnnnnnnnnnnnnnnnnnnnnnnnnnnnnnnnnnnnnnnnnnnnnnnnnnnnnnnnnnnnnnnnnnnnnnnnnnnnnnnnnnnnnnnnnnnnnnnnnnnnnnnnnnnnnnnngtcttcagnnnnnnnnnnnnnnnnnnnccctnnnnnnnnnnnnnnnnnnnnntcttcgcaagcagacgcccgnnnnnnnnnnnnnnnnnnnnnnnnnnnnnnnnnnnnnnnnnnnnnnnnntgcgggcctgggtggcagccacgtggcaggagcaggagggcagagtggcttccctnnnnnnnnnnnnnnnnnnnnnnnnnnnnnnnnnngctcaggatcttgtctcctgcctggggggccctgtgctcagtggtgtgtgcaggcgcctggctnnnnnnnnnnnnnnnnnnnnnnnnnnnnnnnnnnnnnnnnnnnnnnnnnnnnnnnnnnnnnnnnnnnnnnnnnnnnnngaannnnnnnnnnnnnnnnnnnnnnnnnnnnnnnnnnnnnnnnnnnnnnnnnnnnnnnnnnnnnnnnnngggnnnnnnnnnnnnnnnnnnnnnnnnnnngcagttggagctaagagccaaagccttagctnnnnnnnnnnnnnnnnnnnnnnnnnnnnnnnnnnnnnnnnnnnnnnnnnnnnnnnnnnnnnnnnnnntg

SEQ ID NO: 4443 - DNA, 764 bp, Macaca Fascicularis
  misc_feature (1)...(764): n = A,T,C or G
catacttttcnnnaancaaactatattcatacaagcaactcaagnntgtattagagatctattaagnnnacggttttnannntacagatgataaaacaaagcccagagaagtaaaattacttgctgagggtcaaacatttatggtagagcagagagattaaaattcaggtcttctaaattcaggtctcnnnnnnnnnnnnnnnacacacagccagagatcttannnnnnnnnnnnnnnnnnnnnnnnnnnnnnntctgccacccgtggcgtaggtcttgtacgtttctccttgtacannnnnnnnnnnnnnnaagcatttcnnnnnnnnnnnnnnnccaagttgtcctaaaagctggtaggtaacaccttnnnnnnnnnnnnnnttcttccagataatttttatctagatcttactcagcattgctaaattctttagatattttaagagnnnnnnnnagaaacctcttagattcttatcagttaagcatgaatttataatcaaggatgagttacttgtatattttggtcaaggctgaattacattttactgggaatgaggatttatataatgcattttcctggctatcatctgatatattttccctactaaaggactacagttgtctttgaaatctcaatcccagtaatttcctcctttcagggtaatatgcagacaagtgttttacaaggctacagacttcaatttcgctgtgatttctgagtgagtatttagtggctttccagctttngtactttgtcagat

SEQ ID NO: 4444 - DNA, 760 bp, Macaca Fascicularis
  misc_feature (1)...(760): n = A,T,C or G
cagannttgnnnnnnnnntcagcagcttaaaaatgtcttttccagatttcgatgtgttttttttttccctacctcccaaaatctgagattgttaaacatttttctcccatgaacactgctcagacctgctagacatgccacaggagtggcgtgcacatctctgtctcttccagcaagaagagcccgtgagcacacacagctgccgtgccgtgcaatgtgcacccgagggcaccgggctcacctggacctcccaggaaagggagaagagcctcagaaactgctctgtgtttagaaggaatatttttaagggtccagctttttcatttccacaatttcctatatccagatttgttttgacagtgtagtttggaagaactaagattctaatctctgaagaaccttatagggccttctaaaacataagcgtttcctttgttgcttcaaagatttgaacattatgttaaagatcaagtattaattttagttgtactctagaaagttaaagtgccacgtttggggctattttatgattcagcaatcttttctaaattgtgtagcatgtgtatgagactatttatacccaaggatatgaaggaacgtaagtgactaggaggctctagtgagccgtggtggcgggaggttcaagccgttttgtttactaaatttttctcctgtaagctttgaatggaaacttctgtatcacattatgtgtttcacttatgctgtcgtgtatatacctaatatttctatttttgatttt

SEQ ID NO: 4445 - DNA, 380 bp, Macaca Fascicularis
gcacgatcacgtctccaaaggaaaaaaatgcacttttacacgtgctctcccgtgcatccacaatatgaggataacactcacgataacgatgcatcacacttaaaagttttcttgggttcttccaattcccgcctccccgacacttttctctctccctattgagtcaatcccccacgtttgttacttccgatatattcttcacgagttggttaaagagaaatcttaccgtttctatttcacttgtgtggcttcttgttcagcacaattactcgcgagtcactaattttgttgtgtgtgaagaaagtgttcactgtaatgaggaacactatttcagttaaagagtgcacccccgctatttataaagctctctaatatatttg

SEQ ID NO: 4446 - DNA, 746 bp, Macaca Fascicularis
caaaggagaatttgctggttagcacaaaacacactgcaaaattgctgctttatggttattataactgaagaatatagaagattgacacacattttatacaccctcaggcagtgttttggaaaaatattgtaccttttcaaattgttatcgcttacctgtttttctctatttcataattctcaggatttttctaaatacagcctttaaacttgactcaaatggaaattgtgcgctttcctgtttatacccttccccacgttattgtaagagtttaacagcagcctgatatgtaagtttcagcaaaacttatacctgtataggtttttatttgactcaaaaattagctattttgccatatagtcataagaatttgctcactttgatgccagaagtactgaagaatttagttacatggcactaatcttgtgagttgtatgcctaatttcaatttctaacctacttgagagtttcttttaggtcagcctttgttggtcttccgtgtaaatacaagttggtacaaatcaatagaaagattttacctgcatatgcaaagtaaatgtgtgactttatatagagactgccagatttatggtgcatctatctttttatccatttgagcttgctgttttttatgtttgtgtattgattgctcttgacactatacatttcaaaacttcttataacttgaaaaacacttctgtgctaccactcagttctgatcaaatccttacattttgccacactcg

SEQ ID NO: 4447 - DNA, 740 bp, Macaca Fascicularis
caaaatacgtcacattattagaatgtagggatacattattagaatgtatgcgcactccctggggtgggcatttctagttactagaccatctccatttttagtatttggcatcctcattatacttttataaatatgacattaataggagagcaataatacaattttactgttggaataagagatttgcctgcattcactgaaagagtgcaaatactgggtgcttgtgacttcaactgactcttccaaattgtatgaatttgtcggtttattggatgggtccagtttcggagtggtgggggggaactgttggaccagataatgtggttagttggcagtggtgcggtttcttgcctgggggtttgagatggacttgaggtcctgttcttaccttctattttgtgaacttgccgcttttgcattatttgattcacttgagggacagttactttaagtccgtttggagccctcgggctagaaatcgtgccactgttggttggccacattgtttggtctagcagtttttctttatcattctgaaactgggtttacctaatacattgataaattattttgaaggaatttttatagttccagtcacttcacttttaccctgacacatataaatgactaggaatgaccttcagatcgcatttagcatctgtaaccaatctgacaataatgtgttcatcagggacctatggattaaatcacatactggcatattaagctgaatatcagcc

SEQ ID NO: 4448 - DNA, 722 bp, Macaca Fascicularis
  misc_feature (1)...(722): n = A,T,C or G
cagccactcggggctgacagcggcgacccgttccaaagtaaaaaggggtttggggacccgtttagtggaaaagacccatttgtcccctcctctgcagctaaaccttctaaggcctctgcctcgggctttgcagacttcacctcttttggcaatgaggagcagcagctggcgtgggccaagcgggagagcgagaaggcggaacaggagaggctggcgcggctgcggcggcaggagcaggaggacctggaactggccatcgcgctcagcaaggctgacatgcctgccgcctaggcgagggccgtgtgcaggcgggacagggcacgggcaggttccagagagggggcagtgcagatgtctatatatacacacacacacacaccgtcgccaccgcactccaaggaccgggactcgggagctcgttcagggtgagcagactgnnnnnnnnnnnnnnnnnnnnnnnatctcctggggaagcccttatggaggccttggccaccacttctacaggtccgtctctccactgtgccatcccccctggggctgaccgcctcccgctcttgctctgggaacgaacacacagccggtcagtcgaggagaggaagcacccagggcctccccgcctcctccctactcatagctgcagacatccccgcccgccctcccgcgcatcagtcagacactcccccagtggtgtatgcattcgttgtataaaatgaagttga

SEQ ID NO: 4449 - DNA, 784 bp, Macaca Fascicularis
  misc_feature (1)...(784): n = A,T,C or G
ctgtgtagtacatcgcgatataaaaggaaataatgttatgctcatgccaactggaataataaagctgattgactttggctgtgccaagcgtttggcctgggcaggtttaaannnnnnnnnnnnnnnnnnnnnnaagtccatgcatgggactccatattggatgnnnnnnnnnnnnnncaatgagtctggctatggaaggaaatnnnnnnnnnnnnnnnncggttgtactgtgtttgagatggctacagggaagcnnnnnnnnnnnnnnnnnnnnnnnnnnnnnnnnnngttttacatcggagcacaccgagggcnnnnnnnnnnnnnnnnagaccacttctcagaaaatgcagcagactttgtgcgcatgtgcctgaccagggaccagcatgagnnnnnnnnnnnnnnnnnnnnnnnnnnnnnnnncttcttggannnnnnnnnnnnnnnnnnnatcaagagtttctttccagttccactgcagatgctcccttattgnnnnnnnnnnnnnnnnnnnnnnnnnnnnnctttgtttccctactgaaaattcagtctaacccagtttaactagatcctatggagtcgctaaatggaagcttcagttnnnnnnnnnnnnnnnnnnnnnnnnnnnnnnnnnncttatagtatcagaaaaaagtttcttaataacaacaaaaaacatatttcagtgtttacagttttgattgtccaggaactacattctctatnnnnnnnnnnnnnntttccttttatttttggcctgtcctgtcaattnttaatgatg

SEQ ID NO: 4450 - DNA, 784 bp, Macaca Fascicularis
  misc_feature (1)...(784): n = A,T,C or G
gctnnnnnnnnntttaaaattannnnnnnnnnnnnnnttcctcanngntaaataaaattacatttgnnnnnnnnnnnnnnnngaaggaactattaactggctgtcctggttttgctgagatcagnnnnnnnnnnnnnnctggttggcccacacctacccatgtcagttatctccactaacatctccaagaatctttgtaggacagtttctccgccggcaaggtctttcaaataaaactcttcttnnnnnnnnnnnnnnnnnnnnnnnnnnnnnnnnnnnnnnnnnnttaannnnnnnnnngtctttctgagatctaattccaaggacttctccacagctaagtgagatgcctcacaccagtattagatgattctttgtgtggacagaacagagcattttcaccttgtgtttaaagcaatttgttggcttcggctcctcaccactttctatactagtctcccatttacgtccctagtaatgcctatgcaaaaaaaaatgaaaaannnnnnnnnnnnnnnnacaggtttaagggcttaaatctcaaactttgtgttaggagtaacaggagtgtgctgagagggcaagcaataaaacaagtcataccaaaaagccacatggctctctcctaagccccaaccccactccactcctgtggccggtggtccaaacagaaaataactgaggacgaggaggtcaaaggatcagggaactaagcattatgtgaattnnnnnnnnnnnnnnncagaacacttgtgtttacattgtttttaggaactagcagaag

SEQ ID NO: 4451 - DNA, 646 bp, Macaca Fascicularis
gcacagaaggcccttaagatcatgcaacagatgagtgaccaccgctacgacaaactcactgtgcctgatgacatagcagcaaactgtatatatctaaatatccccaacaaagggcacgtattgctgcaccgaaccccggaagagtatccagaaagtgcaaaggtttatgagaaactgaaggaccatatgctgatccccgtgagcatgtctgaactggaaaaggtggacgggctgctcacctgctgctcagttttaattaacaagaaggtctcttatgaagaacaatgcagcactgaaggaagagatgattcctttactcaaacctgcaggaatcagcctattaacaggaaggggaaacggtactttccaaggaatggtaactgatccagctactgtgaacagattactaaggccatctcctcatctctaagggagaaaaatagtctgtagatgaataatgtaaggtaaagagttgcatgtaagtctttctaattatttactttaacattctccagaattcagacatgatttcagcatggtgttagatttgtgcattttattttcctgaccacctcattccagtcaatgtatggttatccactctgtgtgccaaaaccaatcatgcctttagttcagagaagttctg

SEQ ID NO: 4452 - DNA, 706 bp, Macaca Fascicularis
  misc_feature (1)...(706): n = A,T,C or G
agcctttggatgtgtacacatttnnnnnnntcttcctgacaaacctgagggnnngagaggccacattnnnnnnnnnnnnnnnnacgacagagtcccagtgacttgggtctgatgtccgtcccacagtgggacatccctgctgcatcccaatgccacccgtgtcctggggatacccaaatgtgccattctctcagcatcgcaactcggggactgcaggaggctcaggtgccaggtgccttccgatgttcatgccacaagctcttcccactgtctctggctccccagacaatgttccaggaggtgggtgtgccagaagggggagagtcttgcaaaacactatgtcctcattgagaaggagtcttactcaggactggggcctgtgcacacattgccgcctcttttcagcacttagagattccttcctttgtctagtggctgaagccagggctgaagttggcctccaaatctgggccgtctcagaggcggagttttccatctgtggccgagacccagtttttgggaggaggcccccaagggtcaagccatgcctgtaccaggatggggggagggggtgcccaatccaggccccagccacccagactcccccacccccactcccttttccactgctctgacctcgggcactgttgaaatagagtttttattgcatttctgcnnnnnnncaaaaatagacaaaataaataaa

SEQ ID NO: 4453 - DNA, 734 bp, Macaca Fascicularis
  misc_feature (1)...(734): n = A,T,C or G
aagtagacnnnaaacagttattgtatatgtaactaaaagcctttccttgtgggattaatattacaatggtagtcttgtggcaagaaatgattacaaaggatatttttattgtaaatccccagaagacaatttatgaagtcacccaaaatgttattttagctggttttcgatttttccaataaattagaaggatttctattctaaaacatgtaaaacatgttttacgtattactgatacaattaaagattatttttcannnnnnnnnnnnnnntcatccctctctttaaattgctctgagatatattttagaaaacttttcatgtaatgttatttctnnnnnnnnnnnnnnnnnnnnnnnnnnnnnnnnacaccatcctaaccttgccattgttaaagaagtttaagaaagactcttatattgtcgatatttagatgggatctctcacttttctttgatactactgattctcagcaagtgaattatatagttcaaaatgctagaaatgtctatacgttctataagagaaagcatatcctgccattcttgcatgcagtgaagccctnnnnnnnnnnnnnnnnnnnnnnnntgactttcaaagaggaaaaaaaaatgttattttttgttgatttgtaaagagagtttaaatgtcatgtgaaaaaaatagaatgtagtaaaattttatatatctatgaaatatttgaaaggcatatttttttaaatatcaaatggggc

SEQ ID NO: 4454 - DNA, 748 bp, Macaca Fascicularis
  misc_feature (1)...(748): n = A,T,C or G
gtaatgatgtgtgtggcgtttagttcttatgaagaacgtcccannnnnngtgtatgctggtacacaatttgggggtccgtgatgtttattattnnnnnnnnnnnnnnnnnnnnnnnnggaattagaacaacaaaaggtctggttggaggtagtctaggaatgaatatcaccagctcagtctttgctataacagggatcttaatcaatgcaataagcttgacgttttattcattccattaccattaccattactgtaaccagaaccagttgtcaaataattgttacatgactatgtccattttaatggnnnnnnnnnnnnnnntgctcctcttannnnnnnnnnnnnnnnnnnnnnnnnnnnncctctctgcctttggatgtaaagcgatctgttgnnnnnnnnnnnnnnnngtgctaattataccatcaaattctcacatggcagaagcagcacctcccacaccacttaagacagtnnnnnnnnnnnnnnnnnnnnnnngaagaatgctccagaaatctannnnnnnnnnnnnacaagaaccccacaagagaaagtaccagaatccaactccaatactgatagacatattcatatcattattatatgtaatccagttacaaactctgtgtgtgtgtgtgtgtnnnnnnnnnnnnnnnnnnnnnnnnnnnnnnnnnnattcaaaattatgttctcattttcccctnntcccctnnnnnnnnnnnnnnntttaactggctctttgtcgag

SEQ ID NO: 4455 - DNA, 727 bp, Macaca Fascicularis
  misc_feature (1)...(727): n = A,T,C or G
acaggcatgcaacnnnnnnnnnnnnnnnnnnnttgtatttagtagagacggggtttctccatgttggtcaggcgggtnnnnnnnnnnnnnnnnnnnnnnnnnnnnnnnnntcgctttggcctcctgaagtgctgggattacaagtatgagcnnnnnnnnnnnnnnnnnnnnnnnnnnnnnnnnnnnnnnnnnnnnnnnnnnnnnnnnnnnnnnnnnnnnnnnnnnnnnnnnnnnnnnnnnnnnnnnnnnnnnnnnnntcaaagatgagccctcctcattcctgannnnnnnnnnnnnnnnnnnnnnnnnnnncttctttcccctctagtcaaaattaatctcttcctcactcataatgcaaagtacattggataactattataccacttacttgaataacagtcctgatgagtaacatatgtagtcagtaacnnnnnnnnnnnnnnnnnnnnnnnnnnnnnnnnnnnnnnnnnnnnnnnnnnnnnncaggtgtaattaccataaaagcataaaagatagaatggtaaagctgaaagacatcttaaagatgatttttgggcactgatatggaaacagatccaaagagacnnnnnnnnnnnnnnnnnnnnnnnnattgtggcagaaccaaccaatgtcttttttaaacattaagaatattttgtatatannnnnnnnnnnnnnnnnnnnnnnnnnnnnnnnnnnnnnnnnnngannntccagtgatgta

SEQ ID NO: 4456 - DNA, 3024 bp, Macaca Fascicularis
  misc_feature (1)...(3024): n = A,T,C or G
ttgtattcagtgcctgcctgcgggtggctctgagctggcctttccatggcatgcactgcccagagcccctcagtgtcacctctggggccacattcagggaggacaacagacataagcctgggccccagatacggcagggtcaggccaaatgtgaggctgggggccccggcgaggtttagcgctggccagtaaggtgaggtggggaagtttgccccctgcacatgctccctccctccctgcaagcccactcctcccccatctcctccagtgtaggagacaacactagagaagcagccatcagcaaatcactcagctctcagactcctttcctcatgtgtaagaccatgaggacatccacctcccagggcaaatggggagagggagatgagagatcaagtgttggtctagggaaagactcttcagatgtaacttaatagcatccttgtccctgggggcctcctgccccatcccaagtgctcctcctgcagagtctcctgttcagctggccactaactcaagtacctgccctccttttaggggtttgcagtcaactcagttgctagctctcagccaagatcccagctacccactaagatgttaactataaccaagataactgctctcaaccaagacattagttaacaatgctttccatctccaaggagatagcagcagatgacttcccctgtaaatgaatgcactgccatgcagaatctctctgatcatgtcttttgccctcgttagactgtcagttctatgagggcaagttctctggaacatagcaggtgctcagcaaatattgttgggaataaatgaatgaaaagactttggttgactcccaggcatgaggtggcagtgatgggtcatactgggcagtggggttgaaatttgaagcaggccatcccagagaacaccacatagataagcatctgtgtgcatggaccaagggctggggctgaaatcatttcattcctcctctctccaagagaaaagccagctggctgctctagggggtctcctgcatgggtgcttctcagaagggccacccccagagctggacagatccaagccttccaagttaagagactcaatttcattagctcacctaggagtgaccaggctctgagaaatcaaccaagcaagctactgatggattaggcaggtcagcagtttatgaactgatgctggcagctgtgaccgccaagtggccaaagcctttgcactgggccttctgcctgctcattctctctgcagaaggaaaatgtgcttgggaatccaaatcaaacacagaaggagcagagcggaatggagagaaatcatactcaaaaatacaaatagtggatgccacatacactgtcataaatctaccctcaaaaccacaccgtggtgtgggcattgcaactatcccattttgtagacgaggacactgaggtcaagtggatgacttggctactgagcaatggagccgggtctcaaacccaggcatttcaactcctgttcctgtctggagtgccctttcctcagtgcctctgagctcaggagcctgacacatcctgcacaggggtcctctcagctctggccatggctccccattttcgctctgttaaggccactgagctccccaaggaacagtgctgcctccctgatgagacgcaagagacacctgagtctcatcagcagtgtgtgcacgtcctcaagagggcacctctccttctgcagataataacaacaaaaccacattaatataatagcaagcattcattaagtgcttaccatgtgtcaggcaccgtgccaggccccttgcatgcattatctcattctcacaacaacctcaggaggcaggcacgctcatctcctttttacacatagggactcacaggcccaaagagattaaatgctctgcccagccaggtcctacagctaatgagtggtagagcagagcctgcagtccaagtggatctgactttcaagcctgtgctcataattgcccccacctccccaactttgagggtggccctgcctcaatgtcctgtgtgctggaattgctccctgttggagccctggcctcttgggcatgggggcgcattgcaccggagctgggattcaactaagattctacagggctgcatctatagcaactctaaagtctgggtcttaggagtcaaggagtccatggcgggtgaaggaaagggaactgggcatgacccctgcctaccgagcagaatgcaagctgcaagggcaggccccttcctcctctatctacttctcccatagttcctgcctggccaagttctccgctcttcacacaacaccagtcaggcctcccaggcttccctaggccttcctagctagcaaactcctacttaagcctcaggtgaaatgccacctctcctgggtcaccttcctctggcccaatcagtagctccttccttcacagtcctaattgtgcatttcgtggattttcttgtaatgacctgtaagtgtcccccatgacgctgtgagcttccccaaggcaggcatggctttgtgtttcttgtctcttccactctcagcaagtccctgtcatgcagctgtcgccccatacatatttattgtataatgaatgagtttcagaggacccagggaacatgcctttcatacacaagtgaccgaagagcccagttaacaagaatgtgaatcaatgtaaaataattccaatcccgggccgggcatgnnnnnnnnnnnnnnnnnnnnnnnnnnnnnnnnnnnnnnnnnnnnnnnnnnnnnnnnnnnnnnnnnnnnnnnnnnnnnnnnnnnnnnnnnnnnnnnnnnnnnnnnnnnnnnnnnnnnnnnnnnnnnnnnnnnnnnnnnnnnnnnnnnnnnnnnnnnnnnnnnnnnnnnnnnnnnnnnnnnnnnnnnnnnnnnnnnnnnnnnnnnnnnnnnnnnnnnnnnnnnnnnnnnnnnnnnnnnnnnnnnnnnnnnnnnnnagagtgaaactctgtctcaaaaaaacaaaacaaaacaaaaaaaaaaaaaaaaaaaaaa

SEQ ID NO: 4457 - DNA, 752 bp, Macaca Fascicularis
  misc_feature (1)...(752): n = A,T,C or G
aagcagacggtgatgactgtggtgtanngnnncanccgnnacggcnnnnnnctgcagattgagaagcgnntccgggagctgaccgactttccccaggagtttgtgtgggaggcctcccactacctcgtacgccaggtcttcaagagtctacaggagatgttctcagggacccgggccatccagcactggctgaccgagagcgcccgcctcatctcccacatgggctccgtggtggagtgggtcacacccctgggtatccccatcatccagccctaccgcctggagcacaaggtcaagcaagtacgaggtgggattcagagcatcacctacacccacaatggagacatcagccagaagcccaacacgcgtaagcagaagaacgggttcccaccgaacttcatccactcgctggactcctcgcatatgatgctcactgccctgcactgttacaggaagggcttgaccttcgtctctgtgnnnnnnnnnnnnnnnnnnnnnnnnnnnnnnnnnnnnnnnnnnnnnnnnntgtgccgggagcagtttgtccgcttgcacagtgaacccatcctggaggacctgtcccggttcctggtcagccggttctgccctaaccccacaccccggannnnnnnnnnnnnnnnnnnnnnnnnnnnnnnnnnnnnnnnnnnnnnnnnnnnnnnnnnnnnnngggccttcgacctggagcgggtgaagcattccacctactttttcagctgacacccggcgggcct

SEQ ID NO: 4458 - DNA, 762 bp, Macaca Fascicularis
gagcaatgaatgattcacatatcggacagcctcatcagctgtgagactccagagcagccacgtggtggaagaagatttttggacagaaaaaggaaagtgatgtacagaaaacagaagtgaggaacagaaacagctggattgggtataggtttgtgtttgtcttatttggttacatttgatcagccaaaacttggtgactggcacaagtgtaggctaacgaacgtggcatctttaatctgtcatgggtgttaggggtcagggcagtgcaggaagttttgtgtaaaagagacagaatcccagccaggtccatgagaggtaagatactgaaagtcttttaaggtttctggtctttaaggtttcctggagggggaggggttggacatttctggcctcccaccagagcagctgacgctggaagcctgttgtgggtgaacagcggagtcttgctccagaaagacaggaggagacttagcagatgtgtgtgatatggtttggctctgtgtccccacccaaatttcatctcaaattgtaatcctcacatgtggagggggaagcctgtaatccccacgtgtccagggagggaggtgattggatcatgggggtggtttcccccatgctgttctcatgatagtgagagagttctcatgagatctgatggttttataattgtttggcatttcctcctgtacacactctctctctcacctgctgccagtaagacgtgtctgcttctccttccaccatgattgtaagtttctgagg

SEQ ID NO: 4459 - DNA, 658 bp, Macaca Fascicularis
  misc_feature (1)...(658): n = A,T,C or G
aaaaaaaaanannnngaaaaactttcatttaatccttatgtagcaaacaggcagtcagaaccattccattgatcttaataaagctgctctttactgtttctagtcaaaaaccagacttccaatcaaaccataagattttatactgcagatagtcagtttcaccaaagccacagaggaaacatgttgagatcaggcatcccgcttgatagtttcttgactaccattaaaatgaagattgggaagtcatgaaagtcactggtaggccattnnnnnnnnnnnnnnnnaaacgtctaccctaaaccatctgctgtggacccgtaataagaagcctgttgtatatgaaattgtctagaattcaggtgcaggtctttgccagttaagtaagggagcaacatgtaaaatggaggagtaggtgcacttacttgcctccacttctgtcctgatttaaccagcatttttcaaccctgggaaaatttgcagaatctaagttgattgtaatgattttgaactgcagtggctttaactcttacccttttcccacatagttatggtttgtgagttggnnnnnnnnnnnnnnnnnnagctacacatacataatgatctctttattcacaaaggttatagtaaaattgattgtaaatgactttctaagtgctaa

SEQ ID NO: 4460 - DNA, 660 bp, Macaca Fascicularis
  misc_feature (1)...(660): n = A,T,C or G
atgaaaagtgaatatgtcataacaaataatccatgggtgagactagctacagtgatgctaaccagatgtacgatagagaacaaggaagaattggggaacgaagttttgnnnnnnnnnnnnnctttgtataacaccaannnnnnnnnnnnnnnnnnnnnnntgaaggagctttgtctgctgctgctcaaccagtccctcctgcttccatctctgaaacttctcctcgagagccgannnnnnnnnnnnnnnnnnnnnnnnnnnnnnnnnnnnnnnnnnnnnnctacggtgaatgattccaattgtgaccaggaannnnnnnnnnnnnnnnnnnnnnnnnnnnnnnnnnnnnnnnnnnnnnncactcccttctatccgcgtatcgttgaccacctcttggccggcctccagcaannnnnnnnnnnnnnnnnnnngctgggcagacacctgcaagaagccggtcacaaagccgaagctgggtctctccttctggccgtgagggggactcaccggaccttgagaaccttcagcacagccctccgnnnnnnnnnnnnnnnnnnnngagggccgcctgtggctctgctccttagcggaaaaagcatctggagttgaatgctgttcccnnnaaacaacacgtgtnnnnnnnnnnnnnnnnnnnngtcc

SEQ ID NO: 4461 - DNA, 705 bp, Macaca Fascicularis
  misc_feature (1)...(705): n = A,T,C or G
ctaaccagattatnntnttcctgtttagagtctaccaagctacaaatggctgtattgcctgaagccccatatatcatcatacaagaaataagtccagacttcataatttccccctggatagagcagggtgagagttctgtggtcccccgttaggtaggnnnnnnnnnnnnnnnnagccggaagcagctatagaagaaagaacttcgaccctcagcaagctatagagatttatggggatcannnnnnnnnnnnnnnnnnnnnnnaggagaatagggaaggaagtcagaaaatcaaccagcagcccgttctcagcaaaacaagcaaaaggcaccatctgataaggaagctgaagcaatgaaccagtgctttctgcagtaaacaaatctggtataaactggaacaggagagtcactgaaagaagagcatgcgcattaggggcaaaatgtgtcctcaggataaccttttattataataagttacttaaagcccatacatatggaatgcatatcatacatatgcttaaaattatggtatggcaagcacacacaggcacactgagagagaaaaacaacaagaaaactgatatgtcaattataggcaacctcctccctaaaagttaagcaagagtagtaagggggtataaacgaacaaaggctgtgttaacccagggctgataccactcgcagatcagcctgttcctctctc

SEQ ID NO: 4462 - DNA, 873 bp, Macaca Fascicularis
  misc_feature (1)...(873): n = A,T,C or G
aaaacataaccctaaatttgatcctgcagnnnnnnnnnnnnnnnnnnnnnnnnnnnnnagccttgccggaactcttttttttnnnnnnnnnnnnggagccggaactcttatgtaaaatttagnnnnnnnnnnnnnnnaggagtgggaccctgagaatcgtaaannnnnnnnnnnnnnnnnnnnnnnnnnnnnnnnnnnnnnnnnnnnnnnnnnngcagtgtgagtgtatggtcaggggctccgtgaatattcctgcctacaaccnnnnnnnnnnnnnnttcannnntctccataccannnnncagcactggttagccgctcaccttatggctcgaggcaggacccttcgcaggcttgcagctgagtgggaagttgctggaagttttatgtttattgctttcaannnnnnnnnnnnnnnnnnncagacataagacctcatatcacacaagctcgatgccaccaagaggannnnnnnnnnnnnnnnnnnnnnnnncttcaagtggcatgggctttggcttgtgaccccgattgagtttcagtctcatctatcaaataggcctaataataggcatgtcnnnnnnnnnnnnnnnnnacaaagtggagtaagattgcaacggggccgggtgaggtggttcacacctgtaatcccaacactttgggaggccaaggcgggtggatcatttgaggtcaggggttcgagaccagcctggccaacatggtgaaaccccgtctctactaaaaatacaaaaattnnnnnnnnnnnnnnnnnnnnnnnnnnnnnnnnnnnnnnnnnnnnnnnnnnnnnnnnnnnnnnnnnnnnnnnnnnnnnnnnnnnannngcagtgagccaagatcacaccactgcactccagc

SEQ ID NO: 4463 - DNA, 718 bp, Macaca Fascicularis
  misc_feature (1)...(718): n = A,T,C or G
gacagagaacagctttacagcnnnannctcagtcaccagtgccagcggatgaagcccagcggtcagagcctcccctccctccaggggggcaggagctcctggagttgctgctgagagttcagggtgggggtagaatggaggagcaaaggtcccggccccccacacacacctgctgagacttgagcccccagccagcccttcctcacccctggtctgannnnnnnnnnnnnnnnnnnnnnnnnnnnnnnnnnnnnnnnnnggnnnnnnnnnnnnnnnnnnnnncnnnnnnnnnnnnnnnnnnnnnnnnnnnnnnnnnnnnnnnnnnnnnctggacggggtgaaaggcctcaaactctgggaacaggcgaggtggaacgtggatttaactcccccctgcannnnnnnnnnngagcttgaggcagtaagggggatcccaagcacccatctcannnnnnnnnnnnnnnnnnnnnnnnnnnnnnnnnnnnncaccaccaattgtcgagctactaggcactagggtctgagggctcaggcctcctcctgagaggttataacctgagannnnnnnctacccttcctcccagtaagaagggaaggtgggtgggcacctgagagattaagactattctcccagtcccactaccagcaccccccatccctgagactgaggggtttagaggctgtgaatnnnnnnnnngccctgcccaccctccctccc

SEQ ID NO: 4464 - DNA, 739 bp, Macaca Fascicularis
  misc_feature (1)...(739): n = A,T,C or G
aggacacgcatgacgagctgtannnnnnccccatgcggaagatcgacggcctgctgaatgagcacaagaagaaagtcctgaagcggcnnnnnnnnnnnncagccctgcaggatgccctgcacacgttcccacagctgcaagtggagcagagtggggagggctccccggaagagggggctgtgcggctgcggcccgctggggaaccgtacaaccgcaagacactcagcaagnnnnnnnnnnnnnnngtcagagcccaggagttcaaggtcgagctggaaaagtcgggatactatacgctctaccattcactccaccactataaataccacaccttcctgcgctgccgggaccagaccctggccatcgagggcggcgccgaggacctgggccaggaggaggtggtccagcagtgcatgcggaannnnnnnnnnnnnnnncagctctttgattccttcagtgacctgctggcccaagcacaggcccacaggncgcnnngggtgaccctgccccagcaanngacgggggcgcctcctccatgaaccaagaactaggacagaaccgtgtnnnnnnnnnnnnnnncctgggctccgtcgccgggaaatggggtcatgggtcagggtgtgtctgtgctgccccctccagggcagggttcagagtccgactcccccctctcccgagccccctccactccctccccattcctcccactgttcggtgtacagagaaattatttatatat

SEQ ID NO: 4465 - DNA, 768 bp, Macaca Fascicularis
  misc_feature (1)...(768): n = A,T,C or G
aatgtttggtgggggctgnnnnnnnttggagatgccttgagtcagaccattttgagatcatggaggaaggatgaagaagtgaaaatnnnnnnnnnnnnnnnnnnnnnnnnnnnnnnnnnnnnnnnnnnnnnnnnnnnnnnnnnnnnnnnnnnnnnnnnnnnnnnnnnnnnnnnnnnnnnnnnnnnnnnnnnnnnnnnnagcactgaatgggggagggggaggggagcacaggggtgagnnnnnnnnnnnnntggtctcagggacatgcctaccaatagtgggtatcgtaaggcatgtacccaaacataacagatgtaaggcagaaagtgatcagagaaggaatgagaaannnnnnnnnnnnnnnnnnnnnnnnnnnnnncagttagagcagaccaaggaaagctttctgaaagagattgcatctgaggaaaattcaggaaggatctttgtagattgggaggagattctaagttgaaggggtgatagggtgaggggccacagggaagtctgctgtgttctcatgtaggatgtcagccctccctgcaacttctctttttggccaatgtcttttcactttcctgaccctttagaatcgtccccagccagaagcaatcatggaagctgcctcattgtcactggttaagaacttggcgagattgaagggcttttgttattgttgttggatatttttgtttcccataaaagcacatcatttcaaccctaaacctgtgtcctttgttgtttcnngtgggagggaaatgactgaca

SEQ ID NO: 4466 - DNA, 702 bp, Macaca Fascicularis
tcttaatgattgtataaactcaaaacaaacaaaagaaccaaagaaaagggaagtcttcagcatcagtccagtctgtggtgtcctggcacttagaagagtgaggccagggaaggcggggcgggaggaccctctgaccagatcagaaagggcaggcaagctgttttccaccttccagggtccagcacaggtacgtgcccgtggctttggccctcacaaacttgtgagcatgccctgaaacaaattggcatttcagattttccaaaacaaaagtcaaaaaaccccatcaccaccatcagccaccctacaccaaccagggtcactatggggacttagcacagggcctagggagggtgggagctgctgctggactggcccgaggactccacagagtgggggacgttgaagacactggcgcacgattggctgctctgctgggtgctttaacctctggggctgggcgaatgcacgccaaggtgcccttctgagccttttttctcttttcctgtactggaactgcttggaagtggctgtcctgtttgtgagaaaacatgcagaaagattatcaagcttttcatttctctttattgtagttttgtttcctttttgcagcaccactgtgcaactatgcattgtacttcacaaccttttgtgctaggtagatgcctgtgactttttaacttggggggtggggggattgcaaat

SEQ ID NO: 4467 - DNA, 727 bp, Macaca Fascicularis
  misc_feature (1)...(727): n = A,T,C or G
gacgcagccaccacgnncgnnnnnnnnnnnnnnnnnnnnnnnnnnnnnnnnnnnnnnnnnnnnnnnnnnnnnnnnnnnnnnnnnnnnnnnnnnnnnnnnnnnnnnnnnnnnnnnnnnnnnctgggattacaggcatgagccactgtgcccagcctttattttttttagtcctcaagttctacacattttctcttaaattcactgatttttagattattttctccctatggcttaagagtacactgagtactatttaaagcagtcatttttgaagaaactgatcttctgtagttatttattaaggctttaatttttttccaggctaaaactacaaagaagattgtgctaaggcttgagtgcgttgagcccaactgcagatctaagagaatgctggctattaaaagatgcaagcattttgaactgggaggagataagaagagaaaggtatataattgcgggtggaaggtgcaatatttttcatagctttattatttgaaaaggtgaacattcattgttggcgtagagctcaggggtaatcctctaaaaatactagatctatagctaaaggtatgtgagattttctgctacaaggaggaaaggaagaatgaggaagcttaacagcatggtgaacattttaggaacagataatgttcttgnnnnnnnnnnnnnnnnnnnnnnnnnnnnaaactcaacttttttctgttctgttacagggccaagtgatcca

SEQ ID NO: 4468 - DNA, 738 bp, Macaca Fascicularis
  misc_feature (1)...(738): n = A,T,C or G
gacatgcttggtgtagcctatgaagnnnnnncgctggccactggttatggtgcctacttggctcaggtnnnnnnnnnnnnnnnnnnnngggaaaagggaagacaaaaggaaatggattagtggttgtctccttttctcctgaaattcnnnnnnnagggatgggctgggatccctattactgggcagatggttttctttgtagtctgggggcnnnnnnnnnnnnnnnnnnnnnnnnnnnnnnnnnnnnnnngtctgggagtcagtagacatgcaaagagaggacaccctagaactnnnnnnnnnnnnnnntcttagcttattagtaagnnnnnnnnnnnnnnnnnnnnnnnnnnnnnnnnnnnnnnnnnnnnnnnnnnnnnnnnnnnnnnnnnnnnnnnnnnnnnnnnnnnnnnnnnnnnnnnnccannnnnnnnnnnnnnnnnncccaatctccctagcctctgnnnnnnnnnnnnnnnnnnnnnnnnnnnnngctaagccagaccgaggcccgtaacctagtagaacgctgcatnnnnnnnnnnnnnnnnnnnnnnnnnnnnncttacaaccggtttcaaatcgccannnnnnnnnnaaaaggtgttgaaatagagggaccattgtctgcagagaccaactgggnnnnnnnnnnnnnnnnnnnnnnnnnnnnnnnnnnnnnnnntgcattatccnnnnnnnnagttataccctacttttaactttgaacttggctgg

SEQ ID NO: 4469 - DNA, 762 bp, Macaca Fascicularis
  misc_feature (1)...(762): n = A,T,C or G
gaggattagagactgnnnaggctgagagccacatccattnnnnnatatccacttcctcatgnagcaatggcacanngagtggccattttccagaagctgctatatggagggcaaatgatcttataagggcattttggcaggtgtctaggagtcaacccctggagctgccaaagaaacccatccacacagaattctcccacccatggtctccctctgcccctgttcagctccctaacaaatctcaagtctctttctagccttgacatgaaagatcagatatcttgaaaattcaacttactcctaggagtatattaaaagaagaaaagagaagttgaaagcatccattttagatcaaaaacaaaaggaggtctagtctaagggaggagaccacccctcatattgtcttatgcccaatttctgcctccaaagaaagaagaagtaaaaactaaaaggcagaaatgaaatccacaagcagacagcctggcgccacaccctgggcctggtagttaaagatcgatccctgacctaatcagttatgttatctatagattacagacattgtatagaaaaacactgtgaaaatccctgtcctgttctgttccattctaattgccggtgcatgcagcccctagtcatgtactccctgcttgctcaattgatcacgaccctctcatgcggacccccttagagttgtgagccctttaaagggacaggaattactcactcagggagctcggttatgagtcttgccgaagctcctgc

SEQ ID NO: 4470 - DNA, 723 bp, Macaca Fascicularis
cacagattagcattaatattttttattctggaaatcctttggcaagtattaggaagcccaaatttagaaaactatgagatttcaaaccacataaacatgattctgttttccattttattttttaactgttaacttaggtatttgcagttctgttccgtggaacttctgcaggcctgtatttagcatgctgtaagtactttggggtgaaataggctctgagtctaaattctcagacatgtttctgatgtagtaccatgaaaagcttgtgccacatgacagaagtgaaatcatagtcttaacctcttcttgacatggactggtcttcacacgggcaccaataaataacagatttggagtatctcctggtgcttattttagatgaaatcaaatcaacccaattagtgtcttgttagtaggtataatgagcctatttctttctaaaaagacttgtgatctggacatgcttttacgagaaatagtgaccttggggaatatgtaaacaaaagacctttttctaagagttgggagggggtgggggactgtataatgaaaagaattagcttacaaaaaagaaattgatattcaaagtattttaggcaaagccagtcaaaatgctttcatgatattttgagatgtaaattttgtctgatttgtattgttcttttcatttgccttcttaactttatatgtgacctgaattttccataacttgatgactataga

SEQ ID NO: 4471 - DNA, 711 bp, Macaca Fascicularis
  misc_feature (1)...(711): n = A,T,C or G
gggggcatnnnnnnnnnnnnnnnnnnnncgtgcagatgnnnnnnnnnnntcttgcaggaccaggtgtcgattggagccatggacaccctggagaaagaccaagccacannnnnnnnnnnnnnnnnnnnnnnnnnnnnnnnnnnnnnnnnnnnnnnnncaatgacctacctaacaagagcagtggcttctcatttgcaggaattgttgcccaattcgggctgccagatgcaataggctctcacctggaaacacgatcacgctctaaacctgtcatgtgccccctagccttattgagaagcttctgtctcccaagatcccctgtgctatcaggaaagcnnnnnnnnnnnnnnnnnnnnnnnnnggggcgatggcannnnnnnnnnnnaannnnnnnnnnnnnnnnnnnnnnnnnnnnnnngaggattcctgtgctccccaccaaggatcgccccgggatcattttctaggttcatttnnnnnnnnnnnnnnnnnnnnnnnnnnnnnnnnnnnnnnnnnnggaggaattggaaattggtctcttttgagtgcagagggaannnnnnnnnnnnnnnnnnnnnnnnnnnnnnnnnngttacagaaatagtttcgatgagctagtgacannnnnnnnnnnnnnnnnnnnnnnnnnnnnngcagtagccttgacaagggccacctcttcacaggatgcagtctgtctgtgcaccaaac

SEQ ID NO: 4472 - DNA, 681 bp, Macaca Fascicularis
  misc_feature (1)...(681): n = A,T,C or G
catctccatgtttattttaccaagaaattnnnctgtcaagagnnnnnnnnnnnnnnngtgaaaaaatttnnnnnnnnnnnnnnnnnnnnnnnnnnnntcttttcaccttgctttttttcatccttctccttaatttgcnnnnnnnnnnnnnnnnnnnnnnnnnnnnnnnnnnnnnnnnntcattctcttcatttatctgaaggttctgtcttttaacctctcaacttttattgctgtattctagtcagannnnnnnnnnnnnnnnnnnnnnnnagttacnnnnnnnnnnnnnnnnnnnnnnnnttattgccaaataatactttgtgtcagcattttcannnnnnnttactcatccaacccttggatctctttgannnnnnnnnnnnnnnnnnnnnnnaaggtggaattgaaatgtggtccacattttaannnnnnnnnnnnnnnnnnnnnnnnnnnnnnnnnnnnnnnnnnnnnnnnnnnnnnnnnnnnnnnctattcagagtttaagtttcaggagaaaaaaaaacaatagaacactctgcctgttattnnnnnnnnnnnnnnnnnnnnnnnnnnnnnnnnnnaagtactatgtttcaaatttcannnnnnnnnnnnnnnnnnnnnnnnnnnnnnnnnnnntattggctagtcatagaaattttttgaacttttaactat

SEQ ID NO: 4473 - DNA, 741 bp, Macaca Fascicularis
  misc_feature (1)...(741): n = A,T,C or G
ttgtagatttgttacnnnnnnnnggatatnnnntagagatatttaaaacaaaatactgccttggtctgtgcaggctgctgtaacaaaatactgtgaacttggcagcttataaataacggaaattcatttctcactgttctcaatggtgggaagtccaagattaaggaattaacaaatnnnnnnnnnnnnnnnnnnnnnnnnnnnnnnngctgtgtctttacacattaaaggaacaaggtagctctctcaggtctctttaataaaggtactaattctcatgactgaatccccctccaaaggccccacctcctaataccatccctctggggactaggtatcagcatgtgaattttggaaaacacaaaaattcagaacatagcaaatacttttaaagcatgaacggtaacattcatttttagtgaaccctgtaatttattcgtgtatatttactaaaacagcgatgtctttgaaattattagcaatgattctgcttcaataactatggtcagggggatttataatattatatttttatatactgaactgccaaagatgctggaaaaaaggaactgatgttttcagcatattttcaaaatattgataagggaagttatcacttttatatagtattcaacttttttcaggtaatagaaatgaataatttattgtgaaataattcattttataaatgtaaaattatttttataaattttattgttggaaatcaaaaattagtagatt

SEQ ID NO: 4474 - DNA, 756 bp, Macaca Fascicularis
ccaggagtgatagcagggaggttctcgtgatgattctgagttgagagtggtgagtgggagaggcttccccagttctctccaactttccctgcagctgcaacctgccctctcgtcccaggtgtggaggctgtgcctgtctccaaaaatagcctgttggcgacaaggtgtggggggcacaagtttacctgaaacaggtcggtggtctttcccaagaagcccacgccacttctggtccctggcccctgaaccctgccttcttcctccctccacagtttcgtcccagactttcctcaagctcctcctcactgcccttcctccccagcccagcctggggacacagatgcacatgggtaggaggccttgagggaggagctggctgatgtggggctgctcagggtaggccccggggcgagcttgctgtcgtggccaggcagcctccacctgtgcttcagcggcgcctgcctccccgaagtgtgtgaggtgtgtctgctaggaggaggcaaggctcccaaagagaggagagacctgggagtgggagctcaggtcagggagcaggcaggggagtggggtctcctagaccctacggtgagctcagagcaagcttcatgcaggacgctccgaaactgtgtggagggggctgtgttgtgggcaccttggggcctgacactgcttcctccgaacgggctccttggtggtctggccacaggggcagctcccccttggctgttaggacccagaagtgtgaagaaagtgaaa

SEQ ID NO: 4475 - DNA, 771 bp, Macaca Fascicularis
  misc_feature (1)...(771): n = A,T,C or G
tggactcacagttcccatggctggggagcnnnnnnnnnnnnnnnngaaggcgaaaggcacttcttacatggtgtgctgtatagagaacgagaaccattctaatgggaaatatccctttatttttttttcttatctcatgagactaattcactaccttgataactttacatgggaaaccgcttccatgattcaattatctcccactgggttcctcccatatgtgggaattatgggagctacaattaacaagatgagatttgggtggggacacagccaaaccatatcatagagcgagcgatgaaaatgaatgaacttgcaacacaactatatggannnnnnnnnnnnaactgcctaagtataatgtcaaaagattcaagacacaaannnnnnnnnnnnnnnnttccatttatgtaaagaacaaaaataagcaaaattaattggtgatattagaagtcaggacaaccatcactcttggagtgtgagggttagtgaatagatgtgagcatggaggcctgggaggggattctggtttctggtcatgttctgctttttgacctggatgtgttcagtttgtaaaaattcatcaaccttgtacacttacaatgtgtcctctggagtgtttttaagtgcttgttgtcatgaatctaatcaagccttttagccctaacttaagaaattcaaggggaannnntgcatttaagaagaacttccatcgaacaagaacttcgggaaattcaggtaaatgacactannnggaaacattcctaacgt

SEQ ID NO: 4476 - DNA, 569 bp, Macaca Fascicularis
cgcaaccggctctggctcgacatgtgtgagcgcacatgtgtggcggggcccactcggggcgcgggggagccagccccacgcaggccgcgatccgccttccacccttgagggctgccaggtgcgcagggggaggagctggctcaaggagggggtctcctgggggcgcatggcttgaggacaccatcccctagaggcctccagggtgatggcggaatgggtcacggggcctcctggtccagcctggaggccgggaagccgcagcccagtctgatgtccacagtggagacccaagccagcctcatcagggctggggcaggaagcgcctgctggcacagggctgggccctgcagtgagtcccagggcaagggaatgcaggtcaaggtgggaagggcctgccttgagggatactgggcacaaccccctggctggagaggagctgagggacgggctgggggtcagcggggaggcgaagcttcctcaaggtcactgagattgaggggagcgcccagatcccccacacccactgtgtgatcccctctgtgcacgtgtagtgatggaatcttcttggc

SEQ ID NO: 4477 - DNA, 766 bp, Macaca Fascicularis
  misc_feature (1)...(766): n = A,T,C or G
cacatatgcagnnnngacactcaagagtggctagccacacagcgtccatctaatttttacaatttcctgtggccgatgtatataacccctaccactatctcacaggtagtcatagtatccattctatagtctgtctcctcacacctgttagtattgacatagcacaaacaccacaagccatcatgttcttcatggggcaagcgaaatannnnnnnnnnnnnnnnnnnnnnnnnnnnnnnnnnnnnnnnnnnnnnnnnnnnnnnntatgatcttttggtccaattcttatttagcatttttattccagcctatttggaaacatgtttttaattgcaatatatgcctgactgaattaagcttgcttgttttaaacaaccaaatcattggaacagaaaaggatttaaaaaacaagaatgcatctcagagtgattaaaaaaaaatcagtggaaataaatgatcatagaaggtgcttttcaaaaccactgctattacaattctcaaagtcctactctgccaaaagaagactaaaagtcataagttacatgacaaagaaatgtttatgtgggaagagggttgctgaaaatcaacaacacttgaagtttaaagtgcgtctttgtagatttcattgtataatgtgtatttcttagaagatggctgacttgattgatctacgctaagtagagacatttcacatttttaaaaccaaaatgttcaatctgtattactctttgccatcttgtatgtagaggctatttaaaaacataaa

SEQ ID NO: 4478 - DNA, 341 bp, Macaca Fascicularis
cgctgcgccgccatcatggacaccagccgtgtgcagcctatcaagctcgccagggtcactaaggtcctgggcaggaccggctctcagggacagtgcacgcaggtgcgcgtggaattcatggacgacacgagccgctctatcatccgcaatgtaaaaggccccgtgcgcgagggcgacgtgctcaccctgttggagtcagagcgagaagcccggaggttgcgctgagcttgcctgctcgctgggtcttggatgttgggttcgaccacttggccgatgggattggtgtgtcacaatctgctcctttattttttgcccgccacgcggaattgagatgctcctta

SEQ ID NO: 4479 - DNA, 695 bp, Macaca Fascicularis
cattacctatagccttatattcagccatcagtattatttcagtacatgtttgcgtagttgtaagtacagtgtggattgctttttcttacttaaattatggcctttaaggttatggatatttaacttcctcatctggttcattactacagtgttaaaaatatactgctgtggataggtattgaactcttgccaccccattcccaggccttaaattagggtaataaggaactgggatttcatttcacttacatttaggatgggttgactctgggctcacctcctcaagaatccacttaaagcctgtgtacttatctaagagtatagcaaattggttttcttttttcatcagttatttctggtagatctttagttgtgtgtttgcaatggcaagggtcagcctgtcctacccttgtgcagaagaatatcgcaagcaactccttagcgtgagttgctatttaaacagggtaaggatgggattttgacagcgagttaaggtcctggaagtatgtatatacaagcaaactaaatgcaagtatgacgaaggctgtcattaagtgacttcaaagtattctttttgcagtcaaaatatttggagactcacaagaaaactgaatgttctgaggaaatgaaccaaaatgatttcctgttcaagttgaatatgaattcattttctcttttaaaaaaaaaaaaaaaaa

SEQ ID NO: 4480 - DNA, 2051 bp, Macaca Fascicularis
aacgcagcccggccatggaggcgtcttacaagtctgagtccgagtctgaggcctggcctggcactcagcggcccgggaccgggaccgtgagcacggcggtgcgcgagcacttgcggaagctgtgtctgcgcgagttcccgtgcggcgccggcagctggaataagtcacgctttcttcctcaaacttggcgaacatggagagagctggtccccaaagaggaggatgtggtgagccccggggaggagacggtggaggccctgctgggcctggtccgcagcccccactccccctgggctctgctgaacgactcgaatgctgaagacagtttcctgagagaactggccatccggaacccgctgatgatcacagacaccttcttctactcctacttccggtccctgcgggtggtagataaggaggtcaccctggtggataaagacctcctgaaatttctaaagctggaggagttggtactgagcgccaatcgaatcaaggaggtggatgccaccaatctgcccccaacactcaaggtgctggagctctacggcaatgagatcagcagcatggagtgtctgtgcgcccacccgcccgccggcctgcagcacctggggttaggccacaacaagcttctaggccccttggaaagtctctacgtcaccgctgatcactggcccaacctcgtctccctggacctgggcttcaatgacctgacagacctgcagagcatggttgccagcctgaggaccctccggcacctgcgactcctggtgctgcagggaaacccactggccttggtgccctactaccgcggcctcaccatcgacagcctggcccagctctgcgtgctggacgacatcaccgtgtctcccaacgagaagcatctcttccgggggctcagcctcaatggcgatctcttggcacaggaggcgcagtttgtggtgaccatcggaaacatcagaggagtcctggacacctctgtcctagacccggaacccgggcccgaaggccctttcgtcgcttatagctattacgtgacgtacgattttgtgagagacgaagaaggtgaagcggttgaggacacaggcgagctggccgagatcgtcaagccctctcccagctcagaattattagttgatgaatctcctgaagaggtcggcgaagatgtcatcaaagacattgttggaggggtcactgaagaggtcgaaggatctctggagtctgaggtggaggagtcaggagagtcggagctgtctgtcatctcggggccttcgaccgtcttgcagacgccaagggcctctgcagaagagctggccaagttgcggctgcgtatagatccccggctctgcccgtccccagggactgtcctcttcaacaccacccacaagccctgggctgaggtcatcccgtgcggctacgagatgcagcactctctcagggacctggtgccactgaaggccttcctgctggcggggaccactgtgaccatcgtggaagagaagattctctcctggcctgtggtgctacctgctgttgacagtcccctgtctgccaagagaggaaagggggagaaggacaagaaagggaaggagaaagacaggaaggggcaaggagagaaagagccggccaaggagtggaaggtgccgaagaagaagaaagagctgcccaaggagctccggcaggacccccccatcctccaggtgctgggccggggcctggtgatcctggagcccctgcttgccggggagcccctggtgtccactgtgtgcaacttcggcatggtccgcaccttgacatcggacaggctgacactggccagggattcaaagaagattaagaaagttgccaaaaaagaaaagccaaaagccgtgaatccgatctacgaaagcgattaccaccccgagcccctgacggtagaggtgcagatccagctgaaccagtgccgctcggcggaggaggctctgcgcatgttcgccgtgtagggcgtgggcaataaacgctgttcccagcaaaaaaaaaaaaaaaaaaaaaaaaaaaaaaaaaaaaaaaaaaaa

SEQ ID NO: 4481 - DNA, 761 bp, Macaca Fascicularis
  misc_feature (1)...(761): n = A,T,C or G
acatacatgaaattnnntttgaagtgttcaatgttcccaaatataactnnnnnnnnccancctaaaagcgtctacatttacacatgtatacacccacgtacagtatacatactgtatataatatatatgaaaatgtttagtatgcacttcttttgattggaactccttaagttaacatttatagtgtagcaacttgtgtaaagtgcactgtgattataaaaagcaaagcacagtaaagtcacaggtcttgttatcttgcactaaaaatgtgtttacgtatttagcagttgtatgtttactttcttgctctttcagacaattgaaacaaatagctatgagaagatgatataaaataatatgttttttagtggataatggcactacatttttaaaagacagggtttttaaagaaaaccatttaacatccattccaatataacatgtttaccatatctaaaaatttgaatgtcatattgcatttttcataattcattagaaatgtcaggtatgtgcctgaaaaattgtgcaaataagcattagataacagatttctctactcnnnnnnnnnnnnnnnnnnnnnnnnnnataataatataaacactgatgttttaatgtcttttaatttttgtacttgatttttttaggtaacatgtaattataaatgtactttgatactactgaagtaaccagttgctgtttgaaaataaattgttttctttagtgcattgacaatattttacaatactttttgtgcttattta

SEQ ID NO: 4482 - DNA, 739 bp, Macaca Fascicularis
  misc_feature (1)...(739): n = A,T,C or G
gcaaaactgnnngaagttcactggagtcctgtnnnnnnnnnnnnnnnnnnnnnntttttgtggggctgggtcgagggagaaggcagactaatagctgaagtaatgacagattgttgctgggtcatatcagctttatcccttggtaattatatctgttttgtttcttgactccgtccaatcagagaataaacatcattgtttcttggccactgaattagccaaaacgcttaggaagaaatcacttaaatacctctggcttagaatttttttcatgcacactgttggaatgtatgctaattaaacatgcaattggggaagaaaaaatgtagaacgatttttgctatttctagtagaaaaaaaagtctgttttccaaagataatgttatactgcctattttgtaatttttttgaaaaaagttcaattttcctgtttttaccttgttttctctatagatcatgatttctgtgaagcaaaaagatgcctttaccatgaattcttgagtttacatcaataatactgtatattaaggggatcagaagtaggaaggaaaaaataagagatagcagaggaaaaagaaaaacatttcctcttataacttccgaagtaatttgtaaaaaagatttgtagagtcaatcatgtgtttaaattattttatcacaaacttaacatggatgatattcctttttaactttatggtaataacttctttgaagttatttagaaatatccttggaacaa

SEQ ID NO: 4483 - DNA, 1435 bp, Macaca Fascicularis
aaccgttgcggggtgtcccagggtctgaggcagaacggtcctccgctgacaccttccctttcggtcctgaggttcccggcctggtggccccaggacgttccggtcgcatggcagagtgctgcggacgacgcctatgaagtctttagtccttctagttgcgctgttgctatggtcttcgtccgtgccggcttatccgagcataactgtgtcacctgatgaagaacaaaacttgaatcattatatacaagttttagagaacctagtactaagtgttccccctaaggagccaggtcgtgagaaaaaatctaactctccaaaacatgtttattctatagcatcgaagggatcaaaatttaaggagctaattacacatggagacacatcaactgagaatgatgttttaaccaatcctatcagtgaagaaactacaactttccctacaggagacttcacaccggaaataggaatgaaaaaacacatggaaagtaccccattctggtcgatcaaaccaaacaatgtttccattgttttacatgcagaggaaccttatattgaaaaggaagagccagagccagagccagagccaactgcaagacaaactgaggcaccaagaacgttgccagttgttactgaatcatctacaagtccatatgtcacctcatacaagtcacctgtcactacttcagataggagcactggcattgagatctctacagaatcagaagatgttcctcagctctcaggtgaaactgcaatagaaaaatccaaagaactaacatttggaaagcacccagagagttggaataatgatgacattttgaaaaaaattttagatattaattcacaagtgcaacaggcacttcttagtgacaccagcaacccagcatatagagaagatattgaagcctccaaagagcacctaaaacgaagccttgctctagcagcagcagcagaacataaattagaaacaatgtataagtcccagttattgtcaccaggacaaacaagtaataaaattgatgatattgaaactgttattaacatgctgtgtaattctagatctaaactctatgaatatttagatattaaatatgttccaccagagatgagagaagaagctgctacagtattcaatacattaaaaaatatgtgtagatcaaggagagtcacagccttactaaaagtttattaaacaataatataaaaattttaacctacttgatattccatgacaaagttgataagcaaactgcattttttcacaggagaaataagcatattcgtaatttcaaaagttgtataaaaatattttctattgtagttcaattgtgccaccatctttatgtgacatgtgttatgaacaattttcatatgagctaaaaacctaatttaaaataaaattttggttcaggaaaaaaaaaaaaaaaaaaaaaaa

SEQ ID NO: 4484 - DNA, 742 bp, Macaca Fascicularis
  misc_feature (1)...(742): n = A,T,C or G
ctgtaatatacacacacagannnatttgaaaatgatagaggaacaaagagttatcattggaacataaactataaaaaaagattccagcactcatgcttgaatttcctcagtgggttgtgtgtttgtccatacatacatgtataaaataaacaattgcgaacatgtcagtgaaacctcataagacgcttttatagtgacgtgcatgtttaatgtatgagaaaaatatttaccaatgtattgtcctttgattcctaaaatataaatactatacatgccacaaactattctaatgtgacttttaatgtgactattaaaatgaggtttcactgtacgttcatgctgtggtgacatttcaccttatactacatgtatatggctacagaaaataagccctcatattcctgctttcagttacagccaagttttcaccaaatcatgactatcatcaccaccaaaattttaaaaaacagtagttgactactaaaaagtaataggtggacaggtcttttatgggagtagtaagcacagtagtgtgattatatctgggaaaacatctacagttgtacagctgtatcctcctcaaaatccggtgaagaatgctatttttctaggctgagcttttgttataaacctaatattcagaaggcaagagttatgatcctgatgtgtccttttttttgcatttgttaattctgaatgtatttttaacnnnngtgatttttttgacttactcgtgtaattg

SEQ ID NO: 4485 - DNA, 786 bp, Macaca Fascicularis
  misc_feature (1)...(786): n = A,T,C or G
actgacatctgttgtctgtgatannnnnttctgtattgtgtggtcttaactacctaaggcggcagcgggcagtggactcccttcccttaggatggggatcaactcaattcaacaagatttataaggcatttactatgtgctaagcatttggaagacccaagctacaaagataagacatagttcctgccctccaggccagcagagggaggcacaaatacccaggaatctctgatgggtgtaaagtgcggtggtgggccacagaaaatgaccatcatggagaccctgtcaaagttccgaccctgatcccaaaggggtattcagaagtggagatgattttggtcccactcatagaccatagatgggtggcaaatctaggatttgtataaagcatatgaaagtagggtgatcacccccgaggcagacgggccagcatttgcaaaggcacagagataagaggagcagggcaaagaaaggagagccagggaaggtggtgggagacgaatctcaaagctaagtagtggaagctgtgcacannnnnnnnnnnnnnnnnnnnnnnnnnnnnnnnnnnnnnnnnnnnnnnnnnnnnnnnnnnnnnnnnnnnnnnnnnnnnnnnnnnnnnnnnnnnnnnnnnnnnnnnnnnnnnnnnnnnnnnnnnnnnnnnnnnnnnnnnnnnnnnnnnnnnnnnnnnnnnnnnnnnnnnnnnnnnnnnnnnnnnnnnnnnnnnnnnnnnnnnnncaggaagccaagggtacagtgagccgtgatcatgctgctgcactccaacct

SEQ ID NO: 4486 - DNA, 753 bp, Macaca Fascicularis
  misc_feature (1)...(753): n = A,T,C or G
tgaaaacagcnttnntgtctgtggcagaatcannnnnntggctgtttctaaaactgacagttgtgggatagcccagtgggaaaggtaggccctgcagagaggggtggccccagggtgggagcacaatgcccggtccactgaggggacaccaggaaactctatgcccgccccaaaaccctttataagttttgtgatgaatctaacctttcnnnnnnnnnnnnnnnnnnnnnnnnnnnnnnnnnnnnnnnnnnnnnnnnagaaacagctttgaaatcaccactaggagagcttggaggagaggccgattgttcagagcagatccggccaggacgcnnnnnnnnnnnnnnnnnnnnnnnnnnnnnnnnncggtgaggtgcagcctggctctgtctggagacagacagagagagagctccgtgtgcacctcggcccggaaggcgcccactgtnnnnnnnnnnnnnnnnnnnnggcgaggggtgtcctgcggaggtgacacacggagagggatggtgcccgggctctcattttctttttatcttaaacatatgttgattgcagatacagcacctaatatcactttggatgttcaatgccattcacaatatgtcattgtagaaccagcatttaaccactgggaggaatttatgtaaataaatgtggaatgcttgaggaaccataagcaccaacataaattctttactgtttattaagattgttttaaaggaagacctaagaccaacaaccctctcaaat

SEQ ID NO: 4487 - DNA, 611 bp, Macaca Fascicularis
  misc_feature (1)...(611): n = A,T,C or G
gcgcccgcgcccaaggcgtatgtgcttggcagcnnngntctggccgccgagctgnngnnngtgggcgtcaccagcgtgggcgtggggcccgagccaatgcagggcgagggtcccggtgactggctgcacgcgccgctggagcccgacgtgcgcgcagtggtggtgggctttgacccgcacttcagttacatgaagctcaccaaggccctgcgctacctgcagcagcccgactgcctgctcgtgggcactaacatggacaaccggcttccgctggagaacggccgcttcatnnnnnnnnnnnnnnnnnnnnnccgagccgtggagatggccgcccagcgcnnnnnnnnnnnnnnnnnnaagcccagccgcttcatcttcgactgcgtgtcccaggaatacggcatnnnnnnnnnnnnnnnnnnnnnnntgggagaccgcctggacacnnnnnnnnnnnnnnnnnnnnnnnnnnnnnnnnnnnnnnnnnnnnnnnnnnnnnnnnnnnnnnnnnnnnnnnnnnnnaagaataatcaggaaagtgactgcgtgtctaagaagaaaatggtgcctgannnnnnnnnnnnnnnnnnnnnnnnnnttttgcctgccct

SEQ ID NO: 4488 - DNA, 863 bp, Macaca Fascicularis
  misc_feature (1)...(863): n = A,T,C or G
cacatgggatgggccaggtnnnnncaggctacnnnnnggatgtcatttttaaaatatgggaacatgcaggtgnnntcccaaagaggcttggactggtattatatccaaccagaaacaaataagctaaagaaagtttaaactcaagaagaaatatgttgacagtatgtaacagctggaaagtttataggcacccacctttggaagaagtgattatgaacttgtgatatctactatttaaaagaaatgttctcaccttgggttgattatggtgtaccatgtgttatgaaaattgttgagctgaagctttgaatcgctttagttgagtctgactcacttgctttggttcctgtgtattttattacccctcttgtcagtgactttccttccccaccccacccagagtgaatttgtagcatgattgtgtaaacctctgtgtagaaaatggagatttcttgctctgaaatgttaagctctaactgatccatttctgtgccctttagcctagtatgtctgaacttccattcttgttatatatttaaactttccctctatattataggttttttggcatccatggtcaggtggagaggaagctgccccttgcagaactgtactgtaatatttttcttttataaatattttcacaggactgattgtacacagggcttgtaataaaattttaacactgtgctgtgaaacaactatggggaatctccattgaaggctacttcaagggcacctgaaagtggagtgttatagctatgactttctatttcttgtttcctaagtaaattaaacctaattttcaccctttcattctgtttcagcctcctgtataagaagtaccgnnnnnnnnnnnntca

SEQ ID NO: 4489 - DNA, 711 bp, Macaca Fascicularis
tataccattttacattcccactgacagtgtacaagagttccaattcttccaaatccttgccaacacttgtttttgtttttttaataagtcatcctaacagatgttaggtgatagctcattgtggttttaatttgcatttccttgatgattagtgatgttgagcatctttttatatacctgttggtcatctgcacatcttctttggaaaaatgtctattcaaatccttttttcattttttaaccaggtcatctgttgttctgcttttgaattatagaaattccttatatgtattttggatattaattatttatcagatacatggcttggaaatattttctcccattctgtagattgccttttcactccatcaatcatttcctgtgctgtgcagaagctttttagtttgatgtatccacggtcttcttataatactcctgctcagccctggggttggtcagttctccaagacaccatgactccttggtggacagtggtacttggaaaccaagatctaggtactagatgtgttctttgttattggggcctccaatcttttttcatatgcattttttacttagtcatactaactacatatttgcaattttgaatcttgtgttttctacttttaaatctttttcatattaatactcaaaaatttttaatggttatataatatttctttcagtggaagtaatatatggtcttggttg

SEQ ID NO: 4490 - DNA, 1615 bp, Macaca Fascicularis
agtatttctgtgctttataaactatattagagggactgggtttaaaaaaaaaaaagatatagggtagaaataagagctatacttacaagagtcaatagatcactgacttctctttaactgtcctgagctacatcatgcccacaaatctgtctttcataccactctatctgccgttcgttcttgttaattgagacattgttttccttatttaagattgagttatgactttaaatgtttacgagctaatttatgtctcagaagaaataaggttgcccattccaatttgaatctttctgttttttattctttagtattgtattgctcttcttcttttggactggttgtcatagtttctgcaaatggcaagttcattgtgctactctcccgatttccccattatggagtaaccagtattattcagtgagctatggggtagtgtttaactccatgcttcaatatgtttttttcctatttgtttttattattttttaatcccaaatgtgatagtagcttcaatatgttttgtcacccaaaaaccatttggctggcaaaaattatctagaaagattattattttgcagttatctgagacaccaaacttaccagccttcattttacaatattttcgaaagaccaaataaaatgtcctaataatctactctatttatatctacatttccttccagttgagtcttcaaatttactgttattttgacacttttaactttcatttaacaatggattagaaaaacattttggtctagccattaaacataatgactgaaaaaaattggtattataaatcaccaatataaatttattgcctaaaattgtggacttatcatatttttatatatttttaaatttccatacctttattcttaaacaccaagtttcagatacaacaggtttctttcaatgtcaaattaagatatgtatttgtaagttattggtggctcatttaaactgtatcatacagcaatgccagcatttttatttaatagctcattgtcttccttttatagcatgttttacttcattgaatgaaatcatgtacccagtgttaactctttgttgttgtccctttcaaatatggataactctgtgaacagtctcgactttctgtatcatgagacagagtgcctaagagaaacccttgcacctgggagcgctgcttggatctatctctacaacatttagtgaatttcttgtaaaccactttgagatacattgttttggaaattcatacaattttctcaacattgtactctactggcaggatgcagttttaaattttatgccatcagttatttattcttgtttattcaaatgactgcaataactgattcattcattaatgttaaggctaatacatttaagatcttgtttaaacaatgtttcttctgcaactggctactcctcttatattaatgcatacacttttgtaaagaagtatatttttatgaaaagaaactttgtaaaagtatgatgtaaattttcagtgcaatgtaaacaaaataaaaatggataattgcttttgtaaaaaaaaaaaaaaaaaaaaaaaaaaaaaaaaaaaaaaaaaaaaaaaaaaaaaaaaaaaaaaaaaaaaaaaaaa

SEQ ID NO: 4491 - DNA, 734 bp, Macaca Fascicularis
  misc_feature (1)...(734): n = A,T,C or G
aaagacactcctgagaagaacatgggttctttnnnnnngcaaaattgttagtgttgaaataaatccactggaatactcaaagtaactttctgtaaatatattttcctgtcaagtgtaataaagtgcatgtgcagtaatgttcatcagattggtagccatttatagtggggagaatcactaaaatgttactaggacctttcccactctaaatctcctttcactgacatggcatgttgtgattcttgtgtcctttattgagctacatcatgactatttcttacaatttatgttagaagagtgagggttgcccctaatatttatagcagcaataacagcaaaataaaaggggggaaaaggatccaattgaaatgtccaacagttaagaccagtaagtaaagtattaaaattatgattcatctagaaaatgaaatactatgcaaccatcaaaatgtatgatgaagaattatatttattgacaaggaaagatattcattacttaatgtcaagtgaaacaatgtctagaaaagcatgtaaaatatttgctttatgtaaaacgtgtatacatgtaactactatgtatatttatgtatataaatatgggtagaattctttttcccagaggttaacagtgattgtctttgagtggagaaatttgacataattttgttagtatatgctttgttcttttctatattatgtaagcatttacaaggagtatgaatcatttctaaagc

SEQ ID NO: 4492 - DNA, 1733 bp, Macaca Fascicularis
tgctggttatattttggagttaagactatgaagctaaaaaaatatgtgtgcacataatttcaaacattaggcccaagtaattttattttcagaactgctcactaattatgggagcactcagtgtttcaggaagtgtgaagacttcagggtttcagcaatgaaattgataaggctcttccctagatctagggagagatagtaaacattcaaaagcaagaacatgtaagatactgatacattctaagaagaaaacccaataggatgatatacaggggtgtgaccctgtatctcagggaggtcagaggaggctgctccgtggaggtgatatttatgcaaatctgaatgataggaagccaggcaagatatctgggagcagagccttacagggaaagggaaggacttgtggaaaaccccagaggcgaagtccatctaggcttgctcaaggacgagaaagaggacaagagcattaagtgtggggagagtggcgagaggcaagatcatcaggcaagggcgccttagacaagaccacaccaatgggagagcacaggacagagcaggagtgtgtggaaattccaacatgaatgacttgcaaaatcaggacacaggctctctccctagcctgacctcttctagtgcttaactaacttgttagcaaaactgcttggggcacagcactgagtcttccagccaggctgcccctttgtattgacatggcagggatacaggaggcagtagagactaactttctagagttacaatgtctctcgaattactagagacattctatgctgatttacaattgatctggcaaagaaagataggcagaactattaaagtgttcaatttccttccagagagattcttccatgttctctcattacaaaaccagaagatcagttatgtagggccatcagcttccagccaaaggtcctataacccgaagcttgaaggcaatcagtacctctgctttacagttgatcactttgaggagccaaagcaaagagcgaaagattgggaccactttgagtggacgtggcactgaactcgttgtaataactacaaatgcaattcaaaataaaagcatgagtatataaattgaaagggtaggtggacagaaagaagagactgactcctagacaggtgctgagaaagcagtgtaattaaaaaggtaaaggaaggaaagaagctacaacatgtacaccacacacacacgtgtgcacacacacacagacacacattatcagatattcaaaaaaattagatcttagaccccacaatacaaaccctagaggacaatggattacagtcttgtcagggagaaatattgtgataaaatcattgcatacttagctatgttttcattgttaaagaaataaacagaccattttgaggtagttaaagctcagaggagaatagcatgtatttactcgtcttgaaatctatgtcggctttatgctccagctaagataggaatcaaaggtgaggttgaaaataaataggcgtaatataaactgtccaccagattgtgttaaatctaaagaatgggtcagtattttattgtatctcactctatgtgaaaagaaacaaaagtttcaccaaataatacccttattttgtatatgcagtgcattataatattttctattttgtcctgtctctttttttgttcatgcttgacacaaaacattaaattggttttgcaacctacaaaaaaaaaaaaaaaaaaaaaaaaa

SEQ ID NO: 4493 - DNA, 753 bp, Macaca Fascicularis
  misc_feature (1)...(753): n = A,T,C or G
gataaaattngtttgaatacactgctnngattaccagccagatcaagatatgtaacatttcctgcatccaagaagatttcttcatgctccttttccccaccctccctgacaaccaggaggttcccttnnnnnnnnnnnnnnnnnnnnnnnnnnnnnnnnnnnnnnnnnnnnnnnnnnnnnnnnnnnnnnnnnnnnnnnnnnntaatgttcatccatatcgttgtgtgtagtagtcgttcattgttactcattgctatataatattttttctcctatttaaggacatttagattatttccagtttttgctaccttgggtaatgctgcagtgattattcttctacatgatcataaataataaatactcttgggtatatgcccagtggtagaattattgggttatggtctatgtataactagctttagtagtgtctgatatagtttggatatgtgtccccacccaaatcacatgtcaaattgtaatccccaatgtcggaggtggggcctggtgggaggtaactggatcataggggtgggtttctcatgaatggttaagtaccaccccccttggtactgtcctcgcaacagtgaattcttgtgagatctggttgttaaaaaatgtgtacctccccccaccctacttgctcctgccatgtaagatggctgctttacctttgccttnnnnnnnnnnnnnnngcttcctgaggtctctgcaaaagtagaagctgctatgcttcttgtacagtccgcagaa

SEQ ID NO: 4494 - DNA, 3202 bp, Macaca Fascicularis
gtttcatccaaaaggtgtctctcaggggaagttaccagtcccttaaatatcacaacggcagcagaactgcagggcccagggaaccttgggaaggagatgtttttttcccagaaaaataagcgacagagttaggaaaggtcaccatcctgaagccctcccaagtacagccttgcgggcctcacagagagcgccaaaccgtccggccctgcgcgcgacggggacggacatggccacatctctggagtagcagctgtgtcagggtggcaaggttaggcccgcaggccctcagctcgggggcgcagccggggcaagtcctcaggaagcagcgaggtgcttgaagggggtgctggaggcagcccaagcccagtcaggatgggtggcccggggccacgacgggcgggaacctcgagggagaggctagtggtaacaggccgagctggatggatgggtatggggagaggggcaggacgttcagccctgggattctggccgaccctcgccttccttctctgcagcttccccgcagccacctccccgtgcaagatcctcaagtgcaactctgagttctggagcgccacgtcgggcagccacgccccagcctcggacgacacccccgagttctgcgcagccttgcgcagctacgccctgtgcacacggcggacggcccgcacctgccggggtgacctggcctaccactcggccgtccatggcatagaggacctcatgagccagcacaactgctccaaggatggccccacctcgcagccacgcctgcacacactcccaccagccggagacagccaggagcgctcggacagccccgagatctgccattgtgagaagagctttcacaagcattcagccacccccaactacacgcactgtggcctcttcggggacccgcacctcaggactttcacagaccgcttccagacctgcaaggtgcagggcgcctggccgctcatcgacaataattacctgaacgtgcaggtcaccaacacacctgtgctgcccggctcagcggccactgccaccagcaagctcaccatcatcttcaagaatttccaggagtgcgtggaccagaaggtgtaccaggctgagatggacgagctcccggctgccttcgtagatggctctaagaacggtggggacaagcacggggccaacagcctgaagatcactgagaaggtgtcaggccagcacgtggagatccgggccaagtacatcggcaccaccatcgtggtgcgccaggtgggccgctacctgacctttgctgtccgcgtgcctgaggaagtggtcaatgctgtggaggactgggacagccagggcctctacctctgcctgcggggctgccccctcaaccagcagatcgacttccaggccttccacaccaatactgagggcaccggcgcccgcaggctggcagctgccagccccgcacccacagcccctgagaccttcccatatgagacagccgtggccaagtgcaaggaaaagctgccagtggaggacctgtactaccaggcctgcgtcttcgacctcctcaccacgggcgacgtgaacttcacactggccgcctactacgccttggaggatgtcaagatgctccactccaacaaagacaaactgcacctgtatgagaggactcgggacctgccgggcagggctgctgcggggctgcccctggcccctcagcccctcctgggtgccctcatcctgctcctggccctgttccctgtgttctgctagatgcgtagatgtggagggaggcacaggctctgtcccctcgacttctccatctgtgggctgggaccgccaacggggtgcagatctcctggcatgtcccccatggccccacagaacgccagggaccgcctgctgccaagggctcaggcatggacccccccccctctagtgcacgtgacaaggttgtggtgactggtgccgtgatgtttgtgacagtagagttgtgtgagagggagagcagctcccctcgccccgcccccgcagtatgaatgtgcaaaacagcccctcagactgaagctccccacccccaccagagagacactgggaaccgtcaagagtcagctccttctcgcaatgcactgaaaggcccagccgactgctgctcgccgatccgtggggccccctgtgcccgccacatgcacgcacacactctttacacaagagcacactcgaaacccctaggccagcggggtcaccccagccacacaggcatccttggggctcagccccaggcagggcacccctggggcgctgcttggcaccttagcggactgatggaagcttttggccagtaggtggtgcctgcctggtgccttcttgcctgtggcctccctgcccatgctcacctggctgctgtgggtaccagtgcaggtcctggttttcaggcacctgctcagctgcccgtctttgacctgggcccccgccccttccaccctgtgcttagaaagttggagtgcatggttctaaatgtctaaacagagaagagatccttgacttctgttcctctctcccttctgcagatgcaagagctcctgggcaggggagcctgggccccagggtgtggcaggagacccagtggatggggccagctggcctgccctgatcctctgcttcctcctcacaaccccaagagcccccacccagtccacccacgtgtggagtctggggagaggagcagggtcttaggcttctcagccctgagcatccctggcagggtctccaacttctaatctcttcccttaagccctgtggccacacagccaggagagacttgccactggctcccgcctcatttcagcccagggtgctcatccaggagcccagaacagtcccacctgtgctgctatgcccacagcacaaagccggctttgctcccagaagtgcagccaggccccagagggtgatcccgccagcaactctacagccccacaccctccccacccatcagcatccacggcagcccctctgctgttccccagggacctctcatacactggccaggaggctgcagaacatgtgtctccccctccctccaagaggtcctgctccctctgccagaaccgtgtgggcggtgggaaggtgctcggcgcccggcccctccctctccctgctggttttagatggtccctatgttggaagtaaaaagtgaagcactttaaaaaaaaaaaaaaaaaaa

SEQ ID NO: 4495 - DNA, 760 bp, Macaca Fascicularis
  misc_feature (1)...(760): n = A,T,C or G
gcagcccctggccntgtggaggnnnnnnnnnnnnnnnnnntgnnnnnnnnnnnnnnnnttgagcacagagatccccctacaccgtggcctnnnctgntnnnnnnnnnnnnnnnnnnnnnnnnnnnnnnnnnnnnnnaggcttctggacaccctctcctggctttgtgactccagcccccttacccctcccacctcaggccctcagctctggccctgtccatagtggcctcccccagaccctcaggctgtgagtggacgacctcttgggctgcactgacagggtgccacagtgacataggcctcctgcctagnnnnnnnnnnnnnnnnnnnnnccccatgcagaggcagctggacctgatacggttgctgtgggcccgggaggnnnnnnnnnnnnnnnnnnnnnnnnnnnnnnnnnnnnnnnnnnnnnnnnnnnngagcaggtggccgccgtgacatctcctgccaacctggtcttgttaaaagtggnnnnnnnnnnnnnnnnnnnnnnnatcatnnnnnnnnnnnnnnnnnnnnnnnnnnnnnnnnnnnnnnnnnnnncttggaaaagcagaaactgctccccagggccagcaactggcaggagccaggccccagccctgcctttggacaggaggcccgggccctccccaccctccgagcctgcatgtcagccaacactggcctggcctgctgcctgctggcaccgcccctccagggccgtcttccccttgctttgtggnnnnaaactcttcctgcttta

SEQ ID NO: 4496 - DNA, 730 bp, Macaca Fascicularis
  misc_feature (1)...(730): n = A,T,C or G
cagactgtgaggtctgtgtgnnngtgtgtgtgtgtgtgtgtgttgtggggatctggcctggctcttggggatggggctgccggggactgccccccttcccgccgcggccaggcgctctgtgtgctgtgtgtgtcccaggctctgttgaccccgtccaggaactttagttacccagcctgacctctcttctgagattggccagggagcggggcaggcaaggggaccagtgtggagcctgagggnnnnnnnnnnnnnnnnnnnnnnnnnnnnnnnnnnnnnnnnnnnnnnnnnnnnnnnnnnnnnnnnnnnnnnnnnnnnnnnnnnnnnnnnnnnnnnnnnnnnnnnnnnnagaagccccatccttcctgcctctgggcataaggccccgagcacacttcagaagccccattcccccctgcctccaggccgagccctgttgtgagctgaagctctccctgccccaccctggccatgtgatcgtgttggtgacagaccctgatgtgctggtgctgtgtccccaaaaccggggccctccacggaggccccttcccagcgacactacctggggctcaggcccggacccctccagttcacggttgctcttgggagctgcccctcccatcacatctgaaccttgnnnnnnnnnnnnnnnnnnttacagaattatatttttttttttcgaagagtaattaanagttatcctctgacatgacaagacacaaaaagtaca

SEQ ID NO: 4497 - DNA, 724 bp, Macaca Fascicularis
  misc_feature (1)...(724): n = A,T,C or G
aagaacctgggtgtgagtgaataaaaagtaaacnnnnnnnnnnnnnnnnnnnnnnnnnnnnnnnnnnnnnnnnnnnnnnnnnnnnnnnttcccaattgtagcaccgtgttctgtgtgaatacgcataaccagagtgactcccagcacccaccgtgtgacctctccccagcacccggcatgcccagctgggcccctctgtgtacgctcacatgcacgtatannnnnnnnnnnnnnnnnnnnnnnnnnnnngtnnnnnnnnnnnnnnnnnnnnnnnnnnnnnnnnnnnnnnnnnnnnnnnnnnnnnnnnngcatcccatagcaccgccgcccttgccccatcaccctgtgggctccatgcaggacacagcatcttgccccatcaccctgtgggctccannnnnnnnnnnnnnnnnncctgctccccggaggcacctgttcggggtcttcttggggcttgtgctttcacagctctctttgaagcagatgtcctggtgaactctgtagactcttttatacctgtnnnnnnnnnaaagctttgtaaaaccagacagtgaagcaaaatgttgccaactgcttaacctaggctatgtgaacccacaggtaaccctgaaggtgtctgagggaaaagctgctattttctgaatgaaacgttacctcctattgatgtattaagatgtttaacataaatgtcatgtgatttgtaacaaatttattgaggtacaat

SEQ ID NO: 4498 - DNA, 690 bp, Macaca Fascicularis
  misc_feature (1)...(690): n = A,T,C or G
tctggacaggggatttttttctttcagaccatccccaaatgggcattcaggccacacaagagtcctcacccccaacaatttnnnnnnnnnnnnnnnnnnnnccacactagannnnnnnnnnnnnnnnnnnnnnnnnntcctgcagactctctaccaacaacagaggcagatgggattacccagtgggagagaagcatggaccacttccagatagatnnnnnnnnnnnnnnnnnnnnnnnnnnnnnnnnnnnnnnnnnnnnnnnnnnnnnnnnnnnnttaggggtgatggccctggaatatttatccctacattgtttcctagtttcactctataccttatgctccctccatctttaccctattcacccttatcacctcccaggacagtggtcaggtcttacaaaaggctagtgcttcaggaagatgtttatnnnnnnnnnnnnnnnccttggtagctcccctcatttcctacaatttgaaacaaaggtcataaaaataattattggcatcatgcttggttgggagttgggaatggggattgtgatggatcatatactcatcactgtttcatttctggatttcatttttagctatggatatactgtcacattgccaatgttaacaagtaacatctctgttctttgtccttattatacattttctatttgcctattgtttcctctatgctta

SEQ ID NO: 4499 - DNA, 716 bp, Macaca Fascicularis
  misc_feature (1)...(716): n = A,T,C or G
gaaaggggggaacattagctagccagcccagcatcttcctcccttcttccaccaccggtgtcatctgctctctgcagtctgctccatccatcacccatctgcccatctctcaggacatggaagcagcgggtttggacnnnnnnnnnnnnnnnnnnnnnnnnnnnnnagctcaccctccccggaacccaggatcatcctgtctggctgcagtgagagaccgacccctaacaagggctgggccgcagcagggagtccagccctaccttcttcccttggcagctggagaaatctggtttcagtataactcatttaaaaatttatgccacagtccttgtaattggaaaaatactggtgcccaggttttcttggagttatcccagcagctgcgcctctagctgggatccagtacctggacggggctaattacagcttctccccaacaggaaactgtgggatttgaaaaggaaagggaagggaaaacagagaactagtggtctaccaagtggttggcagctttcccaacgtctgcttacactgaggcttggcactggggggcagggcctgccccagggctcttggaatttcccttgatccagctagcctgggacattccctaaaccagctgcgtgttagcatcaggcagaatgaatggcagggagtgattctgtcttcagagagggtggggtacttctccataaggcatctcagttcaatcc

SEQ ID NO: 4500 - DNA, 689 bp, Macaca Fascicularis
  misc_feature (1)...(689): n = A,T,C or G
caaaaaaaaaaaaaaaaattcaagttaaagcgatgtgggaagaactagagtagttaattttgaaaagaagaaacaaattggaagactcgcactacctgatttcaagacttctgaaacagcaggatcacagcgccatgaggtagcagaagggaaggcagcacagaggagtgggacagaagaggccccagacagactcacacacacatgcggggtctgaaggagtgccgtgaaggaaggatgctcttctcagcggacaccctggcacagacatccatacgcaggagaagcgagccttgcctcccgccgcagcccttacaccacattaactcagaagtgatcggagacctaaatgtaaacccaaatcaaaactgctaggagaaaacaaactttgtgatttaaattaggtaaggatacagtgccaaaaacatccataaaagacaaaagcaatgaattagaatatattaaagtttagccnnnnnnnnnnnnnnnnnnnnnnnnnnnnnnnnnnnnnnnnnnnnnnnnnnnnnnnnncacaaggtcaggagatcgagaccacannnnnnnnnnnnnnnnnnnnnnnnnnnnnnnnnnnnnnnnnnnnnnnnnnnnnnnnnnnnnnnnnnnnnnnnnnnnnnnnnnnnnnnnnnnnnnnnnnnnnnnnnnnnnnnnnnnnnnnnnnnnnnnnnnnn

SEQ ID NO: 4501 - DNA, 712 bp, Macaca Fascicularis
  misc_feature (1)...(712): n = A,T,C or G
taagcaacacaatcnnnngaaacactttctaaattgtctcaagctttacannnnnnnnnnnnnnnnnnnnnnnnnnnnnnnnnnnnnnnnnnnnctttcctgcaagtcagtgcatatcagaagtcttaagaatgtacgcctaaccctttatttagacattccatttttagaacattttctaaaggaaaattttataagtttatgtgtaatttttggctataaaagagtgnnnnnnnnnnnnnnnnnnnnnnnnnnnnnnnnnnacatcaaacaaccaacgtgggggtggggcatggtggctcnnnnnnnnnnnnnnnnnnnnnnnggaggaagaagtgggcagattgcttgaggccaggannnnnnnnnnnnnnnnnnnggatggcaaaacttcatctctaaaaattctaaaaaaacaggtgggcatggtggcatgtgcctgtactcccagctacctgggaggctgaggtggannnnnnnnnnnnnnnntgggagnnnnnnnnnnnnnnnnnnnnnnnnnnnnnnnnnnnnnnnnnnnnnnnnnnnnnnnnnnncagagtgagacccaatctcaaaagcaaaaacaaaaacaaacaaacaaacacccaacaactgataggaaattaaataatcattgttcatccatacaataaaattctaaggagacatcagacatcacactgtggcagactatttaatgaaatagaattag

SEQ ID NO: 4502 - DNA, 734 bp, Macaca Fascicularis
  misc_feature (1)...(734): n = A,T,C or G
aaagtactgtccttgaaaccacagagtcaagataaatgtatagtgtatggnnnnnnnnnnnnnnnnnnnnnnnnnnnnnnnnnnnnnnnnnnnnnnnnnnnnnnnnnnnnnnnnnnnnnatacannnnnnnnnctagcaagttacaattgatagaatacattnnnnnnnnnnnnnnnnntaagccaggcacagaaagacaaacaccacatgatctcactcatatgtggaattttaaaaagttgatgtcacacaagtagagggtnnnnnnnnnnnnnnnnnnnnnnnnnnnnnnnnagaaggcagaggcactgaaagatgttggtcaatgggtataaagttacacttaggaagaataaattttggtattcaccacagttgggtgactatagcaaataataatgtagcatatatttcaannnnnnnnnnnnnnnnnnnnnnnnnnnnnnnnnnnnnnnngaaataacaaatgtttattatgatggatatggtcatcacacctatttgttcatgatactgtgtatacatgcattgaaacaccacattgtatcccatatatatgtacaattatgtgcccattatacattttaaaataaattttagaaaccttcaattaaacaactcttggtttaaaggaaaaatataaaccaaaactacagtacctctaaaacaaataatgatgatgtaaacacttcatatcagaatccatggaataaatatnnnnnnnnnnncagag

SEQ ID NO: 4503 - DNA, 733 bp, Macaca Fascicularis
  misc_feature (1)...(733): n = A,T,C or G
gctggctggggctgagagagggtctgggttatctcnnnnngatcttcaaaacaagagagagaccttgaacactctgactctccacccttgttttttnnnnnnnnnnnnnnnaagaggtcctgagtcccctcctagtctttnnnnnnnnnnnnnnnnnnnngaaagcaggtgcccggcatggccatcctgatgttgctggcaggatctccatgcaccttgtccttctccactgatactggcagcttggctcctggacccaatatcccttgagtggaattctgcagtgcaagagcctttcctgggagctgtcccatgtttccatggtcccagtctcccccccacttggtggggtcaccaactactcaccagaagggggcttaccaagaaagccctaaaagctattgacttatctgcgcttgttccagctcttatgcccccaacctgccctaccaccaccacgtgctcagcctgatctgtttacatggtactgtatgtatgggagagcagactgcaccctccagcaacaccagaagaaagccagtgagcctactaaccgtgccatcttgcaaactacactttaaaaaaaaacaactcattgctttgtattgtagtaaccaatatgcgcagtatatgttgaatgtatatgaacatactttcctatttctgttctttgaaaacgtcagaagtatttttttttctttctcattttatgnnaactaaaaaggataaaaaa

SEQ ID NO: 4504 - DNA, 572 bp, Macaca Fascicularis
  misc_feature (1)...(572): n = A,T,C or G
tctagtaataaacaattacnnnnnatttatactttctnnntaacctgtatttaattttaaaaaacataaaaatgaggaaccaagtgaaactacgcatataaatattaaagtgaagtggacgagatgacctttcagagctcttctcttatattgtgtcataatgttggactcagattttatttgctaaataatataccatattgacattaaattaacagtgattcttcaaactgttcttatttccatttttcaaggtttaataaaagttttaacaatacaagtttaggggccgggcacagtggctcacaccctgnnnnnnnnnnnnnnnnnnnnnnnnnnnnnnnnnnnnnnnnnnnnnnnnnnnnnnnnnnnnnnnnnnnnnnnnnnnnnnnnnnnnnnnnnnnnnnnnnnnnnnnnnnnnnnnnnnnnnnnnnnnnnnnnnnnnnnnnnnnnnnnnnnnnnnnnnnnnnnnnagtagaatcacttgaatcctggccgggcgcggtggctcaagcctgtaatcccagcactttgggaggccgagacgggtggatcacgaggttagaagatca

SEQ ID NO: 4505 - DNA, 2825 bp, Macaca Fascicularis
attatagtaactcatttaacacatagctgtttacgatctgtgctggaacaaatagcagcatatggccaggttgtgtttcgactccagcagttcattgatgaagtcatgggacacagttccgagagcatgctgcctggaagtgggtctgttcctaagaagtcaactgaagccccctttagaacctaccaggctttcatgtgggccctgtacaaatatttcattagttccaaagaggaacttgcagaaatcgagaagtgcatcatcaataatgatgctacaataactcttgcaatagtggtggacaagttggcacctcgattggctcagctcaaggttctgcacaaagtgtttagtactggagtagcagaagttccacctgatactcgaaatgttgtccgggcctctcacctgctcaacaccctgtacaaggccattcttgaatatgacgatgttggagaagcctctgagcaaaccgtctccctgctgttctctctctgggtggaaacagtacggccttacctgcagacggtggacgagtggatcgtgcatgggcacctgtgggatggcgccagggagttcatcatccagagaaacaaaaatgttccagttaatcacagagacttctggtatgcaacttacacgctatatagtgtatcagaaaagacagaaaatgaagaaaaaatgagtgataatgctagtgcgagttccggcagtgaccaggggccctccagcaggcagcacaccatggtgtccttcctcaaacctgtcctgaagcagatcataatggctggcaagtcgatgcagctgctgaagaacctgcagtgtgcggagagcaccacctgccaggcaggagccagagatgcagaaagaaaaagtttatacactctctttctggaatctgtacagtcccgtcttcgacatggagaagattccactccacaggttcttactgagcaacaggcaaccaaggagaacctaatgaagatgcagtccattgctgaaaggcatcttgaactggatgatgttcatgatccactgcttgccattaactttgcaaggatgtatttggagcagagtgactttcacgagaagtttgctggtggtgatgtatgtgtggatagatcatcggaatctgtgacatgccagacttttgagttaacgctgagatcctgcctctatcctcatattgacaagcagtatctagattgctgtggaaatctcatgcaaactctaaaaaaagattacaggttggtagaatacttgcaagccatgagaaattttttcttaatggaaggaggagataccatgtatgacttctacacatccatttttgataaaataagagaaaaggaaacatggcagaatgtgtcttttcttaatgtccaactccaagaagcagtaggacagcgttatcctgaggatagttcacgtctatctatatcttttgaaaatgttgacacagctaagaagaaactgcctgttcatatcttagacggtctgaccctcagctacaaggtcccatggcccgtggacattgttataagtttggaatgtcaaaaaatttataatcaagtgtttcttctcttactgcaaataaagtgggcaaaatatagtctggatgttttactttttggtgaactggttagtactgcggaaaaaccacgacttcaagaaggccttgtacgtgaacaagacacagttgctcagttcggaccacaaaaagaaccagtaagacagcagattcatcgcatgttcctcttaagagtgaagctcatgcatttcgtgaacagcttgcacaactacatcatgaccaggattctccacagtacagggctggagtttcaacatcaagtcgaggaagccaaggatttagatcagttgattaaaattcactataggtatctgtcaaccatccatgaccggtgtctgctgagagaaaaggtcagctttgtgaaagaagctatcatgaaggtgttgaacttggccctcatgtttgcagacggttggcaggcaggcctgggcacttggcgaatggaatctatagagaaaatggagtctgattttaaaaactgccatatgtttcttgtaaccattttaaacaaagccgtctgtagaggatcctttccccatttggaatctctagcgctgtcactcatggctggcatggaacaaagttaaatgtcttcagtgtgagaaatatctccaacttcatcatcatacatgtacatttccaccatgtgcagctgaaaagtgagaatcttttaatttcggtttatttgtaaaactggtccactgtcggctgggcacagtcactcacgcctctaatcccagcactatgggaggccaaggcaggcgaatcacttgagcccaggagtttgaggccagcctgggtaacatggtgaaaccctgtgtctaccaaaaatacaaaatgtatccagacgtggtgtgtgcctctctagctactcaggaggcctagatgggaggattacttgagcccaggaggtcaagactgcagtgagccatgattgcactactgcagtgcaacctgggtgacagagtgagatcctgactcaaaaagaaccacttgtctgcagtccagacagatggattgtaggtgggttttctggagattagtagatactgtatagagttgtgtacataaaattgtgtcagtgcaaagtgtatacaggctgtttactctatatttcctactgtaagatacagatttatggtactgatatctttaaatataaattatatcatattttgaaaatgtaattctgatattctaaataaaggacttaaaaaaaaaaaaaaaaaaaaaa

SEQ ID NO: 4506 - DNA, 727 bp, Macaca Fascicularis
  misc_feature (1)...(727): n = A,T,C or G
atgacgaagttcgctannnngtgcgggaggaggaccgtgttcacaggaggggctggccctgaggggagattgggtcntgtnnnnnnnnnnnnnnnnnnnnnnnnnnnnnnnnnnnnnnnnnnnnnagtcagtcgcctttttcagtgnnnnnnnnnnnnnnnnnnnnnnnnggaaggaagtgannnnnnnnnnnnnaaccccttccaacccaactgggatggaaaggagatacgggattcnnnnnnnnnnnnnnnnnnnnnnnnnnnnnnnnnnnnnnnnnnnnnnnggctccttggaaaaacgaagccagcctggaccatagcactgcctggaggctctgtatttgctcccatggagcttcgtcggggcggtgcaggctcccaaactcaggctttcagcnnnnnnnnnnnnnnnnnnnnnnnnnnnnnnnnnnnnnnnnnnnnnnnnnnnnnnnnnnnnagaannnnnnnnnnnnnnnnnnnnnnngttgaattcagtgnnnnnnnnnnnnnnnnnnnnnnnnnnnnnnnnnnnnnnnnnnnnnnnnnnnnnnnnnnnnnnnngtaaaaacgaagcagaagccccaaagttcacattnnnnnnnnnnnnnnntttattttttccttttcttcttggctggttctttgttctgttcaccatgctctgatnnnnngccctagaagggaaaagaagtaatgctctaacgtgataaacctgctncaaagca

SEQ ID NO: 4507 - DNA, 741 bp, Macaca Fascicularis
  misc_feature (1)...(741): n = A,T,C or G
ttgcacgtgtannnnnnnnnnnnnnnnnnnnnnnnnnnnnnnnagnnntaggcaggaatgaattgaattaaattcagttcatcgtctatgcagatttgtttcttttaagcacgtccttccctcctgctgttgccctcctcccattaactttcctttttaatcttnnnnnnnnnnnnnnnnnnnnnnnnnnntttccctagcaaagcgtttatattccaaataaggcctctctgaaacgtctgaattacttttcccttctttgttgtggtcagcttcattatnnnnnnnnnnnnnnnnnnnnnnnnnnnnnnnnnnnnnnnnnnnnnnctgttttcttatagtttcataaatacaaactaatgtgatgaccttaaaaattgtggatcctacatgttcctatgttcattctnnnnnnnnnnnnnnnnnnnnnnnnnnncacacaaannnnnnnnnnnnnnnnnnnnnnnnnnnnnnnnnnnnnncaaatgtnnnnnnnnnnnnnnnnnnnnnnncaggcagtggcccccgttagcatggttgtgagtggacagtgtccagcagnnnnnnnnnnnnnnnnnatggcttgtaagtgcgttgttaagacttttgcttcagtgtttgtctcccagtatctgaacctaatttaaagaaaaagacgtttccaagttgtatttattaaatgtgtttttccttacattttgtgctgctnnnnnnnnnatctcattagcttagttgtgtttg

SEQ ID NO: 4508 - DNA, 751 bp, Macaca Fascicularis
  misc_feature (1)...(751): n = A,T,C or G
tggaacaaaactgtannnnnnnnnnnnnagggaagctaacagtgttagcnnnnnnnnnnnnnnncatcaagattcccatagagggaaaagctctttgtaannnnnnnnnnnnnnnnnnnnnnnnnnnnnnnnnnnnnnnncagcatcagagtccacactagatggaagctttgtgacttggacaaatgtaagaaaacattttgatgaactcatcctttactaagcaacaaaggatacacaacaaaaatggacctcaataatcaaatatgtggtagagagatagtaatnnnnnnnnnnnnnnnnnnnnnnttaaggaaaagaccattaaatagaagtggtgacagtaaaaaaaaaatagaccaaatgcatattatcactttgacattattttatggaattaaagacaattgttattagannnnnnnnnnnnnnnnnnnnnnngggcagagttgaggaattaatctgtgaccagtctctatggatatttaactgtctttgatactattaactttttattttctgtagtagaggtagagagtagagggtaagtctttataactaatcacgtaactatannnnnnnnnnnnnnnacattattgactatattgttgtttgtttggaattcataatgctcactaaaannnnnnnnnnnnnnnnnnnnnnnnttattcctgggacccaataagtgtatcacttcttccagacttactcccttttattttttatgatgttagtctcannaaatgctgca

SEQ ID NO: 4509 - DNA, 710 bp, Macaca Fascicularis
  misc_feature (1)...(710): n = A,T,C or G
gcacnnnnnnnngggtgacagagcaagactccgtctcaaaacgaaaacaaaaaagtgacacatccagctccctctccaggtcgctggagatgtgctctcttgtcccgcctgtttctcatcagcacaggatcaaaggatgaaaatgctgacagcttctgaagccgaactcaacagtctcnnnnnnnnnnnnnntgtcacttacttttctccatctccctcagctgcaccccatccctttagatcgtgcgtgttttagtgactctgacacnnnnnnnnnnnnaccgtccaaatacccatttatttatttattcgagagggggaaagcgggtagaggatgggatgttttggaagcactttgcaacttgtcagnnnnnnnnnnnnnnnnnnnnnnnnnnnnnnnnnnnnngaatgcactgaagagaattccttctaaacgaaggtgagggtagtgttctttctctaagtaaagggaaagaaaaaaacataggttgcttaccaggtggagacaagattcaagacatagcagaaaagtggannnnnnnnnnnnnnnncttaaatgaggctgttttgacgttctctgccaaggatttagagctcttgttgaattaccatagaagaagcgcgagtctcagtagagatgttctgtgtgtgcagcctgtgctctgaactggctttccacctgccgtggttcttgcacagactggcagttc

SEQ ID NO: 4510 - DNA, 1345 bp, Macaca Fascicularis
catgtttatgttgtgagcatgtagaaacagtaatgctaatgcatggctagttgcctttttaagattgtgacaccaggcttacctttttaaagtttagtatatagagacaattttaatggaaataactactgtagactattggagaatgatctctttgtgatttaagaagtggctggattggaacttttaatatgctaatgtggaaaattaattacctttatgaaggtggtttattacgaataagcacactaacccctcggaagttgttttacctactttaaaagttttaatggattgcacctctgtaaactattcctaaaatgtgtatgatatatttgaaaaggcttccattaatataatagctttgcttgcagccttccaatctatgttggtttacctgtagtgttttctaaagtgtggtcagaggcccctatagaatgtattgtttgaaagtgtagtgatatatttgtgtttttatttcaagtaagtcattttaaccgaatgttccttcatattcatttataaaaagtacctgtatcaaaggaattttaaaaaaagcaatcagtattattggaccaaatttggtgtttgttttaaccttgactctcttcttttgattatttctaatgctacaagaatgctgtaaagtgtcttctaaaatgatgtagcctgacaagacatttttgtcagtgtattaaactaggtagtattgtgcactgatttgaccattgtgaaatcctttctcagtgtaactgcatttctaataaaatttattgagtggaaacaatctttgtacaatgactagtcatgcatcatcagtaattttacaagttcttgtagtaggtagggggtactactagagatatctgtggcatgattatgcattctgtagtattatttaattaatttggggttcattttgcttccttttctttatgcttagattatcttactggttcaacatttttctgatatatgcagtattacagatattcagcaaaatattaatgggcttctttaaattctatattatagtgtttcagttccgtgtcttaacagtttgtgataaaactgtcttttcaacttatgtaatgatgttgacacttttgacttttatttctggtattagagtttgtattttcacagagtgctttgtagcaggcattacaattaatctgttttgtacataaatgtgccaacagcttgatggtggcgtttttgaaatgtagaacaaagtgcttgcaaaatgtaataaatacacttgtgtactttgtgtacttattattaaaaaaaaaaaaaaaaaaaaaaaaaaaaaaaagggcggccgctcgcgatctaaaactag

SEQ ID NO: 4511 - DNA, 394 bp, Macaca Fascicularis
ctgaggaagagaaagagttggagtcctttaacaattagctgcctgtttttctgtagctagtgagtcttatctctccctttcccaggcattgtgaagacccgtttctctagctgtgcagctgcaaggtcactagacagataaactcaagtcgcaaaacatgcttttccttgaaaagtaagaaatgatgtgatgcaagtctcaattgaataacgtctttgtttcttgtttctgtaatatgcttccgcctgcacaaatcttctcctacgcacgaaatgcttaaaaggtaacttgactctttgttcagggctcagtcgtttggatgttaatctgactggtccagtgcacctaaataataaatatcctcctcaaccccttggtatctctgatttcttat

SEQ ID NO: 4512 - DNA, 779 bp, Macaca Fascicularis
  misc_feature (1)...(779): n = A,T,C or G
tgcttttatgnnaaccagaatcatcctgaggtcccttctgaaccctctgnnnnngcgctaattgtaggaaccacagcgctcttagggtgagaggcttagccnnnnnnnnnnnnnnnnnnnnnnnnnnnnnnnnnnnnngcactgaaccaactgccannnnnnnnnnnnnnnnnaaacccaaacattggcaagtaattttgcaactttcaaatgtgttctttagnnnnnnnnnttgtgtttctttccctgcttttgaaatagtaggaagagttcttggtggtgtctccccctcccccttcaattcttcagttgtatagtagttatagggaagacatgggtgtttttctttattattactttttttttttttctgcaggtcagtaaaaggatttaagttgcactgacaaaaataccaaaataaaagtgtatttttaagttcccattnnnnnnnnnnnnnnnnnctggccagatgcatttttgagtttgtattagttgataaattaacagtaataacaagattgtatgaaccgcatggtgcttgcagttttaaatattgtggatatttgtcctgcatcagaaacgagctttggtttttacagattcaactgtgttgaaatcaaacctgccgcaacagaaattgtttttatttcatgtaaaataagggatcaatttcaaaccctgcttatgatatgaaaatattaaaacctagtctattgtagttttattcagactggtttctgttttttggttattaaaatggtttcctattttgcttataa

SEQ ID NO: 4513 - DNA, 688 bp, Macaca Fascicularis
  misc_feature (1)...(688): n = A,T,C or G
tattcttttatgttttgtagagacggggtctcactgtgttgcccaggctagtctcaaactcctnnnnnnnnnnnatcctcctgccccggcctgttacagcctttttttgaaggtaatnnnnnnnnngctcttgaagtatcgtgactgatgagtacacaagccatccagccccagcaaccccctggcaccttttctgagggtgtctactgccccgctgtgccgtgcctgctgatccgggtacggcctgatcgcacgatggccttcccggaaggatctgatgctcgtgaggcttattgctaaggaggaagatgcaaccaatnnnnnnnnnnnnnntgaccgggtcacgcctcgcatgggtgtggagtgtcgcctgccacctnnnnnnnnnnnnnnnngtggctactcaggaacggcacgggaggaggcccccgcctgccccagcgacctgcctgccctgctctagccggtcccgctctcaagtgcagacgcccaggcctgcacatccacgctcacgacacaaccccaaggagccccccaggtggccccgtggccggacgtgcaccccgcagagcgaccacccttgagacctggggtgtggtctgggggctgtgtggggacctcctgccgggatgcgggagcttctaagggcaagaatcacaggtgtgactcctgtctgtaaggaaaaccc

SEQ ID NO: 4514 - DNA, 769 bp, Macaca Fascicularis
  misc_feature (1)...(769): n = A,T,C or G
agagccannnnnnnnnnnnnnnatgcagaactgtgtccaagcaaactnnnnnnntgtctacattacccagnnnnagatattcctttatagcatcacagaacagactaatacagcatccaacaacattagccactgctactattatcattagtattttaagtgtgtgcattttaactgctggtacactgtgtgagctggcttggatgtccgtcccctccaaatctcatgtgggactgtaatctccagtgttggaggtggggcctggtgggaggcgtttggatcatggcggcatattcctcatgcttggctgggcgccatccccgtggtgatgagtgaactaacaggagatctggttgtttaaaggtgtgcggcacctcccccctctcttgttcctgctcttgccatgtgacacacgggctcccctttgccttccaccatggctgtaaattccctatggcctcaccagaagcagatgccagcaccccacttcctgtacagcttgcagaaccaagaacaaattaaacctgttttctttataaagacacagactgaggcatttatttatatcagtgcatgaacagccccatacactgggcatacgggttatatcctgctttccttccatttactattatgagcatttttatgtcacaatatattcctcaaaacattatttgaatgactgtataatagtccatcatttaaatatattcataacttactctgtagttaaccattcacctgttcctgcaattaggggtgtgtgtgg

SEQ ID NO: 4515 - DNA, 758 bp, Macaca Fascicularis
  misc_feature (1)...(758): n = A,T,C or G
agnnnnnnnnnnnnnnnnnnnnnnnnnnnnnnnnnnnnnnnnnnnnnnnnnnnnnnnnnnnnncaaccacagctcgcaggtactctgttgaggttagcagtacacacacaggcacacatctgtattcatgcagcattcttgcacaagcacctacttataaattcctacagggtgacctccccgactcacattcagatatagttcatttccatcctagatcttgggcaagattcttgacttctctaagcctcagcgtactactgtatcaaatggaaatataatggtagctaccatggagagtaaggattggtgggagggaagccaggtaggctactcggcacatagtaagggcttgatgaatggtgctctcgtttcactgaagcaaaaggggaaacaaaaagtttagcagacaggcagaggatccaaaatgttgtgtagcgtcatcactgatggcactcttgtgcctgagcctgacctctctccctagggctttcagaatttcctaggggtttcctgccaggcacannnnnnnnnnnnnnnnnnnnnnnnnnnnnnnnnnnnnnnnnnnnnnnnnnnnnnnnnnnnnnnnnnnnnnnnnnnnnnnnnnnnnnnnnnnnnnnnnnnnnnnnnnnnnnnnnnnnnnnnnnnnnnnnnnnnnnnnnnnnnnnnnnnnnnnnnnncacctactctggaggctgaggcaggagaattgcttgaacccaggaggtggaggtttcagtgagccaagattgtgccac

SEQ ID NO: 4516 - DNA, 677 bp, Macaca Fascicularis
  misc_feature (1)...(677): n = A,T,C or G
gnnnnnnnnnnnnnnnngtcccacannnnnnnnnnnnnnnnnnnnnnnnnnnnnnnnnntgagctgctgggcctggcagcgttccccacttcctagtgccttgctcccctggaattccacagccaatcaaccacagnnnnnnnnnnnnnnnnnnnagaaatgacatcattcctacatcctgccttcgtaaaaatcaagacccaattaaccatcacccgcttctcgcccctgatcgatggggtccctgagtgcaagcgtcctgtgcaatcccctccctcctgccgctttcctagctaagccctgccacccccacaaatcacaatctgggtttggggcattggagagacagtgggccccagatcttccccacatagcccacgctgctcagggcacggtctccaaccaggctggagattgcctgcctgcccactgcagctgcagggccccaccctgtggaaaagggaactcccccactcaactgcactgtccttttctgctgtctagtctgtgctaagcgacactatttgtactcttttcaaaacggtgccctaaattggaagagaaggaggggccaggaacacagccctctccgcagtctttctccacctccacttcaccactcctgctatagacttcttgtcttgcatctttgataacnnngagtcgcaaccgagcga

SEQ ID NO: 4517 - DNA, 924 bp, Macaca Fascicularis
  misc_feature (1)...(924): n = A,T,C or G
ctggtaaccttanatttatttggttgatgtggaaaattgnnnnnnnnnnnnnnnnnctagatttttttcattgcctttttattctgatattaggttaatcactttgaagctatnnnnnnnnnnnnnnnnnnnntagcatgctcacacaagttagtgtagccagtgaggaaaaagttaccataatgacagnnnnnnnnnnagaagtgacagctgtattactcagagcttttacttcttacacctagaatattaaaatataaaacaaggcgagaaatnnnnnnnnnnnnnnnnnnnnnnnngcacatatgttccttatgtataatgttnnnnnnnnnnnnnnnnnngtgggataaagaacacttacgtatcagtaatgggaattttaaaaaatataaaacaaatatgcaaaaatttgctatgccannnnnnnnnnnnnnnatagaagactgtatttggtgtgcttgttttgtttctttggtagagtttattaggtgaatcttctcaaactttccttctgctggannnnnnnnnnnnnnaagtcatcagaacccnnnnnnnnnnngagtacctctctgcaccaagatnnnnnnnnnnnnnnnnnnnnnnncacaattttacttgaaagcaagaattgtcctagctcctcttccattattccaaaaagtttaacgttcaaagcagggtctcattaaaaaagaaactactggttagttaatataattgagatatcacaatttcagaataaacatttgattacaaataaggaactcctcagttcatactgtatttaaaagagaattggtaacttgaatgtgtgtaattttttggaacctgtctaaaaaccaaataccctgcaaannnnnnnnnnnnaccctattctatttaaatattttgctgttttattttatagaaattatttgctga

SEQ ID NO: 4518 - DNA, 730 bp, Macaca Fascicularis
  misc_feature (1)...(730): n = A,T,C or G
gtgggtttgggaaacactgggctaaatagttggtcactaggggccaggaaccagcaacagattctgggcagtaaagacagtttattctctttcactttggtggtcgcgcaacccattttccctccctttccccgcatagtgaccagacnnnnnnnnnnnnnnnnncccnnnnnnnnnnnnnnnnnnnnnnnnnnnccagagcccacaccagtcagggaggaaataaagccgccgccgccaccatcgccgcctcctcgccctgctactcctcctcctaagatggggcctgcgccccgggagctgactgtgggcatcaatgggtgagtnnnnnnnnnnnnnnnnnnnnnnnnnnnnnnnnnnnnncggcccttcctctggctgctaactggaggcacctccacattgccccccatcaannnnnnnnnnnnnnnnaccctggagaaatagcccggagtaaggcagacagggccccacgcccagcccannnnnnnnnnnnnnngacagtaatcaaataaagaaannnnnnnnnnnnnnnnnnnnnnnnnnnnnnnnnnnnnnnnnnnnnnnnnnnnnnnnnnnnnnnnnnnnnnnnnnnnnnnnnnntcagggaaggcctcagggagaaggtgtcattggggttggatcacagtgatgaggcgcagccagctctcnngncaccttgccggggannnagtnnnnnnnnnnnnnnnnnnnnnnnnnnnnnnnnnnc

SEQ ID NO: 4519 - DNA, 733 bp, Macaca Fascicularis
  misc_feature (1)...(733): n = A,T,C or G
tcagcagaccatgcagagggaaggccagggtcagctgtcggctggaaccagcatnnnnnctgcctgcgctgccctgnnnnnnnnncacaccccaaaactannnntcttcccagggttctgggtgctgacccccaagaccaagcagacggcacccctcgccatcgccacagcccgaggctacacannnnnnnnnnnnnnnnnnnnnnnnnnnnnnnnnnnnnnnnnnnnnnnngtcgggggtcgcactgccttgcacgaggcctgtgcccgggcccagctcgactgtgtgcggctgctgctgaccttcnnnnnnnnnnnnnnnnnnnnnnnnnnggagggcatgactcccttgcacctctgcacgattcccgagtccttgcagtaggtgcctgggggctgagaccgtttggggaggaatgcgtgtgtgtgtctccagctcacaggccagaagagggaagctgacaactacatgccgctttgtggtnnnnnnnnnnnnnnnnnnnnacatcttcacaataacctggagacaggcctcattctacagatgagaaaaatgaagctcagaagggtttnnnacttgtccaaggtcannnnnnnnnaagcccaggaggcagaagccctgttgctttttgggaaaaactctgttnnnnnnnnnnnnnnnnnnnnnnnnnnnnnnnnnngtagccaaacctagctgttttttttttcgtttgttttttgtgttttttctttt

SEQ ID NO: 4520 - DNA, 719 bp, Macaca Fascicularis
  misc_feature (1)...(719): n = A,T,C or G
aannnnnnnnnnnnnnnnnntnnnncaaactgactcccagcttctccatgtgtcttggtaactgtagnnncgtctctgccctttctcctaataagatccatgtttctaaggagaaaaacaaaacagtattctcttctgtaaaactgtaatgtattgttgatatttgtaactattgtatatttctgtcttgctccagtcccagctggagtgtctagttccatggacaaggggatatttaaaattcaccacggacaagggccactaaagccaggtctctattgctaatctctctcctgttatttctctaccaactaatctcaagtaacaataccccaggcttttttcagcctcaattcaagtaactttgaatcaaaagagagcaaggcaaaaagcctccggacgtgcttctttgggaaaggactttttttgtagctgcagagtgggaaggagggagaaggggctcccctgagaccccggcaggacaatggaaagcttccagtcctgagctgatgtttcctcacctatcactgcttataggacagcatccaaatgctttcatgtcgctcagcccaggcaacccaaaccagtcctggctacacccagaaataagagttacctctgcattttctgttgccatttttctggctctagaagtatctgatgcgcgactatgtcatagaatgtccacgcatctcagagtagtctatttttctgttcag

SEQ ID NO: 4521 - DNA, 769 bp, Macaca Fascicularis
  misc_feature (1)...(769): n = A,T,C or G
tgaccagctatagaaagnnnnnnnnaaagagacgtacnnnnnnnnnnnnnnngtgaagatggaggcagagattagagcaatgcatctatgagccaaagaaccgtaagaattggaagtcgctagaagctaggaaagaagcttgtcacagattatctcagagtctcgagaaggaaccaaccctgccaatatcnnnnnnnnnnnnnnnnnnnnnnnaggattgtgagggaataagtttctgttgttttaagccatgcggtttgtggtattttggtatagcagccttaagaatctgatacatgtatctcgtaaaacatctctgatacttacctgcacttgtggctgtgttgtctgattctataagagccgtagtatctggatactagagagtctgcgaacttgagagaagggccatgtctgattttccttcagtgtcccaaggaaggatcttgcacagtacccggatttggagaggtgccaagtgaatgcttcggtggactgaatgaatacaaatcaaaaataatgatgcagctggaatggatgcagtaagattgctgtggcctatgcagttcacatagttcacactctgcatgttgaagaataagtggacaaatctctttagcccaggggctagcaaannnnnnnnnnnnnnnnnnnatccaccatctgtttttgtacagcttgtgagctaaaaatggtttttaaaaaggttgaatacaatgaaaagaataatattttgtggcatgaaaaaannnntatgaaattcaaattt

SEQ ID NO: 4522 - DNA, 724 bp, Macaca Fascicularis
gtcttatctaaaacacgacagtcgctggacacaagaaagcccaactttcgtttggcctttccaaaaggtgaacccattttgccaacagcagaacatcatagctgcggtcccagacgagacacagatgcaagggaaggcctctcctgggtcccgggctgctcaggctcctcactctgggcggtgtgtcctgtcttagaatttacacggtgaaagatgattgtctggattttcttgtgccagtatttgcatatccgacattgagctcctctcttaagaggccacgttcaagcttgtgggtccctggcccaggatagcaagggctgctcccagggggtgcttctggtactgtgttgagacacttggattctcagactccagacagcagtgtctgtcactttccatactgttttcctaataagcgctcaggcctaaaatgtgacaggaggtcgcgtgcacttggcccgagcacattgtgaatcaaaggactgggtgctgatggatggagccacggtggcatttgcccacccagctgcagccccagtgcctcccttggtgctcctcccagtttagagggtcacagcctccccaccccagcccctggtaagctgaccttgactaacccgggaatacagggtcatcctcattcctaagtcaaacagcaggacatggtctgcgggggtctttgctggaagctggtgctgctggccaggcctcggccttgcca

SEQ ID NO: 4523 - DNA, 149 bp, Macaca Fascicularis
aagggtctcgaggaacagcagcacccagacagagtcagacaagagcacacagacggtgctgctttacacagccactagacagaaagccagggggaaaaagtaggggctggggagggggccagggcggtgggcacatagagctataaata

SEQ ID NO: 4524 - DNA, 377 bp, Macaca Fascicularis
gtcaactgcagccggggttctgcgctcgggtgaggagctagtggcgtcggcaggttcgaggcgattcgagctccagctaggatgatcgaggttgtttgcaacgaccgtctggggaagaaggtccgcgttaaatgcaacacggatgatactatcggggaccttaagaagctgattgcagcccaaactggcacccgttggaacaagattgtcctgaagaagtggtacacgatttttaaggaccacgtgtctctgggggactatgaaatccacgatgggatgaacctggagctttattaccaatagatgagaatcctcatcttcctgctgccctgctctccttttccatcctcatcccccacactgggatagatgcttgt

SEQ ID NO: 4525 - DNA, 709 bp, Macaca Fascicularis
  misc_feature (1)...(709): n = A,T,C or G
tgagtacaatatgacnnntngtgtaacagacatttaancnnnaggaaaggctggaagtagagagcaaaagtctttcaagtctgtcttttatttggaaatcaagtctttccaaaaaatctctagcagatttcttcttatatctcattataaagtatcagtttacaagggagcctgggaaagcttggcaaaggggaatagggttatcattgcctgggtagggcacannnnnnnnnnnnnnnaaatcagggctctttttttctttgtttttctgacagagtctcgctgtctcgcnnnnnnnnnnnnnnnnnnnnnnnnnnnnnnnnnnnnnnnnnnnnnnnnnnnnnnnnnnnnnnnnnnnnnnnnnnnnnnnnnnnnnnnnnnnnnnnnnnnnnnnnnnnnnnnnnnnnnnnnnnnnnnnnnnnnnnnnnnnnnnnnnnnnnnnnnnnnnnnnnnnnnnnnnnnnnnnnnnnnnnnnnctgacctcnnnnnnnnnnnnnnnnctggtttcnnnnnnnnnnnnnnnnnnnnnnnnnnnnnnnnnnnncgaccagggctcttttagcaaggaaaccgtgaggaatgaatggctattggtgtgcagcaaatcatacttgctatgtgttgtgaaacctgaagttatttgttagtctgtatgaagaatgtaccccagagatgtaccctgtatctgccttatnctcttacaatggag

SEQ ID NO: 4526 - DNA, 2017 bp, Macaca Fascicularis
aggtttggattgtcagaaaaaggacttaaagctgttttttaggagaatgagacaatgtagcaagaatattggtcatttttgataaagcttaagtgtgggtaaccatttagcttttaatttctttttttaaataattgacagcaattgtttgaaataagccaaataccattcattatccttagttttgagaggtctaatccaaggccttttggatatagatataataacagttactttaggtttatcctataggctagcttttaattttactaaattgtgaattttgttctccttgaggcttgctttactaaatagaggcaggattaaaactgaggcccagtgtgaatatcccatctcggttgtgtctgctatttccttcataaagacctgattgggaataatccaaactccagctagctttttgacttttagaataaaggaatctcacaaagtgttgtactttcttaggaggatctttagaaaaccctgcctcccaacctcttattggatggtgaggtttaagacatctatcctgtttgactattgtcctcgttggtgtttattaaataaaataaatacaagtaaaactagtaatacaagtggtaaaagtcttaagtaactagcagacattcggaacaattgagtagacaaaattgaattggggaagaattttctaaagttctggatcttaagggctatacccttattcatggtgctttaacaaataatggttttatttttgcatttattgagtaagattttatgttttctattcccagtttttttttttttttttttgaaattgacataacatttatgagtgatgcttgtttaaaaaatcctgtggttttattctgtttaaaaaataaggatgtaaatacctctcaaaagcatacagatttctcactgcgtttgttttaacctttgtgaaaccatagtagaccctgaagatatccacaatttttacccagcaaatatttttcttcattcaaatgatttgcagtttttgtatttactgttataattagatggtaatcttaaaaatgcatcgctgacttcaaaccatatttaaattatcagtagctgtgtatatataatcacatggaagttgtagccttgccttgtatgattaaatggagaagaaaggtggtatttgttaacatttctgtttttcacatgtatcattcttttatcacatctcataggtgatagcatcctatttttttctttattttcttggaattcagcccaagtctctttccaaagtccatcttctttcctattgctctactacactgcagagaaataggactgtgaaactgaatatatatgtatgtgctgtcataaaactggttataatgcgtttttttctcccccccaatccaccttttctttttccccagaatccagattatcttcagtattctatcaatacagctctctgcagcttaaactcagtggtacataaagaagatgatgaacccaaaatgatggacactgtataatttggttaagactgctgaggtcaagtgctattttgttacaagaaaggaagaacttggctattttcttgacacttttatggatgctgcactttatttttgtttggtttttgatgggagggaaagagtactgaaatgttttgtaaacttttttttaatgtgctgctaggttttttgttttgttttgttctgaagagaggagtggtaccatatgttgcaggaagtcaaactggactttttgtggctactaaatttgcctttaatcttattgttctcaattttggaatcaagtatgaaaatctgcacaaatgcaatgtttacaagaactggttgattctgggaggcatctgctacagtctctttttatatggatatgtacatgtcctattctacaaaaatgattaaagataaaaacgtacttgtatcccactgctaatttagctgtcaaatctggtatttcatcacattaaaagcaataaatcagtaaaaaaaaaaaaaaaaaaaaaaaaaaaaaa

SEQ ID NO: 4527 - DNA, 752 bp, Macaca Fascicularis
  misc_feature (1)...(752): n = A,T,C or G
gtttggaaattcatgtttaataattaaaatgtgataataagataatattataagtaccnnnnnnnnnnnnnnnnnnggcagaagagaagagattggnnnnnnnnnnnnnnnnnnnnnnnnnnnnnnnnnnnnnnnnnnnnnnnnnnnngaatagtggagtactttattaggacataatgtgaagtgatatttctgaaaatacatttcttgaaatagtcttaaactgataataaaagaaaagaaactgtacttnnnnnnnnnnnnnnnnnnnnnnnnnnnnnnnnnnnnnnnnccatattctgcctaaatgaagcatctgggaagaaagggaaagtcacacctccttttgatattttaaccgttgtgataaaaggtatgctttaatttgtttaaaaaaaaaagtatgaaaggggataatgtgaatacaaaaaaagaagcctggagattgaaaataataatagaacatgttattaggagatggtacttaatgtcaatgttggagttttcaaggttacctctatataaaattgaattactactagatataatgtgacaaattaaatgactttatcccaaggtacagtgaggtaaacaaaaatctattcttagatatccttagatttggttaactgnnnnnnnnnnnnnnnnnnnnnnnnnnnnnnnnnnnnnnnnnnnnnnnnnnnnnnnnnnnnnnnnnnnnnnnnnatttctatctagaagtgattttaagacattacaagaacattgccaat

SEQ ID NO: 4528 - DNA, 226 bp, Macaca Fascicularis
ccacacacagtgagaccacgtgccctcacctcagttagtgttgagatgtagagcccctcacattccagaccacactatagtatcacaggtcccgtgacacagggcacaagatggcatagggatgcagggtccccaccggggggtatagttctcgcccatcgcgcagggattgcccactgtcctccagacaccccacgtgaggggggcaacaggtttagtggtggtg

SEQ ID NO: 4529 - DNA, 3305 bp, Macaca Fascicularis
  misc_feature (1)...(3305): n = A,T,C or G
nnnnnnnnnnnnnnnnnnnnnnnnnnnnnnnnnnaacgccggggcggcccgaagatggcggcggtaactgggtctgggcttgcagcggccccgagctcgctgctcctcgtggtgggcagcgagttcggcagcccggggctcctcacctacgtcctggaggagctcgaacgaggcatccggtcttgggatgtcgatcctggcatctgcaacctcgatgaacagctcaaggtctttgtgtcccgacactctgccaccttctccagcattgtgaaaggccagcggagcctgcaccaccgtggagacagcctggagaccctggtcctcctgaacccatcagacaagtccctgtgtgatgagctccggaaccttctgttggaccctgcctctcacaagctactggtgttggctgggccctgcctggaggagacaggggagctgctgctacagacagggggcttttcgcctcaccacttcctccaggtcctgaaggacagagagatccgggacatcctggccaccacgccctcacctgcgcagccgcccatactcaccatcacctgccccacctttggtgactgggcccagctggcacctgctgtgtccggcctacagggggcgctccggctccagctgcggctgaaccccccggcgcagctgcccaactccgagggcctgtgcgagttcttggagtacgtggctgagtctctggagccgccgtcccccttcgagctgctggagcccccgacctccgggggcttcctcaggctgggccggccctgctgctacatcttccccggaggcctcggggatgccgccttcttcgccgtcaatggcttcaccgtgctggtcaacggtggctcaaaccccaagtccagtttctggaagctggtgcggcacctggaccgcgtggacgccgtgctggtgacccaccctggcgccgatagcctccccggcctcaacagcctgctgcggcgcaaactggctgagcgctccgaggtggctgctggtgggggctcctgggacgacaggctgcgcaggctcatctctcccaacctgggggtcgtgttcttcaacgcctgcgaggccgcgtcgcggctggcgcgcggcgaggatgaggcggagctggcgctgagcctcttggcgcagctgggcatcacgcccctgccactcagccgcggcccggtgccagccaagcccactgtgctcttcgagaagatgggcgtgggccggctggacatgtacgtgctgcacccgccctccgccggcaccgagcgcacgctggcctccgtgtgcgccctgctggtgtggcaccccgcgggccctggcgagaaggtggtgcgcgtgctgtttccctggctgcaccccgcccgcctgcctcctggacggcctggtccgcctgcagcacttgaggttcctgcgagagcccgtggtgacgccccaggacctggaggggccgcggcgagctgagagcaaagagagcgtgggctcccgggacagctcgaagagagagggcctattggccacccaccctagacctggccaggagcgccctggggtgacccgcaaggagccagcacgggctgaggcaccgcgcaaggctgagaaagaagccaggatcccccgagagttgaagaaagaccctaaaccgagtgtttcccggacccagccacgggaggtgcgccgggcagcctcttctgtgcccaacctcaagaagacaggtgcccaggcggcacccaagacccgcaaagcacccagcacagcgcccagcacatcccagtctggcttcccgcaggtagcaaatggaccccgcagcccgcccagcctccgatgtggagaagccagctcccccattgcggcctgcggctccccggcctcccagctggtggccacgcccagcctggagctggggccaatcccagccggggaggagaaggcgctggagctgcctttggccgccaactctttcccaaggccacgcacaccctcccctgagtcccgccggagccccgcggagggtagcgggcggctgtcactgagcccactgcggggcggcgaggcggggcccgacgcctcacccacagtgaccacacccacggtgaccacgccgtcactgcccgcagaggtgggctccccgcactctaccgaggtggacgagtccctgtccgtgtcctttgagcaggtactgccgccatccgcccccaccagtgaggctgggctgagcctcccactgcgtggcccccgggcacggcgctcggcctccccacacgatgtggacctgtgcctggtgtcaccctgtgagtttgaacatcgcaaggcggtgcccatggcaccggcacctgcgtcccccggcagctcgaatgacagcagtgcccggtcacaggaacgggcaggtgggctgggggccgaggagacgccccctacatcggtcagtgagtccctgcccaccctgtctgactcggaccccgtgcccctggcccccggtgccgcagactcagacgacgacacagagggcttcggagtccctcgccacgaccctttgcctgaccccctcaaggttcccccgccactgcctgacccatccagcatctgcatggtggaccccgagatgctgccccccaagacagcgcggcagacggagaacgtcagccgcacccggaagcccctggctcgccccaactcacgtgctgccgcccccaaagccactccactggctgctgccaaaaccaagggacttgctggtggggaccgtgccagccgaccactcagtgcccggagtgagcccagtgagaagggaggccgggcacccctgtccagaaagtcctcaacccccaagactgccactcgaggcccgtcggggtcagccagcagccggcccggggcatcggccaccccacccaagtccccggtctacctggacctggcctacctgcccagtgggagcagcgcccacctggtggatgaggagttcttccagcgcgtgcgtgcgctctgctacgtcatcagtggccaggaccagcgcaaggaggagggcatgcgagccgtcctggacgcactgctggccagcaagcagcattgggaccgagacctgcaggtgaccctgattcccaccttcgactcagtggccatgcatacgggtacgcagagacgcacgcccggcaccaggcgctgggcatcacggtgttgggcagcaacagcatggtgtccatgcaggatgacgccttcccggcctgcaaggtggagttctagcctcatcgccgacacattcccccactcagcccagcccgcccttccctagattcagctgc

SEQ ID NO: 4530 - DNA, 740 bp, Macaca Fascicularis
  misc_feature (1)...(740): n = A,T,C or G
agagaaatccaagagatgttatacttaatgagaggaagcagaaatggtgggtagatnnncagaggtnnngatnnnnnnnnnnnnnnnnnnnccattgttctgtgattgtaagaaatattgaaaacagtttgtatggagacagtaggtgattagcatttgagctctcaaagcagaactctagtaaaatgatctcgacctaacaaagggtctgttctattatatagactattcccataatcctggaatgtttcaactaggttttggcctctccattatatgagctcatatgtatatatttaagaagtctgattaaagtatggaaagattttaggaaactctaagacaatacagggatctttattgatacctaaaaagattacaattgagtaattgcttaattgagtgtaggggcatacctgaaggaagaatttgcatttgggactttgaaggaatcttccaagagatttgggaaaagacctgaacaaaaagttaaagcatagtgaatgtaatataaatgtcaatccagtataaaagcagaggaaacgaaggaaaatctatataccatatgcacattttttctgtctttttagatcttagatgctaacattacatccacaaaaccagtgttgccttgtacaactattatattggcctgctgacctgtgctacctcagatctgtaaaggaaccagtatgacgcatattcttgtttcgtcattcggtcgaatatggtttttcatc

SEQ ID NO: 4531 - DNA, 601 bp, Macaca Fascicularis
agccctgcaccgggggcccctacactccaggtgactcacgaggtgtcatctggagctgtccccaagtggggctctgcaggttgaagccccctacgctggggccatcaccagagcccctttcctctctggggagatggggcagtccccgcagggccggccgaaaccaccccacaggctgctgccgcctgagcaatgtgtgtgcggaagaacttggagtgccacccccagaatgtggcctccgcctcaccagaccccacaggtgagccctggactacaaggtgcatggaacacaagctttggatgcaccttgagagctcgggccaggcagggccacacctgtgagcgtgagctcgtccagcaccgcccggagctcggggaccttccgcatcccagcacctcctcgccgctgtgcccgtctggccagtccctccaagcacccctcggatgaagacgcaccccacactgcagtggggctcactctccacagagcctgctgcgttgcacggggtgtgacaggaaggaccctgctggggcttgcggggtgtacccagatcctccctgcgtgcttcctcctcctcctctcccccccccccccgtaagc

SEQ ID NO: 4532 - DNA, 625 bp, Macaca Fascicularis
  misc_feature (1)...(625): n = A,T,C or G
aagtccatactatatggcgcatgaaaaagaaagaggcaactatttacatattaatatagaataattgccaagatacattattaacagacaaagtgcagaaaatgcatacagtatctgtattaataaaaggcaaaaataaagaggaatattatatacataattgcttgtatacttagaaaatatttcgggaaggatattcaaaatgctaaaagtggttctaaagaggagaactgggtagcagggggacagggaagagaagactttttactctatacctttaatacactttgaattttgtactatatggatgtattacctactccaataatagagactgagaaaatgaaaaggacaacatatcaagaattgtgataaatgctaagaaggagaaatatagaacagttagaacaaacaaaggggaaccaatctagacttgtttggacagggaaacttttcctgggtaagagatgtttaaaatgagacctaaagggtaaggcattagcttagggaaaggggatgaagaggtgtgcaggccaggaaagaattctaaggcaaaggaagaacttgtgcaaaaggccctgaggatggaagaaactcagnnnttgcannnanaatgagacagtgt

SEQ ID NO: 4533 - DNA, 769 bp, Macaca Fascicularis
  misc_feature (1)...(769): n = A,T,C or G
gtcattgccaccagacagccnnnnnnntncttatgggctcccattttcagtgctgggcaaaggtcccttgatctgggagttgcagcctctttctcttcaaggagggcggtgaccagcctgagccagtcaatccagtgatggttcaggagcagcctgtgacaggagtcttggtagcaaatgactggggcagccctgggggtgaggagcttgtgcagcagtcacaggccccgactggnnnnnnnnnnnnnnnnnnnnnnnnntctccagctgtctacctggagagctccaagctctaatgctaggagaaaataaaccctnnnnnnnnnnnnnactgctagtgagggttctgttnnnnnnnnnnnnnnnncttgctggagtgtggcctctgaatggtttgtgtggcgggcacgtgtgcccgtgtgagcctgtggtgtcagacagtgtgctgaggacccaccgtgcaactgtttcaacccttttcatctggtttgagggctgcactgaccacaccccaaatcctgctgtgtttggaatcacccccataaggtggtggtttccttggggtgcccagcagcccctgaagctggcacacggaggnnnnnnnnnnnnnnnnnnnnnnnnnnnnnncccaggtggctacgtnnnnnnnnnnnnnnnnnnnnnnnnnnnnnnnnnnnnnnnnnnnnnnnnnnnnnnnnnnacttctcttaaaagcaaaatttattcaaagacctgtactaacattcttaaataannnnnnnnnnnnnga

SEQ ID NO: 4534 - DNA, 749 bp, Macaca Fascicularis
  misc_feature (1)...(749): n = A,T,C or G
tctgttttgtgttattaggtagtaacctngaaaatgaatatttcataagtgaattggttggttggtgaagcagaggataatgagcaaataatgtccttgtctaatttggaaaatacttcctttatgttattaacatttcccaagattactttttaagtttattattatgtaacattcaaggttgattgtaaattattctaaataagtaaatataaggaggcaagaataaacagagaagactttattaaagaagagtgcacgcagtgtagatttaggtatcttttaaagtaggtactattcaggatggctctatgaagaggaggaggtccagatttggctcctggaaaaggaaagaagagaattttaccccatgtgcaatggagaaatacagtattctttggtttggttggattttcaaatcctatttcctatcaaaggaaatatctctaagctagtggatgtttttagagtatagacaatttctaggtattaactaataagatatagaaaagatagctttgctttttttaatcagaagaacataaattataatatgaatgattatgagacatcagagaaatattttacttagtgatataaactactgtgcactgctgctattcctaggaagctgtgttttgggcaatacatggaagctaaatatatgaccagaaatgctttctgccttgtaatatagtgtattatatattagagctacatttagtaataaatgcattttgaagttggaa

SEQ ID NO: 4535 - DNA, 714 bp, Macaca Fascicularis
  misc_feature (1)...(714): n = A,T,C or G
agtaggggattggtagtgctgcaaaggaagtgctnnnnagagacagatggcatcatgagacagcctagaggtgagcaggatcnnnaggcnnnnnnnnnnnnnnnnnnnnnnnnnnnnacctcaccgggaccagggtcacgcagcgaatactggaacaacagaggcgtgttcagggggagcctcagaggggacaaaacctctgcctgagatcccaccccaggtgggcatgggggacactgaggttggggatgaaaatgctggtaccgtcactgcacagccctgttccagacagtgnnnnnnnnnnnnnnnctgggctctcccgcggggccacgccacacctgagccacctccttggactcctgttctctaccccttgaggacctccctccctgtgaccctagctgtcttcttgaacttgggactctcctttcccaagacttccatcactagctcctggagaaactggactctgcatcttcccttcacgtggagcctcagtgtgagaggccctgccaatgcatgcatgtcagaggtggctgggaccacattggaagaagaggggagcgacgaaattaacaaataaaaagtatgggcaagacccaggtgtctgagtgcatctgcacatgtctcaggagggctggctctcaactctgatgcagccccgaacactgaataacttggataattgcccttatgatggtaccacttccaagc

SEQ ID NO: 4536 - DNA, 711 bp, Macaca Fascicularis
  misc_feature (1)...(711): n = A,T,C or G
gaagccttggnnnnngagaggtcagggaaggggacctctttgagggtaataacagaattggaaccatgccacttttgagccacaatacctgtcaccagcttgttgttttaagagagaaaaaatatcaaggatatctgattggagcaaaccacttctttagtcatctatctcacctccctgggacagctgttacctttgnnnnnnnnnnnnnnnnnnnnnnntatgttggagaaacgcttggtttcnnnnnnnnnnnncacagaaagaaatgtaggtgtcaagtattaggctgctgtcagggagaggatggcagatggatgcatcaagcacaaggaaaatgcacaacctgtgccctgttacacgcacgttcgtgtgcacccaagaacctatgactttcttccagttccttctgccaggtccccatcctgctgccagctctcaacatagcaggccataggacccagagaagaatcccagcgttgctcaaagtctaaccatcataaagacactgcctgtcttctaggaatgaccaggcacccaactnnnnnnnnnnnnnnnnnnnnnnnnnnnccttatttagaattctgtggcgggaaggatatgatgggttcccagagacaagaagcccaaccttctggcctgggctgtgctgatagtgctgagggagataggaatttgctgctaagatttttctttggggtggagtttcct

SEQ ID NO: 4537 - DNA, 720 bp, Macaca Fascicularis
ctaatgttaacaacaaatgtagtaacttgcctttctttgaaagactgtagaaaccgacatgacctatgtacaaattattgctcatggggaaagtagtatgatgcacatacgggacaataaaccctgtaaagctgaacattatgatctaacttattgtctagggtggaagacagcaacggctaatcagatggaccttactttatttgtaattttacaagtcaaaatgataaaagtccaagccaaatggccaagccaagccttaattgctatgaaagtgctcctgcttatatgtgaatctgaatatcttgtttacttaaaaaataccacatttaaaaaatgccatttggtggctacgttcaggaaatactttttacgatgtctttgtattattttgttttattctttagtttcagcagttgctctctcacaaagagtattattcactttaacaattcatacataatcacttttcgaagagttaaactttacattaaaaagcaaaaatcatccattttcaataaattgccttgcctacactgtgccagactatgcatttcttactgttaacattagcagataaatttgaattgtgaatttaaatgttggtagcatgtgctaagcctgaatttcatggtagatttttttttgcctcaaagtagaactggatgacctgataatgttttaatgaacgagaatccaattaaaatgctgtttcctttt

SEQ ID NO: 4538 - DNA, 1808 bp, Macaca Fascicularis
aggggctgcggaacggcgggatgcaggaggacctggcgtgggagaccgacggccgtgggcagggtggccttgcactgggctgcaggtgcgggacacgagcaggctgtgcgtctgcttctggagcacgaggctgctgtggacgaggaggatgcgtttgggatgaacgcgcttctcctgtctgcctggttcggccacttacgaatcctccagatcctggtaaactcggggggccaagatccactgtaagagcaaggatggcctgaccttactgcactgcgcagcccaaaaaggccacgtgcctgtgctggcgttcataatggaggacctggaggatgtggccctggaccacgtagacaagctggggaggacggcgtttcaccgggcagctgagcacgggcagctggatgctctggatttcctcgtgggctctggctgtgaccacagtgtcaaagacaaggaggggaacacggcccttcatctggctgctggtcgcggccatatggctgtgctgcagcgacttgtggatatcgggctggacctggaggagcagaatgcggaaggtctgactgccctgcatgcagctgctggagggacccaccctcactgtgtgcggctcctcctcagggctgggagcaccgtgaatgcgctcacccagaaaaacctaagctgccttcactatgcagccctcagtggctcggaggatgtgtctcgggtcctcatccatgcaggaggctgcaccaacgtggctgatcatggtgcctctcctctgcacctcgctgtgatgcacaacttccctgccttggtccagctcctcatcaactctgacagtgacttgaatgccatggacaacaggcagcagacgccccttcacctggctgcagagcacgcctggcaggacatagcagagatgctcctcattgctggggttgacttaaacctgagagataagcagggaaaaaccgccctggcagtggccgcccgcagcaaccatgtcagcctggtggacatgatcataaaagctgatcgtttctacaaatgggagaaggaccacctttcatgcagggatctcagtgacccctctgggaagagcttgtcctttaagcaggaccatcggcaggaaacacagcagctccgttctgtgttgtggcggctggcctccaggcatctgcagccccgtgagtggaagaagctggcatattcctgggatttcacggaggcgcatgtctacgccatcgagcaacagtggacaggcaccaggagctatcaggagcacggccaccgaatgctgctcatttggctgcatggcgtctccacagctggtgagaaccccagcaaagcactgttcgagggccttgtgaccattggcaggagggacctggctgagctggctgtggccagtgtaggagcctacatttgagaaaagcttacctcaaagttctgcattgagcctgagactggaaaggagatagaataaaacagctgacaggggctttggcggtcacacatgcctgatggggtgcacagggccaccgtctctgaaaggtaatttggcattatccatccacaatatacttttatccattggtccagcaatcctagtcctaggaatttgtcctacatataaacctgtatgcatacaaaaatgacagacatacaaggttattactttgaaaaagcaaaagattggaaacaaaccaagtgactggctacaggggactggtgaaatagaatatgttccatccacacaatggaattctgttcagcagtaaaaggatgaggatgctttccacgtgttgttatggagagag

SEQ ID NO: 4539 - DNA, 4001 bp, Macaca Fascicularis
  misc_feature (1)...(4001): n = A,T,C or G
gtattctggcgccgctgactccacggctggacgatcctcggagtccggtgaggccggagctgggagccgggtgccgctgtggccgctacttttctgagggaaaagagcgcggggtgggttattttgcaggcaggaccggaggtggagaaaaggttcctatgaagcctcaggccgctgtgcgttttttcccggggctgagcttctgcagccctgaggcctggaggcccggacggcagtaattgtgccgggcccggttcgtgggtgcggcctatggtgcaattggagacccaggctccgcgcatctccttccgctcttcagtcgcttaggctcggccgtagcgaaaaggtccgagagggaagtcacaggtgaacgccccaagatgaaggtcccctgcaaaacgctgggacctagatttggggcgggtgtctggggtctgggaggacacctgggcagttccgaaaagacacagtgggtggtgccggggcgtgggcaactgggtatggaactacagcgtacccggaacttcgaacccagacgcgggtgattgcggatcctctgccctgtcgtttccatttgtgcatgcaggtggcggttcgctggggccagggaagcgtggagggggggttccaatcaagaaaaggctggggtgtcctgtaccgtgcctgcttctccagccctgccggtttccagaggaggcgcctgggaaggagaaacgaatcgctgctgctcttctaaaagccggttccgtctctggcatctgtggaccctgcttctgaagtaaatgaaccttgaggaacattgacccggttctttcaattctaaaatcatggctcgtgatttggtgatgttcagagatgtggctatagacttttctcaggaagagtgggaatgcctgaactcatatcagaggaatttgtacagagatgtgatattagagaactatagcaacttggtgtcactggcaggatgttccatttctaagccagatgtgatcaccctattggaacaagggaaagagccctggatggttatgagggatgagaaaagaagatggactctagatttggaatccagatatgacactaaaaagttatttcaagaaaaggatatttatgaaatgaacttatctcagtggaaggtaatggaaagaattaaaagctgtggacttgaaggacaagaaagtcctcatgaagtgtgtttcaggcaagtgacaaaaaccacttctggaaaaacgcctacctacagaaaactcacatctcttcctctgtatcagaagagtcataacagagagaaaccctacgaatgtggggaatgtgggaaggcttttagagtacgacaacaacttactttccatcaaagaattcatactggtgagaaaccctatgaatgtaaagaatgtggaaaagcctttagacagtgtgcccacctcagtcgacatcagagaattcatacttctgacaaactatatgaatgtaaaaaatgtggaaagatcttcacatgtggctcagaccttcgagtacatcagagaattcatattggtgagaaaccgtatgaatgtaaagaatgtgggaaaggctttagagttagaggacaacttaatctccatcaaaggattcacacgggtgagaagccctatgaatgtaaggaatgtgggaaggcctttaggcagtatgcacaccttactcgacatcagagacttaacattgctgagaagtgctatgagtgtaaggaatgtggtcaggcctttctgtgtagtacaggcctccgaatacatcacaaacttcatactggagaaaaaccctatgaatgtaaggagtgtggaaaggcctttagagtgcggcaacaacttactctccatcagagaattcacactggtgagaagccttacgattgtaaggaatgtgggaagacttttagtcgtggctatcatctaactctccatcagagaatacatactggtgagaagccctatgaatgtaaggaatgtcagaagttctttcgtcgttactcagaacttatttcacatcaaggtattcacattggagagaaaccttatgaatgtaaggaatgtgggaaggcatttagactgttctcacagcttactcaacatcagagtattcattttggtgagaaaccctataagtgtaaggaatgtgagaagacttttagactgctttcacaacttactcaacatcaaagtattcatactggtgaaaagccccatgactgtaaggaatgtggaaaggcctttagacttcattcatcactaattcaacatcagagaattcattctggtgagaaaccttacaaatgtaaggaatgtaaaaaggcatttagacaacattcacatcttacttaccatcagcgaattcataatgtaacttaatagttattagaactcttccgttgtgaattttatgttgcgcataggaagtacattctagaagaaaggtttttgaacgtgggaatcccttttgcttcatgctcacaactaaggaagttttatttaaaggaaagaatacgttaatgaacatatggaagcctttcatcacctttgaaaccatgttataggaaattcatcctagaaaggaactttattaaagtactgaatgtggaaaagcttttgatcttacctattattatctccatattcttccatctgtgtagtatacacaaggaggttgccagggaaccacctcattctgaaaatgtgcaaatgaaaggaaagtcatttagtctgcatttcctgtgtaaactgtatttcaaggcaaccagaagttaatgaggtaaagttcttctttattagaaaattccaggctaatgaatgcagaaagaataatagaaaattgtattagaaaaactattgtgtaacacataatgaaataatggatttaggcatgattctctgtagaggttgagacttcagtgaaaggttgtgaactttacaatgaatagatgagactgacaacatctgaacccactgatcatcttaacttcacaaaaagcaagacagtaaaaattatgtgcctcctaatgtgatacagtaagataaacacatcttgccaaaaatactgaacctgaatttaagcctcaagaactaactcccagtttatagaaaattcaaggaatggaaaagtaaattacatgacatgaaaaggagcaattaaatataaaataagggtaattctacaagaggaatcacctggtttcccaaccaataaaatggcattttaagaaataaggtggaacccttaggtattgacagacttgagacaacatcagtcacatgcaatgaaagagtggtttttacttagatcatgagttgaacaaacgtaaaagaagacatacttataataattgggagaatgggaatattgacaatattagataatattaaactttttgttatgtgtgataatagcattgtggttatgtaaaagtattagagataatttctgaagtttatacacaggagatgatattctggaatgtcattttgttcatgcaaaagaaaaatgaggatgaataacaagtttggcaaaatgatggtaacctaagtcttggatacatggtttttatttgtttttgctattctctctacttctgggtttttaaaattttccatgatgttcttttaaagatcaaattatccatgaaattataaccagtttaaaatgaattattaaaaaaaatttctggctagacgtgnnnnnnnnnnnnnnnnnnnnnnnnnnnnnnnnnngccaaggtgggcggatcatgaggtcaggagtttgagaccagcctgaccatcctggcaaaacctcatctccactgaaaatgcaaagatnnnnnnnnnnnnnnnnnnnnnnnnnnnnnnnnnnnnnnnnnnnnnnnnnnnnnnnnnnnnnnnnnnnnnnnnnnnnnnnnnnnnnnnnnnnnnnnnnnnnnnnnnnnnnnnnnnnnnnnnnnnnnnnnnnnagagcaaaactccatctcaaaaaaaaaaaaaaaaaaaaaa

SEQ ID NO: 4540 - DNA, 121 bp, Macaca Fascicularis
  misc_feature (1)...(121): n = A,T,C or G
ttgannnnnnnnnnnnnnnnnnnnaggtgaaagccatcaaagaatagggtgatcacgtgaccaacttgcgcaagatgggagcacnnnnatctggcttggcagagtatctctttgacaagca

SEQ ID NO: 4541 - DNA, 721 bp, Macaca Fascicularis
tgtacatatttgacatgctctccatgggtttgtttcccgtttcctgcccctttcgccactcacggaccttgaggccagttggcggcccttctccccacgtctgtgtccccgcgttctgagaagtcctccgtcttcgtgtcagtaggtccagaaagccgcgctgggcagaggcacaggcggggccagcagggccgaggaataagggacagttctgttttttctctcctggccgtcgtacgccagcctccttcattttcctgagttcccgctgaagtatactacctacaagtccaattaacatgagtattatgctagttctatcctactaaaaaaatataaaaagtaactatatagaagctgttccagcaaccatagactaaagatacaaaagaaaatccatttatttaagacctgttccagtatccatgaggacttaatttacctttcagtcaccacaaatttctaggcattagtatcctggactaaaagaaggggctgaggttgggtttgtcatcacagagcgggtgggcctggaaagggcccttcccgagctgccccggctccggcggcccgggccgcagccagcgtcctcacggcctcccccctcgcctggttcttttgaaagcaagtgtagacaccttcgagggcagagatcgggagatttaagatgttacagcatattttttttcttgttttacagtattcaattttctttattttc

SEQ ID NO: 4542 - DNA, 4756 bp, Macaca Fascicularis
  misc_feature (1)...(4756): n = A,T,C or G
ctaaaaggctcattgtccagcaaagaacacataaatgatcttcagacagaacttaagaatgctggttttaccgaagctatgttagaaacgtcacgtagaaactctttagatactgagcttcagtttgtggaaaataagccaggcttgtctttgttgcaggaaagcataagcacgaagggtgacgacacagatgtcatgttcacaggtgacactttgagcacctcattgcagtcttccccggaagtgcaggtacctcctacctccctcgaaacagaagaaacgccccatcgggtatccccagactcactcccgacacagggagaaacccagcccacgtgtttagatgttattgtcccggaggactgtctctgccaggacctcagtccagatgctgtgactgtcccggttgaaattctctcgaccgatgccaaaacccgcaacatggatggcgggtcccaggactctcctggccagggtgaggagaccctgcgactcaccgaaagtgactctgttcctgctgatgacatccttgccagcagggtgagtgtggggagcagtctcccggaactgggacaggaattacacaatgaaccgtttttggaagaccatcccagtcatcgccagctagagaaaaacttgaaggctgtggagactttaaatcagctcaattctaaagacacagcgaaagaagcaggcttggtgtccgccctctcctcggactcaaccagtcaggacagcctcctggaagacagcttgtcagcgcccttcccagcctcggagccgtccctggaaaccccagactccctggagtcagtggacgtccacgaagcgctgctggactctttaggatctcactctcctcagaaactcatgccgcctgataagccggcagacagcggctacgaaacagagaacttggagtctcccgagtggaccttgcatcctgcccccgagggcacctcagactcagaaccagccaccgtgggcgatggtggccacagcggtctgccttccaacccggtcattgtcatctcagatgccggcgatggtcacagaggcacagaagtgacccctcagacattcacagctggctcccagggttcataccgagactctgcatacttctcagacaatgactctgagcccgagaaaaggtctgaggaggtcccgggaacctccccatccgccttggtgttggtacaggagcagcccctgcccgagcctgtcctcccagagcaaagtcctggtgcccaggatagctgcctggaagccagaaagagccagccagatgaaagttgtctgtctgctttgcacaactccggtgatctggaattaagagccacaccggagccagcacagactgatgttccccagcaggtccatcccacggaagacgaggccagcagtccctggagtgtgctgaactcagaacttagcagtggcaatgacttcgagacacaggaagatcgcccctgcacccttgcttccacggggaccaacacgaacgaactccttgcctacaccagttctgcggtggacaagtccctgtccagccactccgagggccccaagttgaaggagccggacatcgaaggaaagtacctggggaaacttggggtgtcgggggtgctcgacttctcggaggacgggatggatgcggacgaggaggacgaaaacagcgacgactcggacgaggacctgcgggcctttaacctgcacagcctcagctctgagtcggaggacgagaccgagcaccccgtgcccgtcatcctcagcaacgaggacgggaggcacctgcggagtctgttgaagcccacggcggccggagcccccgacccgctgcctgaggactggaagaaggaaaagaaggcagtcacgtttttcaatgatgtcacagtctacctgtttgaccaggagaccccaaccaaagagctggggccctgtggaggagaggcgtgcggccctgacctgagtggcccagccccggcctcaggctctccctacctgagcaggtgcatcaactccgaaagctccaccgacgaagaaggtggcggctttgagtgggatgatgacttctccccagatccttttatgtcaaagacaacaagtaacctgctcagctccaagccttctctccagacatccaagtacttttccccaccaccaccggcccggagcacggagcagagctggccgcactcggcgccttattcccggttctccatctctcccgccaacattgccagcttttccctcacacatctgaccgactcggacatcgagcagggcggaagcagcgaagacggagaaaaggactaggtggctgccaacgcgcacgctcgggtccgaggctgctcccctggagcggcgcccctgcgccctcagcccgagcagcgacatccactcgccatttgctgatacgagcttgggaggaagaatccagaggtgaagagggagacggctctgagctgcgttcaaggcggggccctcgggagcccaggtggggagcgaggctgtgtccgggagccagcatccctcggtgccccaggcacccgcggcctcccaggcagtgctcccgcgctggccgtcgggggaggcaggggcgcagcctccgtgtgcatgcgtgtgtggagctatgcgcgccgcgtgtgggctttccacaggggcgtctctgcgtccacgcctgtacatcccggcccacgtgtgggcaccacagaggacacgcgaggggaatggtcaccagtgagccatatttattatttctagagaaatcacgaattgctttctgtaattgcactgtggataaatgttctgagagtctccattgttgtacagaatcttaaattattcaaggaaaatgaggcaggtcaagctgatgctatccactagtttgattttttttctgttttatagtttgtgctgcatggtacttgtaaagcttaaatattttgagtgttctactgtgtctaggattgttgggattgtacatatggtactctttcataaatgataaatgattctgaatgttagtgttttatgttcatataggaaatattttcagtgagtccaaaataccactgttttgttgatggaatcgaatgcatttttgtctcttcttgatgaagcggcttccctgcagcaaatgaggcttctctctgaggagctgagaggtcttgcagcctctccttgtcattctcccaccccacgtcccactttttaaagcccttttggtaaaaaccggcaggttgtggccccagacctcagatggacctggcctatccctggggacgtgctgggtggcgggtcgggagagctgcacccctcacggggccgccgcaccgcttccctccgcgcagctcttctgcctggttttcggaggccaggctcctgggaagcttccgtgttcccgtccttcctgcaagaagccggggagctcaggcagacacatgtccgcagagcacgccagctgtggaggacgggttgaggtgatgatgcgtgcacacgtcaggtggcggggacttgagctttaaaaaaactccacagccgaatcttctccgagccgctccgtgtcacatccagctgggcctggccagtctcaggttatctccgtgggatgagataacaccacatcctgcagctgtgaagggggacagacaagggacgacggcagagcatcagcagctgacacatagtccggatcggggacttgggtggtcctgcgtggcccgggactcatctcacggaccctccattctgcattaagccccaggttctcttctggctttgaaagggcccgagtgctcccaatgtagcttcatcacgtcggcaggagccccagcggtcatgggcgacctcaggcctccctccctgagttctgctctgacataaaaagtcccctgtggctggtgcagcacagccgtgctggggaggcacctgttccttcgggggtcctcgggcctgcaatcccctcacactcactcttcaccccacatattttccggtgctgatacgtttccagactccagcgcaacctggggcactctccagacccatgcaggggccgcctggggtacacggaaggaagctgagtcctagtggaaaatgcaggtggacgttgccagagtgtgcacagcaaatgaccttcattgccagttgcgccccactcctctcattttttatactaagcaataactttccaaagcaagaagttcaggatggagagagtcccctcctgtctaggcatggggtggacgcggtgtccgcctgggctgtgcggggagtaccgctggctctcgggatgcgcgaattttttttttttttttgtaattaacagggcattagaagatgattttgccaaaattgtcatgactgaattcttgctgtggggacttcctgagttttctcagtttttacatctaagattagtcttggctgaggagaaacgagacgtgattatactactttcaattgcaggtttaagcagttcagatttaatgaccaaagtcatgcagatccatggaatctgtcgtaagtgttanncagtgtcagcctcgagtaaatttattgacgttctggggctgtcagttttccactaggattaagattttggctaggcacagtggctcacgcctgcaatcccagcacattgggagtttgaggcgggcggatcactttgagcccaggagttcaagactagcctgggcaacatggcaaaaccacgtctctactaaaaatacaaaaaaaaaaaaaaaaaaaa

SEQ ID NO: 4543 - DNA, 728 bp, Macaca Fascicularis
  misc_feature (1)...(728): n = A,T,C or G
agttatgttgagatgttgtaatacctgtgtgcntagataagcacccccatcaagaaaggaacatgtgcaattgtggctttaagagtttgtggcacagctggacagcattccgtctgcaggttagtaggaatgcctgtaccggcctttgtggaatgtcctagtctgccaccttgacaagagggtgcaccaatgctctactggaagagtatttctggttttctgtgcaggactgttgggcttataaattcttcaagaacaaggaccaagtctttaatctcatctctattcctactttgtggaaattagtgcacagctcacaggcattctacacacacttcttgaaattgctcctgacttcatattttggatgttaggtagtcagtgtccaataatactgttgtccatggaggttaatctagctgttccttcatttgtgtgaagcataaataatgtaagtaaatacagcaactgaactttttatgttctataatagagcacttttaagtttttaatatcatttattatttctctgaaaatccagttaagatggcagtagatgattctattttttcatactatagcatccacccacaatattgtgtttctaactgtatttgaacaaagaacttccttagtctttcaatttaaattatgtatttgcttaatatatttttatatttgtaactgtggttaaaaaaaaatctataaagcatcttgcatccattctc

SEQ ID NO: 4544 - DNA, 732 bp, Macaca Fascicularis
  misc_feature (1)...(732): n = A,T,C or G
gcacttggcgactgatagagcgtggagtaaagtgaataaaagagtgtgctcatcccaagatcagagttctgcttctggtgcccgcnnnnnnnnnnnnnnnnnnnnnnnnnnnnnnnnnnagtactggccaaatnnnnnnnnnnnnnnnnnnnnnnnnnagaaagggacccctattcctgtgtgagtaccagctgcatgnnnnnnnnnnnnnnnnnncaaaagggagatttcctgctcagctgctctgtgtgctgctgcctccagggatgctggcttcttctgtcttgaattaacgccagtgagtnnnnnnnnnnnnnnnnnctttannnnnnnnnnnnnnnnnnnnnnnnnnnnnnnnnnttgccctagggcgtgtcctctggcctctgagggtgaggcctcagggacagaagannnnnnnnnnnnnnnnnnnnnnnntgcctggggtggcagtggactgaaagnnnnnnnnnnnnnnnatgattcacgaaaagacgacatgatggccaggagaactgggatgtcccttagacacactggatccaacccnnnnnnnnnnnnnnnnnnnccatttgcaaagcaacaggnnnnnnnnnnnnnnnnnnnnggtccacccatgaaagatcagaggtcagaaggttattctgtgctcttgtgactgtttctccagtctgagctttcagtgtgttcttaatgcattatggcacttcagtgccacttacctgccgttgc

SEQ ID NO: 4545 - DNA, 734 bp, Macaca Fascicularis
  misc_feature (1)...(734): n = A,T,C or G
aaatacagttaataattatgaacagcaggctcttacagcccatctcccatagttgcccataatctatccctgtaagacactttttcaaatgtcaatttttttcttttaatttagcttagtctctttttctgcttttacttatttttcactattttaannnnnnnnnnnnnnnttaaaaaaacatttgctctgtggtnnnnnnnnnnnnnnnnnnnttttcaatactggaggtttaccttgtgtggaggccttgagagagttctaatttgtccagtgcattttctgcacatgcagctccgtagactacgttctcgcctgtgttttcactgtgcatgagcgctgtgcgtgtgtgacttcctcagtaaacgaacagatgtccctttcccacatctgcatcgtgagcgagaacatttcaccaaaccgtggcacacgcgtggtttgatccgtctcatcaaaagacttggaatgtccgtcgcagtgtggcagaagatggtggttatgcagctgggtgcacagttgcccacctcagtgatacgtgcttagagagtgagcttctgggccactttcttagatggggcccctcagttttgcttgtaactggcatgcccgtgtgaccacgtttgtgtacctgggtgcgtacgcttgtgaaaatatgaatgctgttgctgcctatcttattgagtaaagtgcctgttagtgttgtcaggttggtcaaatgaatctccccctttaac

SEQ ID NO: 4546 - DNA, 2099 bp, Macaca Fascicularis
tctgctgctgaggctgctgtggcctctgtgtgcccaggaagggacttcatttctgcctgtggatttctttagaatgcccagtcatctgcgggtcctgccctgatcacaagaagaatccaggagcctcttcttcaagctacaacctcccttcttaagggccgcagagtttgtggccccacccccagcacagccccgtctcggccccagtaactctgggagtggccttggcttcctgcaggacagccatggacctgctctggatgcccctgctgctggtggccgctcgtatctctgctgtccacagctcaccggaggttaacgctggtgtttccagcatccacataaccaaacctgtgcacatcctagaggaacgcaatctcctagtgctaacgcccgctggcctgacccagatgctgaaccagacccgcttcctcatggtgcttttccacaacccatcctcaaagcaatccaggaacttggcggaagagctgggcaaagctgtggagatcatgggcaaaggcaagaatgggatcggctttggcaaagtggacattaccgtagagaaagagcttcagcaggagtttgggattaccaaggccccgcagttgaagctgttttttgagggcaacaggtcggagcccatcagctgcaaaggagtggttgaatctactgccttagtcgtttggttgagacgacaaattagccagaaagcatttttgttcaacagcagcctgcaggtggcagagtttgtgacatccaggcccttggtcatcgttggcttcttccaggatttagaggaagaagtagcagagttgttctatgatgtgatcaaagactttccagagctcacgtttggagtcataacgattggcaatgccattgggcgtttccacgtcacccttgacagcatcctggtgttcaaaaagggaaaaatcgtgaaccgccaagaacttattaatgacagtaccaacaaacaggaactcaatcgtgtcataaaacagcaccttacagattttgtgatcgaatacaacgctgagaataaggatctgatttacgagttgtacatcatgagtcacatgctgctcttcgtctccaaaagctcggagtcatttggaatcataattcagcattataagctggcgtcaaaggaattccaaaacaagatccttttcatccttgtgaatgcagacgaacccagaaatagacgtgtcattgagtatttccgggtcacagaggtcgatataccatctgtccaaatcctaaacttgagttctgacgccaggtacaaaatgccttcggatgacataacttacgaaaacctgaagaaatttggccgtagcttcctgagtaaaaatgccaagaaacatcgatccagtgaagagattccaaaacactgggaccagggacttgttaagcagctcgtggggaagaacttcaacatagtcgtctttgacaaagaaaaggacgtgtttgtgatgttctatgcaccctggtctaaaaagtgcaagatgttgttcccgctgttggaggaactaggccgaaagtatcaaaaccactccacgatcatcattgccaagatcgacatcacagcaaatgacattcagctggtgtacctggaccggtacccattcttcaggctgtttcccaccgactctcaacaagctgtcctgtataagggagaacatacactgaagggcttctctgacttcctggaaagctacatcaaaactagcattggggatgaggatgagctattgtctgttgagcaaaacgaagtgatagaagaggaagtgcgagctaaggaaaaggaggtgcctatgatgaagaagaaaacatctgaggaggtggtggtggtggccaaaccaaagggacctccaacgcaaaagaagaaaccaaaagtcaaggaagaactgtagcttctccaataccaggaaaaaagatgctcatcttccagatcctggcatcattttctgaggggattgattccaataaaagcatatatattgtggtagggtaggtggggcaggggtggggctggataataaaacctctgaaggtcaaaaaaaaaaaaaaaaaaaaaaaaaaaaaaaaaaaaaaaa

SEQ ID NO: 4547 - DNA, 710 bp, Macaca Fascicularis
  misc_feature (1)...(710): n = A,T,C or G
cactcgagagttgcttatggnntcacactttttaacccctctgtgctttagcagccgtgaccttgccttcgttgcttcatccagtgcaggcctgggttattgaagaaaccagagtgtttctctttcagtttgaaaaccaggcaggtttacacatgggtttcagtgtatttgcctttgaaccctttaaactaaacttttgcctcttggctagtgttgaatatattcaactgggatggcctggggtgacctgggatggtggtgtggtttaccgtctcgtctccagcttcagcctttccggaaacccttgtggagggcagtgttggctgctttcctcatcatattgcagtttgaggtcaccactatttgggggacaagcttgcgtcctgnnnnnnnnnnnnnnnnnnnnnagagcgtcagtggtggggctgggccatcgtggaggtggcctcaggttgtaatgtcatgcccaaacacacctcgtgtggcctgctcagannnnnnnnnnnnnnnnnnnnnnnnnnnagagtctattttctaaagttttaagtattttaagaggtattgagactaatgaatataatagttcagtaatttaaatgcttatttattttcaatggaaggatttttattaaaaagaagcaaatcgacatggaaatgtcagtgaaatttcttacctgcaaggaaagtgaatattttgtatttaagtaaac

SEQ ID NO: 4548 - DNA, 750 bp, Macaca Fascicularis
ttagaattgggcaatacctcattcttataaaatagaatgatcatttgacgagctgaacagaggagattggctttataggcagaaagggctgaagtaagcagacagaacaaaaagcagactgatttcaaagttgctttccttataatggttaaagcagaggggacttcctgtcatgctggctagaagtggcctgtttggggatttggctattatctctctgtgtcctgatttcttggaagatcagataaacaatttagttttggctttgtagcatggaacttcagcatgagtgaatccattttgatttggtctgttggagcttatccaggagctcagtccagaccaataaccctcctacaaatcttatttaacagaccaaatcttgttatttgttgtagtctctgcatccggcatcactcttggcacatgcttggtatatatgaggcatttcataaagtttgaagagcaaaggggaggagagagaaggatgtggaagggttccctgtagaaattctgagccaacttgggcctgggtgatgggtttcatgtaggcaggcagagactggcaagggcattccaggcaaggagagtggctgggtcaaaggtgtggaggtgtgaatgttgggagaccacagcacgcagcaggccagaaaggaggggatggcccaggattgggagtcagggcattttatttcttccagggctgtcattggaaggttccttagctctctaagcctcagtttcctcatt

SEQ ID NO: 4549 - DNA, 784 bp, Macaca Fascicularis
  misc_feature (1)...(784): n = A,T,C or G
gcaggcgctgctgnnnnatctagggagagtgacagtccacgtnntcaccggggagccgnnncagtgccaagcgacaagaggctcagagggcataaccccatgggactggatgcagcctgagggctgataccactgggcggtatcctgccctgctgtgaccctgtgggatcctccatgcccctcagaggacccnnnnnnnnnnnnnnngacccaaaccaccgccacatctgnnnnnnnnnnnnnnnnnnnnnnnnnnnnnnnnnnnnnnnnatccggcctcaggacttccacctcctgcctgacccccaggcttctctctcctttctcctagcaaactgcagtggcagaaaggagnnnnnnnnnnnnngaaagtgggtctccccctgcgacnnnnnnnnnnnnnnnnncannnnnnnnnnnnnnnnnnccgggccgctgcagggaaaagcactgggtgtgtgtcagaggcgcagggtgggtggggctgccagccacgaccctggnnnnnnnnnnnattcaaaccaaagactatagaaccctggggtgtggctaaggcccctccagcacgcatagccaggtcttcctggcccttgaggctgggctggtggacaggcacctacctcttccctaagctgaagctcccacactttcttccagggctgaggagacgctctccttttctactgnnnnnnnnnnnnnnnnnnnnnnnnnnnnnnnnnnnnnnnnnngggtagtactgggaagcagggggcagaatggctctgctgagcctcctgccagtaca

SEQ ID NO: 4550 - DNA, 742 bp, Macaca Fascicularis
  misc_feature (1)...(742): n = A,T,C or G
ttttcaaggaaacaaactattagaataactggtggactcatagacatatttccagctccattaggtcaaaggaaaggaaagaggacaagggtagaaaggagacaagccctctaagaaactgtccgttccgtctgactgcannnnnnnnnnnnnnataccctttggagctacagaaaatattaaattgaagtggattatgcttgctgttaaagaagctggtccagccgagnnnnnnnnnnnnnnnnnnnnnnnnnnnnnnnnnnnnnnnnnnnnnntccctgaccagagacttctggttcctcttgctctcctcaccaagagcacagatgtgtcannnnnnnntatgataacaaatgtcnnnnnnnnnnnnnnnnnnnnnnnnnnnnnnactgtaagacctgagaagaaatggggagtgctccacacccaagaagctgaagctagggaaagacagtttccttgtgtttctgtcatagaggtggactgatgctgannnnnnnnnnnntataccaatctggagcatccactaggcnnnnnnnnnnnnnnngttgtgtatgggttggtgaggcaggagggaccagaccagcacaaagtcagggnnnnnnnnnnnnnnnnnnnnnnnnnnnnnnnnnnnnnnnnnnnnnnnnnnnnnnnnnccatctcccagagagggctcatttctcgannacgcttcacatgctgnnnnnnnntcnnnnnnntgtagtccacttctcctctgtag

SEQ ID NO: 4551 - DNA, 688 bp, Macaca Fascicularis
  misc_feature (1)...(688): n = A,T,C or G
ttaatgacctagttagtattacggtnctcatttcttcgtaaggaggttttggtataatccttagaactgcagccttagccaaacagcttctgctttctggaataaatttgatagccaaccttttttaagcattaatttcttttttggcctctgatctgtctcctcttcctactgcttatttcagctacatatgtcctcttctgtatgatttagtgagtgctcagcctgagttaaatgacttataactgtagactaaaaatttttcatccctcagaactgtttcagttgttccctaaaagcagtttacttcttcagcatacattcaaatgcactgtctcaaacaggagatttagaactgggcattcaaagaagacctagcctctgccccagtgactgcctggagtaggaccagataattgaataaacacaatgcagtatgatgcaagtgtaacatgggttgggcaaaagagaacagcaagcctgggagacttcgtagaggaggtgataattgatcctggtctcaagggtgagttgcagttggtaatccagagaaggagggaacgaaatcattctgaatagcagaaatggttacaaaaaaaaggagttgtaatgtgaaaaagncgccatttgttttgggtactgtgtaaaagtgccatggtgattttgtgcccttgttctactttataaa

SEQ ID NO: 4552 - DNA, 737 bp, Macaca Fascicularis
  misc_feature (1)...(737): n = A,T,C or G
gtacagnnngagcagatctttatttcacaagtgttcatattcacttaacagaattttaataaagacaattaagtttgttaaattataattatgagactttcgttggcatttgatttcaagaatacatatgcattttccaaaaaataaatgtggaggttattcagaacaaaattcatagcttnnnnnnnnnnnnnnnngggttacttttatttgcatgcacacacagacacacatacttcatgtatgtaaattataatattattttttgatatatctagtggggtttttttcccaaaattgcaggaggttgtagattaaatagtaggatagcaagtttttcaattcattagtcatgaagtgctgtattccctaagttatgacatttaaaagaaatcacatgnnnnnnnnnnnnnnnnnnnnctaagtgtttctgagcattccagtaaaggagtagtgttcttttcctaacttacatcagggtacatctgtgtggcacatagatactatattttcattcttcactcccagtcttaatttctttctcctgtatgtcactgtattttatgtcacttcacattatgttaaacagggtaaatagagatcctcagtatctnnnnnnnnnnnnnnnnntccgataggtgtgctgtggtgcactgcagtgatgtatttgcataacattgtttgatagtgaaaaaattttttttctgttcaagtgttttgtgattaaaattttatgt

SEQ ID NO: 4553 - DNA, 757 bp, Macaca Fascicularis
  misc_feature (1)...(757): n = A,T,C or G
cattgagacaggaagccagggcgcagtggctgaaacatcagggtgctcccaaggccccagctctgaacaagaccttcttgttcttggannnnnnnnnnnnnnnctgatggttcatgccttctgctgggacaggcctgggctgcacagccacactgtcggctgactgagccccccgctcactccagatgcctccaggaggtgatccctgggtgcagctggnnnnnnnnnnnnnnnnnnnnntcttttcctggccctgtctgtggactctgccccgtgagccccaattccaagacagagtgtcgtcctcactgaagcttaggcccacgtctcccaggctgcttaggagacagaatggaaacggaggccgcccctgccagccgccctggccctggnnnnnnnnngatctgctnnnnnnnnnnnnnnnnnnnnnnnnnnnnnnnnnnnnnnnnnnnnnnnnnnnnngaaggcgggctgatggggcagacccctggcctctcgtccacgagggaagaaacctaaaccctgtttcacaatctgtgnnnnnnnnnnntgcttcactcgtgctgaggaaagcggctgttgctccatgactaaccagcacagggctggggcctgcagttcacacccgcagggacgcccttcccaaggtgtggcgactgtgcctcactgtacatgctcagaggcctggccatacaggagggtgggtgatgctgaagtcagtccccatcttaagtaattactttctgtaataatgagg

SEQ ID NO: 4554 - DNA, 2694 bp, Macaca Fascicularis
aatttgcagaaccagaaaccaaagcaaaactgaatcgtacaaatgacatcaaaaagggataaggcagatatatttaagtgagccagttttaaagaagcgaagcctctggtatgtcagaaccacgctgtcttccatgggagtccctttgtgaagagcatccatttaaaagacttttatgaatacatggtttcaatcaagtccccaaagaacacatttatcttctgaactgctggcagttttaagaatctgatgacctccgaggggaccctgcactcagccatcaaagtgctcctgccccgctggacgctcataattcaatggtagatgcaggtggaggtgagaacatcacccagcttccccaggagcttcctcagatgatggctgcagcagctgatggtttggggagtatagcaatagacacgacccagctcaacatgtccgtgacagatcccacagcctgggctacagccatgaataacctgggcatggttcccgtggggttgcctggacagcagctcgtgtctgactcaatctgtgtcccaggctttgatccaagcctcaacatgatgactggagtcacccccattaacccaatgatcccaggccttggactggtacctcccccaccaccaacagaagtggctgttgtcaaagaaataatccactgcaaaagctgtactctttttcctcaaaatccaaatcttccacctccttccacaagagaacgacctcctgggtgtaagactgtgtttgtcggaggattaccagaaaatgctaccgaggaaattattcaagaagtctttgagcagtgcggtgatattacagcaattcggaaaagcaagaagaatttttgtcacattcgctttgcagaggaattcatggttgataaagccatttacctttctggttacaggatgcgattagggtctagcaccgacaaaaaggattcaggccgccttcatgtggactttgcccaggccagggatgacttctatgagtgggaatgcaagcagaggatgcgtgcccgggaggagcggcaccggcgcaagctggaggaggaccggctccggccccatccccgcccgccataatgcactactcagagcacgaagccgctctgctagctgaaaagctgaaagatgatagcaagttttcagaggcgatcacagtgctgctttcctggattgaacgaggggaggtgaatcggcgttccgcaaaccagttctattccatggtgcagtcggccaacagccacgtccgccggctcatgaatgaaaaagccacacatgagcaggagatggaggaagccaaggagaatttcaaaaatgccttaactgggattctcactcaatttgagcagattgtggccgttttcaacgcttctaccagacaaaaagcttgggaccatttctcgaaagcccagcgcaagaacatagacatttggcgaaagcattctgaggagctccggaatgcccaaagtgagcagctcatgggcatccgccgcgaagaagaaatggaaatgtctgacgatgagaattgtgacagccctaccaaaaaaatgagagtcgatgaatcagctctggctgctcaggcctacgctctgaaagaggagaatgacagtctccgctggcagctggatgcctacaggaatgaggtggagctgctgaaacaagaagaagaacagcttttccgaacagaagagaacctcaccaaggaccagcaattgcagttcctgcagcaaaccatgcaaggcatgcagcagcaattgctaactatccaggaggagttaaacaacaaaaagtcagaactggaacaagcgaaggaagagcagtcccatacgcaagcattattaaaagtcctgcaggaacaattaaaaggtaccaaggaattggtcgagaccaatggccacagccatgaggattcaaatgaaatcaatgtgttgacagttgcattagtcaaccaagaccgagagaataatattgagaaaagaagccaaggcttaaaatcagagaaagaagctctgctaataggtatcatatcaacgtttcttcacgtccatccttttggagccaacatagaatatctttggtcatacatgcagcagctggactccaagatatctgcaaatgaaatagaaatgcttttgatgaggctgccacgcatgttcaaacaggaattcacgggtgtgggagccacgctggaaaaaagatggaagttgtgtgcctttgaaggaattaaaactacctaactgtgaagacctaaacatctctggaagtgaaaccatgtgaacctggccagggctgtgcgatgggggagcaggaggtgtggggttggtccagcacgcaacctttgtggagccgtcgaagcctgcctttagttatatgtgtggcgttctcttgtgagtggaaatgtaattgtgtaccagttccttaaaataaacaaagcttcatactgtgacagatctgtttcctatgaaaaccaaacaatgattccacagtcataatgatggcaaaatcttaaaatatgctacatttgagaatagctcaccaagcaaaatatttaaagttaatgatggtgtagcgatgattgttgctaggctacagagttgtatatgtaatgtatagctgaaatcattaaatgacattttcctgaaagtctttctgttttagttaaaaaaaaaaaaaaaaaaaaaaa

SEQ ID NO: 4555 - DNA, 663 bp, Macaca Fascicularis
ggcactcaatgtattgtaaatctgagaacagctttagttgtggaatactgggggaaggaataacgttcacaaaataaacttaaaacggcctgtaattattgaggttcatattattctggtatatcattctgagaaattgtggctaatttaaaacattgtttagaattcacaaaaggccttggcaattaaattgtcagaggcccaagggctaattttaattttctttttacttggtgtcgttcattaatttctcacatgggattatggagtatgaagtaatatctttgaatgaaattcttgggctgatctgccttacataatcatgtaaggtcctttgcttttctttgtgttaagagggatttgcctctgtaaatgtaaatgacaatgtgcttttcttgtagttgactttcatgtcagtataaaataggtctgttaacctggcaccagtgtaactataaagcactcactgagaagctgagaaggaactgatacttacatttcatggacagcatgaacaagaatgagataaatttatactttttagatcaaaacaaattaactaattacaaaagagaaactggaatggaacatagtctcagattcttctaacgtgtatctcacaacatcatgtaatgtaaagaaaacccttttgaattagaattc

SEQ ID NO: 4556 - DNA, 789 bp, Macaca Fascicularis
  misc_feature (1)...(789): n = A,T,C or G
gcagttgtggtcaccggagctgtggtcgctgctgtgatgtggaggaggaagagctcaggtggaaaaggagggagctactctcaggctgcgtccagcgacagtgcccagggctctgattcatcactcatggcttcaaaagcctgcgacaactgtcttgtgtggggctgnnnnnnnnnnnnnnnnnnnnnnnctccttttgtgacttcaggagactctggcatctctttctgcaaaggcatctgaatgtgtctgcgtctctgttagcaaaatgtgaggagctggagggacaacccactcccgtgtcccccgtgacccctgttcccacnnnnnnnnnnnnnnnnnnnnnnnnnnnatggaaagcaggtgttgaacatgcctcattatgctctcttcccttttggaattcaggaaaagctgaccaggacttaccatcaacnnnnnnnnnnnnnnnnnnnnnnnnnnnnnacaatctactctctctgaagcctggcacctggaggcttgatctgcatgagaaaattttggactccacaacctcttatcacaacccggacattcctttctattgataataactcaaccaattaccaatcagaaaaattaaaaatctacttataacccagaagcactaccccgcaacccttgcttgcttcaaattgttccaatgttttggaatgaaccaatgtatagcttaaatgtatttgattgatgtcacatatcttcctaaaatgtataaaaccaacctgtgtgacaaccacgttgagcacatgttctcttgagggctgtgtc

SEQ ID NO: 4557 - DNA, 689 bp, Macaca Fascicularis
  misc_feature (1)...(689): n = A,T,C or G
gatagtggctttggaggttctggaagggccttagtgaggagcccagaagtatcagggaaagttgctggagatggggtgggcagtgtcagaaacagccactgttttcccctcttcagacactgagagattaatnnnnnnnnnnnnnnnnnnnnnnnnnnntttattgtggagcagacgactgtctgtcctgtttatgacaaacccaaatgaggaccggagggactaccagtaagtggtctcttcatgctttctccatcccagtttataggatgaaacagcctggccttttgtgttgcttgcaccaaatctgtatgtctcaggtgaaaatcactcttccatgaacggccatccttttttttttttatggaaacagcacatttcaccctttcatcagtcttttttaggaaaataacccttcttgcttcagcacttctccctggtccttgctggaagacagagataaaaatccattctctgagccttgctaggttgtcagaggccatgagaggnnnnnnntataggtggatatgccaagatgctggtgaacttggnnnnnnnnnnnnnnnagnnnnnnnnnnnnnnnnnnnnnnnnnnnnnnnnnnnnnnnnnnnnnnngcacttggggcccagggctttgagtggtgtgggtgtgcctgtccttccagatggtgctgtttctccctgttgtc

SEQ ID NO: 4558 - DNA, 403 bp, Macaca Fascicularis
cccaaagaattggtgggtgggtggatggatggaggaatggagacagttggtttaactggatcctatatacagattgttactggttccaaaggatgattagataagactgtaagaattggatcaatgtaaatcctcacttgccctttgaagagccaataagagcatctttgtctttaaatacagcaaatgttattcagattttgtacttgtctgtttacctcagtgtagatgatatgaggatggtataactatgtaaatggtttgtttttgaaaataatttgtttccccacaacttttgaaggttttatttgttgttgttgttactagttcagtcccaaacttaccctttccttttcagagagctaatggccatgcttttcttcaaaggaacagaaatagttta

SEQ ID NO: 4559 - DNA, 998 bp, Macaca Fascicularis
  misc_feature (1)...(998): n = A,T,C or G
tcacaactgtagcaatcatgccatttggctaaatgtacagagtacatgtaatgtgagcaaccataactttcactgagcgtgtgtaaatattaaaacagatttcttaaatatttttaacttctaatttgtattttatggtaaggcaatgtgctaattctgtttatggcttaagttgatgtgttataatatgtaaataattaaacatgctgtaaatgaatagtcaatagatacaaacaattgtttagtttttttcttaatttttatttattttttactaagtacggttactgcagtgcccccagcagagtaatttaaacacccttttgcataatggtttgggaatcccagacagaagggtttcaatttgctatcacacacacagtcacacacagtcacacacacacactcaaacacacataatcttttgcttatgcactctgtctctctccccgtctatgggaaacactctactgtttatgtagtcaatataacaaacaagatagcctttgaaatggcaattgggaaaagcaaaaatgatcattgattacttaatagagttttttatatgtcagagttcnnnnnnnnnnnnnnnnnnnnnnaaatctcagttttcaaagagtagaagtttgtatagatggcactacagaaaataaaaaagtttattcacaccagctccagaaatgtgttacagacaatacatactagaagactttttttttaataatagtattttgtccttaggtagtgttgttcgtttcaaccaaagactccagaattattgaaaaacaaaaaaaaaagaaagaaaaaatatgagataatgnnnnnnnnnnnnnnnnnnnnnnnnnnnnnnnnnnnnnnaaatgtattttccaaatgcactaggaacattgtaaaaaacagaaaggagtgaacagaatgctaatgaagatcctgccctaaagaaatccattcaaaaaagaaagaaaganngaaanaaaaagnnngactcttaaaaagct

SEQ ID NO: 4560 - DNA, 756 bp, Macaca Fascicularis
  misc_feature (1)...(756): n = A,T,C or G
tgcaggactgactggatggtaattcatctgtcaacttggctggaccataggatgtgcagataattagtcaaacattattctgggtgtttctgtgagagtattttgggtgagagtattttggatgagagtaacatttaaattggtggactttgagtaaagcagattgccctccatnnnnnnnnnnngcctcatttaatcatttgaaggcctgcagagaacaaaaagactgccctccctaatgcaagacagaatttctccatcagcctgcctttggacttcactgcaatcttgactcttcctggttctaccacagactaccttcacaaattggaacactggctcnnnnnnnnnnnnnnnnncagactggaacttcagagcatcagctttcctgggtctccagcccaccagccttccctgaagattttgtacttgccagcgttcataatcacaggagccaattcctataataagtctctttctctgtatatacacattctgttggttctgaataactaatattcttcccaataaagccaaaaannnnnnnnncctacaattatatacaggaaaagaaagatattttattaactggattcaaaacattttacaggttctaaagtccatgacagacaattactcagagctaacagaagtttgcactatatatactttannnnnnnnnnnnnnnnnnnnnnnnnnnnnnnngtgtgtagacttttctactagcatactcttgcctgccttacaaacatcgac

SEQ ID NO: 4561 - DNA, 706 bp, Macaca Fascicularis
  misc_feature (1)...(706): n = A,T,C or G
agtagaatcactnnnnntcnaattttgatgatttaatagctcattgaaagaactagcctgaagcagataaaatctgttgcagatgctgtaactcttatttgcatccattggtcttttggtttgtgtgctttaataatttgaaaaacaagaagataatcaggaaccaagatggatatgtgtgtctcgaggcagaacttaattcaaaattgttcagagtgttttgtcagatgaactccttaaccacatttgttatcagtagcatacaatatattggattaagtttttcagtgatgtgcatagatgatgccagattgatcctaataaacacaaagtttggaatcaaaacgagaatgttgttttgatcgtattggttttaggcaaaggattgtaagataaattctttcatattggaatttgtgttagtatccacactttttctcacggtaaaatttaatgaaccttgtatcattaatatttttgtgtcaatgatgagttcttcttttttctttacctgagttgtatcaactagtttcaaaggagagggagtgttttggataaaggcaataaattacttttattttttaatgtacatcttatacatataaaatactttttnnnnnnnnnnnnnnnnnnnnaacatttctgtcctagatgattataaagtttgttgctatattatttcattattttctttttagttaaaaat

SEQ ID NO: 4562 - DNA, 371 bp, Macaca Fascicularis
  misc_feature (1)...(371): n = A,T,C or G
cttggctccaagatgaccaaaaaaagaagaaacaacggtcgcgccaaaaagggccgcggccatgtgcagcccatnnnnnnnnnnnactgcgcccggtgcgtgcccaaggataaggccatcaagaagtttgtcattcggaacattgtagaagccgctgctgtcagggnnnnnnnnnnnnnnnnnnnnnnnnnnnnnnnnnnnnnnnnnnnnnnnnnnnnnnnnnnnnnnnnnnnnnnnnnnnntgccatccatagcaaggttgttaggaatcgatcccgcgaggcccggaaggaccgaacacccccaccacgattcagacccgctggcgctgcacctcgacctccaccaaagcccatgtaaagaggccgttt

SEQ ID NO: 4563 - DNA, 2568 bp, Macaca Fascicularis
tctgcgcgggggcgggaccggggaactagccggagactccacgttttgcaaagatcagttttgcctcagagtcaaccaactcttcagattggttctggtgtgtcctgtgtttacaagtcagtggaaattaagcacagcacatacaacttgaaaagtcaaataaggaaatgaattacttcccttgatggctctaattttacttggctaaagcccatttttaggttggtgtgggcagaaaagtgaaaagagaatgttccactttaaccgatgtcagcatctgaaaaagataacacagaaatgtttttctagtatacatgttaaaacggataaacacgcacagcaatttctttcaagaacctttgcacttgcggaattaaggaagtcatggtattccacccactctcttgttggagacaaaaatattatcctgatgggacctcctggtgctgggaaaacaacagtaggcagaataataggtcagaaactaggttgttgtgtcatagatgtagatgatgatatccttgaaaaaacctggaatatgagtgtgtctgaaaaattacaggatgttggtaatgagcaatttttagaagaggaaggaaaagctgtgttaaacttctctgcatctggaagtgtgatttcccttactgggtccaatccaatgcatgatgctagcatgtggcatctgaagaaaaatggagtaattgtatacctggatgtacctctactagatctaattcatcgtctgaaattaatgaagatagataggattgtaggtcggaattctggaacatctatgaaagacttacttaaatttagaagacagtattataagaagtggtatgatgctcgtgttttctgtgaaagtggggcttccccagaggaggtagctgacaaagtgctgaatgcaattaaaagataccaagatgtggactcggaaacattcatttcaacaagacacgtttggcctaaagactgtgaacagaaggtttcagcaaaattttttagtgaagctgtaattgaggggttggcttctgatggtggactctttgttcctgcgaaggagtttccaaaattaagctgtggggagtggaaaagcctagtaggagcaacctacatagaaagagcacagatactgttggaaagatgtatccatcctgcagacatacctgctgccaggttgggagaaatgattgaaactgcttatggggaaaactttgcctgctcaaaaattgctcctgtcaggcacctttcaggcaaccagttcatcctggagttatttcatggaccaacaggatcatttaaagatttgtctttacagcttatgcctcatatttttgcacactgtatcccaccaagttgcaattatatgatacttgtagctacttcaggagacacagggagtgcagtcttaaatggttttagtcgtcttaataagaatgataagcaaaggatagctgtggtcacgttttttcctgagaatggagtaagtgattttcaaaaggcacaaataattggcagtcagagagaaaatggatgggcagtgggtgttgagtcggattttgatttttgccagacagctataaaaagaatttttaacgattctgattttactggctttcttactgtggaatatggaacaattttaagttcggctaattccataaactggggccgactacttccgcaggtagtttatcatgcttccgcatatctcgatcttgttagtcaaggatttatttcttttggaagcccagtcgatgtctgtattcccacaggaaactttggtaacatattagcagcagtgtatgccaaaatgatgggaatcccaattcgaaaatttatctgtgcctctaatcagaaccgtgttttgactgattttataaaaacaggacattatgatctaagggaaagaaaattagcacagactttttcaccgtcgatagatattctcaaatcttcaaacctagaacgacatttacacttgatggctaataaagatggacaactaatgacagaattatttaatcaattagaaagtcagcatcacttccagatagaaaaggttctagttgagaaacttcagcaggattttgtagctgactggtgctctgagggagagtgcctagcagctattaactccacctataatacttcagggtatattttggatccacacactgctgttgcaaaagtggttgcagatagggtgcaagacaaaacttgccctgtgattgtctcatctacagcccattactcaaagtttgcacctgctatcatgcaggctttaaagattaaagaaatcaatgagacttcatcaagtcagctgtatttactgggttcatacaatgcattacctccactgcatgaggctttattagagagaacaaaacagcaagagaagatggagtaccaggtctgtgcagctgatatgaatgtcttgaagagtcatgtggaaaaacttatccaaaatcaattcatatgaaagctttcagagtaaaatttttttttctggctataagcatgcaataataaatctcaaacactgatttggaaaaaaaaaaaaaaaaa

SEQ ID NO: 4564 - DNA, 781 bp, Macaca Fascicularis
  misc_feature (1)...(781): n = A,T,C or G
cagcttccgacacannncccnnnncagctgcagtggncgggcctagcccggcctccatggccccaacagaggtgcccttggaggctgggtccngagccgcacagctgagccgcctctgacccctactggctgggcttgaccttctggagcctgtgggggctggggagtcgccacctccttcctctgggactgcccagcctgtgtcgggggctttcagggtgtcatggggtttgcccggaaggcgggcttccctccccgtggtgtgaggttgtgcccgaggcttgtacccgatagtgagctgtttgagctggccagcaaagagagggggtggggttctgtggaaggttctggagggggcttggtgaaaggtctgtaatgaaccgtcttgaggatggagtggggtcccatggtgcaggtctctgagcaaggcggaggtgtggaggagaggccgggatggagcggggccttggaccctagcgctgtcccttccggcctcagcccggctctgcctggtgctccctgcagtgccttctccatggcccggccctccccgcgtgtgcaccaggcctggggttcccaggagagtagagcttgtgcctcgggcatagggacgtggggtgcaggtgccaacatcagcagcagccagggctgtgggccagccccactcggggtggagtgggccgggggccaaaccagtcactcggagaggaatgcggaggagcgctcattccattctatttaattgcagtgtacaaaattgtgttgtatatagaataaactg

SEQ ID NO: 4565 - DNA, 1841 bp, Macaca Fascicularis
caatcagtacccaccaccgatgcttgaggatgcctgtagtctcatcaatttaggagagaatgatcgaaatgatggtttccaatttactactgagctacaagaggatttttcaggagagaatgacttcattggccaagaattaaattttgggagagaatcatcttttgtaaagatagaggacaatggaagtgactatttggtttaccttcaaagccaaatgtttgagccacaaaaattaatgatcaattatgaaaaagataaaaaatctgcagaaattgcaagtctcacttctggacatgaaaattatggcagaaaagaagaaccagatcatactaatgaacccggagatgtctctcttcaagaatattacatggatgtggctttccttatagatgcttcccaaagagtaggaagtgatgagtttaaggaagtaaaagcttttataacttcagtgcttgattactttcacatcgcccctgatccactgacctccaccttaggagacagggttgctgtcctgagctactctcccccaggctatatgcctaacactgaagattgccctgtctacctggaatttgatttggttacttataacagtatacaccaaatgaaacatcatctccaagactctcaacagctcaatggagatgtttttattggccatgccttgcagtggacaattgacaatgtctttgtaggaacccccaatctaaggaaaaacaaagttatctttgtagtatctgctggcgaaaccaaccagttagacaaagatgtcttaaggaatgtgtctctgagagttaagtgtcaaggctactccatatttgtgttttcctttggccctaaacacaatgacaaagaattggaagaattagccagccaccctctggatcatcacttggtccaacttggtcgaacccacaagccagattggaactatatcatcaagtttgtcaagccattcgtccatttaatcagacgtgccatcaacaaatatcccaccaaagatatgaaagccacatgtgttaacatcacctctcccaacccagagaacgttggcacagaaaacactgtattacttattcctgggatatatgaaataaagacagaaaatggtgagctgtttgatgaatttgattcccaggtgcaacatttccttgtattagggaacaatcatagtaatggttctgggacagctactgatttgatgcagaagttatacctgctcttttcaactgagaaattggcaacgaaagacaaggaaaaagcacatttagaagaaatttcagctctagtggttgataaacagcaagaaaaagaagatctctagccaacagcttgggttagttatacttggccagtcctgctccgtgaagtcaatctgagcctcttcagaaaatatcagcttgactttttcttgcactcctgaaagcttagtgcctggaaatcactgagttgtactttatctttttgcagataaggaaatggaagctacagacatctgaagcatcttacctaagaattcacagtaattaatccaatactttcgtcatagtgattcatactctatgtttatagaaaataagtttaccttaaagttaggccatgaaacagaaataataaaatctatctctgagttgttgaaaagttgaagatgatgcatataaagctcaaagtacacactatccctggaatataatcaactagtattatccctatttgaattatctaagtttgatcatctatttgacaattaaaaatataaatccattgtaaaaaaaaaaaaaaaaaaaaaaaaaaaaaaaaaaaaaaaaaaaaaaaaaaaaaaaaaaaaaaaaaaa

SEQ ID NO: 4566 - DNA, 926 bp, Macaca Fascicularis
  misc_feature (1)...(926): n = A,T,C or G
tccagaggatacccnnntgnccncgccaagtttggtgggcagagctatagatgggacccaagggagtggccgagcctcactgcctaaaccaatgccctgctcatccctgtttccccaggctcctggctgtttgtcccaaagaagtctcgtggggttgacataggtctttcctgccatctctgtcccagctgctgtcagggattatcaacagtgtaggggagattaactgcctcccttccaatagacactatcagcagggacagatgtgtgggagtgcagggctgcagagggtatggggggaggaggctgctaaaccctatcccccagcctcccccctgccctgaagaagatcttccatctgcttccactcagctgggggctcgagagggcttgatggctgtcccctgcccccctcctttggtttttacacagagaccaagaggcctcagtttagcaccttagtacctccgctgcttcacttgctttagccaaagccataaaaatcctgcaacgtagagaaaataatgcagataccctgattagccagccctctactcctccacccttttccaagatatgcaacggccttggtgcctgtccaaaggcttcgccccctccagtgcatgaggagccctctttcctccgctcagagatgctgcttcatttacccaggaggtcatattctttatatgtaatttttgttgcaaagtctctctctagagaaactctatatattattcgaatttttaaagtatttgtttatatataaaagaaaagctcaattggccgtgctgtcctgtgctgtgctgtgcccacagtccgtagtttgcctctcgctgtgttggaagtctcatgagtcctgctggtcactcaccagcctggtccggcctccactctgaagcagggttgagcctgctgtgctctca

SEQ ID NO: 4567 - DNA, 1880 bp, Macaca Fascicularis
  misc_feature (1)...(1880): n = A,T,C or G
agtttcatttccggcgtcaccggaagcagcttgaaaatggcgtctccctctttagagcggcgagaaaaaggggctggaaaaagtgaatttcgtaaccagaagacaaagccggagaaccaaggtgatgttatgtgggaaccgaaggctggggtttgtggacgttgagttgcgatgttttttttttctcattgcttgtggacttataaaaccacctggagcctgtactgtgtatttaagtaccacaataatcgctgataagattgttggctgggcccacaggaacgactggccgatatggtgccacccacgtgttcctaattcattccttttgctaaagggtccccaaagcgaagccgttgctgaatacgtcttctgtaaaagattattaagaaaatgccgagggcgacgcggaaccctgtagcctgcaggggactgaaagtcattgacggaatgaggaatagggtgaggtgggagcaggtagtcctgatatacaggagtcgaccctgataatggggtgagatatggggaaaggagctatctgacatgtccttagctctagtttgtcagtaaagacagtttgaaagatttatcaattcctgtttgtcagattgctaaaatactagacgacacagcccttactctttaggttgtgctaccttttaattgttaactcctgcgttgtggtctggttttacccgttttcttcagtatgaatgacagagaagtcagaaatagcctggggatctgttcaaccaggctcataggaaatgttaaaaacattgaactctcaatttagatgcattgggaaagctttcaaggtttcttcgttgttgctcattaaatgattatgtaacgtacatagcagaggatacaacttatatatagtttaataaaaccatgcaagaaactagcattcagactgttaagtaaaatagagcattaccatacccctcaaacccttacgtgcacttctcagatcatattctcttttcctgtcacaagtaaccactctgaattgcgttgcattctgttcctcttcttgtagtcacgaagtggcttaattttgcctctttttaaattttatatacatgaaagtggaccgtatgcatttttctgtgtcttagatttagctttgtttttcaaacagggtgatacttgtaggtgtagttttagtcttttcactgttatgtggtgtttccttgtatgactataccccaatttttttttttcattttacaatcggtggacatttggattgttcctattgcttgcaattataaacagtactgctaaaacatctttgtacatgtcttctggttaacatcttcaagggtttctttaggttgtgaacataggattggaattactgaagtgtagggtgtgtgtaagtaatgctaacttttttccaaagtgctagtgtcagttttgttcccactagcagtggacgaaagttctcattgccttacattcatatgaatacatgatgttacctgaatttggaatttctgtcattttggtaggtatgaaatgggatctggttgcagttttaatttgcattttctgatcacctatgaggttgcgtatcttttcacatgttttgggccttccttaattgtgaaactcctgtgtatttcttttgtcaattttttttctgagattgtagtggggactttgaaaaaattgatccgtagcctttgaagtgtttaaattggatagggacttggtcagggaagcattgcaagtaaccagtnnnnnnnnnnnnnnnnnnnnnnnnnnnnnnnnnnnnnnnnnnnnnnnnnnnnnnnnnnnnnnnnnnnnnnnnnnnnnnnnnnnnnnnnnnnnnnnnnnnnnnnnnnnnnnnnnnnnnnnnaaaaaaaaaa

SEQ ID NO: 4568 - DNA, 370 bp, Macaca Fascicularis
tccccactcccctccttctactccatcctcattgccccttctttcaatggttctgacaggatccccttcagccacaggcccttagcaaatgctgttcccgtggcccaagtcatcttccctggttcatgcctgcttcaggttcaagttacccctcgggagaatgttcctgatcaatctgaattgaccaagtccttattacactctcaaactccatgagatgtccttcatagctctcatcccagttataattagtttgcatttatttacacaatggctgtattaatatctgtattctccaccagaatgagagcttcatgagagtcaggactgtgtgttttctcaaaatcagctttattgtggtctaatttat

SEQ ID NO: 4569 - DNA, 721 bp, Macaca Fascicularis
  misc_feature (1)...(721): n = A,T,C or G
gatacaaatcaaaaccaaccaaaggtagaaaatgcatagggcaaggtctgggagggttccagatagaaaattccatggttctttctcttgaaatcaggacacattaccctcccagcacacagctgtaagagaatacttgccaaccaaagaagtctatccaagcttgtgttcatagattttattagggctttattacataggtgtgattgattgaagaactgacgtgtaactctatctctagcccccatcctctacacaggctgatgttatttggctcagagtcctaaacttcaaatcannnnnnnnnnnnnnnnnnngtaaccagcacctatctgaagtaatctcactagcataacttatctagaggccnnnnnnnnnnnnnnnnnnnnnnnnnnnnnnnnnnnnnnnnnnnnnnnnnnnnnnnngaataacaaacagcttctataatnnnnnnnnnnnnnnnngtttaaatgccatctcccaggaactagggacagaggccaaaaaagttggagaaatccagaatgtgtaacatcataacaactgacctaattccnnnnnnnnnnnnnnnnctgaaaaaggggatgatgcagtagtgttcaataataaatacacctaagtagataaatnnnnnnnnnnnnnnnnnnnnnnnnnnnnnnnnnnnnnnnnaagatacttttaggtaatcagnnnnnttttaaagcannnngggtatgtaaag

SEQ ID NO: 4570 - DNA, 2997 bp, Macaca Fascicularis
  misc_feature (1)...(2997): n = A,T,C or G
ttttttgttagcagacggtggcagccgcaggccgtaagatggagcctccgaagcacgagcctgagctccagcggttttaccaccggttgctgcgtccgctgtcgctcttccccactagggcgacgtccccagagcctcagaagcgccccaagcaggagggccggattctacagtccttccctctcgcgaagctgacggtggcgtctctgtgcagccgggtggccaagctgctttccagcagtgggatggcagcgcgagtgcctcctgaggctcgactacgtctcatcaaggtcatcctggacgagctgaagtgcaatcggcgggagccgcccgccgaacttagtctgagccacaaaaacaaccacaagctgcggaagcggctcgaggcttacgtgctgctgagcagtgaacagctcttcttgcgctacttgcacctgttggtgaccatgtcgacccccagaggggtcttcactgaatcagccacgctcacccggttggcggccagccttgccagggactgcacactcttcctcactagtcccgacgtctaccgtggcctgctcaccgactttcaggccctgctgagggcagagcaggcctctggaggtgtggacaagctgcgccctgtctgccccgctgggacattcaagttgtgccctatcccctggcctcacagcactggcttcgcccaagtgcagtgctctaacctcaacctgaactacctcatccaactcagccgtccaccagagtttctcaatgagccaggaaggatggatccagtgaaggaattgaagtccatccctcggctgaaaaggaaaaagcctctccactggccaccctccataggaaagaagagagaaatcgacatcagttcctcacagatggtgtcgctgcgcagctatcctgtggcccccaccagcagggcttcccccttgcctttctactctgagctccggagaggccaatccatgccctccctgcgtgagggctggaggctggcagatgagttgggccttcctccactccgatctcgccccttaaccccgctggtcttggctacagagagcaaaccagagctgactgggcacatcgtggctgaggatctgaagcagttgataaagaagatgaagttggaggggactcactacccaccactggactcaggcctgcctcctctccttggggttgtgacccgtcacccagctgcagggcatcacctggaggagctggagaagatgttgaggaacctccaggaggaagaaacctctgggcagtgggacccccagccccccaaatcctttccacttcacccacaaccagtgaccattactttgaagcttagaaatgaggtcgtggtccaggcggctgccgtacgggtctctgatagaaacttcttagactctttccacattgagggggccggagccctgtataaccatctggctggtgaactggatcccaaagccattgaaaaaatggatattgataactttgttggcagtactaccagggaggtctacaaggagttgatgagccatgtctcttctgaccacttacatttcgatcaagggcccctagttgagcctgcagcagataaagactggtcgaccttcctgtcctcagcctttctacgtcaagaaaaacagtctcaaatcatcaaccctgagctggttggactttactcccagagagcaaacactttacagtccaatactgagatgatgccctccctcccatcaccccaagctaccaaaacctgggagaagtggtcaaacaaggcctccttgatgaactcatggaaaaccaccttgtctgtggatgactacttcaagtacctcaccagccatgaaacagatttccttcatgtcatctttcaaatgcatgaagaagaggttcctgtggagattgtggctcctgtcagagagtccctagagattcagcaccctcccccattgctagaagatgaagaaccagactttgtgccaggagagtgggattggaacaccgtgctagagcacaggctaggagctgggaagaccacccacctgggagaacctcacaaaatcctgagcctgcagaagcgtctggaacaactgtggtctgtgcttgaggtccccgacaaggaccaggtggacatggtcattaaatacagttccaaagcccgcctnnnnnnnnnnnnnnnnnnnnnnnnnnnnnnnnnnnnnnnnnnnnnnnnnnnnnnnnnnnnnnnnnnnnnnnnnnnnnnnnnnnnnnnnnnnnnnnnnnnnnnnnnnnnnnnnnnnnnnnnnnnnnnnnnnnnnnnnnnnnnnnnnnnnnnnnnnnnnnnnnnnnnnnnnnnnnnnnnnnnnnnnnnnnnnnnnnnnnnnnnnnnnnnnnnnnnnnnnnnnnnnnnnnnnnnnnnnnnnnnnnnnnnnnnnnnnnnnnnnnnnnnnnnnnnnnnnnnnnnnnnnnnnnnnnnnnnnnnnnnnnnnnnnnnnnnnnnnnnnnnnnnnnnnnnnnnnnnnnnnnnnnnnnnnnnnnnnnnnnnnnnnnnnnnnnnnnnnnnnnnnnnnnnnnnnnnnnnnnnnnnnnnnnnnnnnnnnnnnnnnnnnnnnnnnnnnnnnnnnnnnnnntcacccccaaatggccagcagctcatctagacctctttactgctttggaagaagaaatatttgtctatctctgggagcagagggggttcaggaacattatgcttccaactatgaagggattgagactaaaactattgttttcttagtgaaattctcataaaagtatccccaagcctagtagtcccattatgtcaagccttgcacaatacaatccaaatctcctagatcaaaagaactgagaccttggagttcattgtagtgggaaaggtcagacagaggcaaagttgatctttggaacaactcactttagcattcctatcacactacattaaattgtcacctcttttagttctcaaaaaaaaaaaaaaaaaaaaaaaaaaaaaaa

SEQ ID NO: 4571 - DNA, 2395 bp, Macaca Fascicularis
tactgatattgtgctttgtgaagtcaggcattgattggtgcaacccttgctgtgtgcagaagtgtctgggtcaagggtctgtgcgccttccacaagctgtttttgattaaaaatttttttttctttgcagaatatgttagcaatgacaaggagacgatcaagtaattaatatttattgagtacttatttatatgctgggcagggatcttaatacttattataccttatctcatttaaaccttctaataaccatcagatataggttttgattgtttttcccactttacaaatcaggtcatcaagcctcaactaggttgagttacatgtctaatgtcatacagttagaagtggtcggactgggatttagaatctggtttatatgcatccatatcataattttagtcagccacatcaagtataagtaacgttgttttgaaaatgctgctgatgtacctaagatcctacccaaatacattcaaacatttggaaaacaaagaaaccttttcttgagcaggtctgtactagttcttggaccattgacattctactcatccaaaaaaagacttagcccgaatttttcctctttgaaactattttagagttttcacattccacttaaccgccacatctttgatatatccacagctctctacactgacacctctttaatataaaatcatttggaattagagtgcattcttgtgtatttttctcacctaactggaaactctttgagggaatgacttgtacagaattcatttctagatccccagagtgatttttgctctgccttgttaccataaacacacagtgaatgttgtggacttaaatgaataagagagtgcaaagaactctctcaggtgtagttaggtgtggtcttaggaggttaactagttataatatcacatggcggtagctacaatgcagttttataaagggaactctggtccatgttagataatccatatgtgttggttattgctgttgaaataagaggtaccctgaatggaaccacagattcagaatattcaacagtagcatccttttagtgagcacttatcatgtgccatgaagggaggttgttcaaccctcataacctcctctatgagatgggcaatggcttctacagatgggaaaatcaggactttggaggttgagtgtgttgctataagtcatccatccagtaaggagtggaactagggtctacacactgatttacctgacgccagtgctttccttccaaccactctgttggctgcctccctggtatagcttccaaatgcggagtgttgcagagctctaagaaactttttctaaaaatttttctttgcaatcatttgtatacatgtggggggttgttttagacatcttgagaagtaaaaggttgctatgagaatgggggattaagacctctggatactgatttcagttcttcatgcacttgtcttatgacactaggtaagctccctcatcttttgcattctactgtcctcatttatcaaatgatagggctgatgtagatcagcagttttcaacctatgttattcaaaaatctgaggattgattaaagtagccatagaaaccattgcaatgtggagagcaaagagatgatcaggcaggattctgagccctacacctcccttatgctagagaaggtttatatctgcttttgtgttaagatttcatgtatggtttactttggattctactcctaaaacagagtttgcaaccatccaataagttgttttctaaggtcctatctagctccaaaattacatttaatatttaaccaaagtcaaatggctagttaaatgacggagttcaacccaaaagttaggcccctggtcgtctagttattcattccttcttttatttaatcctcaaataattattaagcaccagctacagattcaatactatgtctagggcagatgatacaatgatgagtaaaataaatatagtagttgctgtcataggagagactgacattaattaaacacatgcatatttctatgtataataagtgctataaagaaaaatgtgcaggataggtataactgggaaatcataaataccacaaacattgatttggtacctacaatgtccaaggattaggcagaactcttgtcataatgtgcgtgtgaacccatatgcaaatatgcacccagagacatgtgctcatccagatgctgatcagagcaaaagccaactaggacatgatcattggggcaattgtgaattgatactttttccttcctgtatgccactttgttgaaacactgatgtttccacaaagcatgtccataggcaatttccattgtgcctgtcttcctgtatgctagcatggacacagcacattacaaacttgacattttcatcaaaaaaaaaaaaaaaa

SEQ ID NO: 4572 - DNA, 722 bp, Macaca Fascicularis
  misc_feature (1)...(722): n = A,T,C or G
atcagaactattcctttannnnnnnnnnnnnnnnnnnnnnnnnnnnnnnnnnnnnnnnnnnntcccacacaaaatttaaaaatccacattaatgatccatttaagtacagttttattaggtccttttctaatgattaaaggttctttctcaatttcattcctcagtcctgcaaataaggactcttactgaagagtactgaaacaaggactcttaacagcttctggagtcttgggttttgtttttgttttttgacataaaatacactattggccatgtccatcacgagagtgtttatagtaattaattatactataattgcacagggcctggcacttagtagcattctgcaaatgttccctcagtggtccttttactctccttgtcacttattttggagaaatagaggcacgtgagataagaagaagaagaattttgatgttggtatgcttgcccttactgttacttatagacaggctccatcgtaggcaaatttgaatttgattaaagtgatattttaaaaatagggctgggaaaaatattcagtaactgtaagcccccttttggatgccaaatttagaattttgtacattctcttatgaacaagcatttagattgtaacatggtaaagcctattaccagccaatgttgttagcatctttgtatgcacatcactgtttgtgcaatatatgaatattttgttgcattgtattcttatataaaa

SEQ ID NO: 4573 - DNA, 764 bp, Macaca Fascicularis
  misc_feature (1)...(764): n = A,T,C or G
ttccttaaagcatttgctgccaagttagtggaaggctcacttttgttaaatgactgtaatnnnccttgttaccaacgagatcattggaagccgcctnnnaagacactctttgtgtagctctgtggagtgagttttcttaaggtttcaaaagaatcacagcttcaaaactttaattgaaaatgagagacagaagccacaggggaagcaaagcaaataggatttttaatataaatatcagtgtggaaaaataacctattctgttgaatttagtgtccatgcacttgnnnnnnnnnnnnnnnnnatttactctgaaaatccttctgtgggggtttgagaaggtgnnnnnnnnnnnnntgttctgttgtgttgcactttatcctgtgtgtgtgtgtgtttcgattaattcaagttgtgtgctgtatttcttgtataatttacgaagttacacaaaatacaaagagcagtaaacttgtttgaaagtttttggcaaaggaaagtaacttaaatgtaatagcttcctttaagagtnnnnnnnnnnnnnnnnnnnnnnnnnnnnnnnggcccatgtaattgtttatattttcagttttaagcagctatagtgcaagcttgttaggaatgcgtggaagaggagattagaagtgatttttcctcttttaaaggtaaacaaaaattcttcaaatatgccctagttaactatttcagcgtaccatttttacttggttaacnnntgtacattttgataacctatcaggaggaataaa

SEQ ID NO: 4574 - DNA, 2057 bp, Macaca Fascicularis
aattgctgttgcattgcctgtacctgtccctgtggctgatttgctgttaacagctggggaagtgagcttaacactgaacgctgtgctatggacagatggacttcatctctcttactgtacttgaactagattgccctcgtgggaactgtttctttctctgtgaaaatccccaaacctcagacctcatcaccgataacaaaataagcaaggaagcaaaagatttaattttaaaaatgaaaccaataatatcaaagtgagtggattagattacttggcaatgatacctatcagaacaaaatgtaaagaatagactgtatacatttattaccatgtcatcaaccctatcttctcaccttctctcagatgcatggaataacgaattaagtatgaatagcatcaaattccaacagggtagacattatggagccatttagttcttctagtcctctgattcagtccagttttgtgaccacttgctgtgtaaggtgattagtaggtttcctgaagcacataaaaaatatgaacatggatttttgtttcttcaatttttactaaaacctctccgaatgtttataataccaacaacagtctcatagaattttaagatcttgaaggaacattgcaagagtggaagacataacttgcactctcatggatgaaaaatgtttgtagaactactctaactctactcatgataacattgtaaagtgactggtcacatctttattttacagatgaaaatactaagatttagaaaaacgacttgcccaatacacagcttacaaatggcagagttggttaaaagctaaacctagtactctttctactataccatgttataataggatggcagtggttaagcaaaggcaaaattctcttatctgtggctggaggaagtataaattggcataacctctataaaaggaatttggcaatatttatcaatattaaaaatttatatatttgttaactcaacagttccatttttgaaaatatattctaaatatttaggtgcacacatatgaaatgatgtaatagcatgtgtaattacagacaactatataatgttatacagatggacaaaaattattatgctctttatatactgatacagaaggatctcttgtttgtttttgtttgtttgtttgttttaaaaagcaagatgcacagtacaatggaaatagaaaggaagagaatgttgtttttacatttgtgttaaatgaagggatgaaaataaattctaatgtgctcatatctccctaggtaaactctggcaggatacccaagaaactaataatagtgcttacctatcacagggacagagaagaggttggatgagtgacaggtgtgggaatgtgactttcagaatatcactttttatatataagaatttagccaggtgaacatgttccatgttcaaaatgtgttgaagacatggctcgaggtgttgataacttatgttcaggtattcacacacaaacaataacttctggtgctattaaaaaaaaatactcagggtatatgaacatgtctaagaatgtaagccatgtactttaaaaaaattttctaaatattattgatattgagatattttacaaagcctttaggaaatacacaggaaggaagcaggagaataataggaattgggaaatggatgttggaatagcttgcttctctaagtctgcctgtcagtgctgctctcacagcatgttcagataaacctttgggagcagagaaaggtctcaaagccatatcctacgaagctaaaatggggccagttttaaatgttaagtgctttggctaaggtttaaagccaccatgattgaatggattgaccatgtgtgtatgcaagagtaagcatttcttgaacaaaggaggtccaacaacaggtagatgaaacaggtaagtgatatgcccactgctctggcatttcttccccctgctttgatcactctgtctattgccatctgttgtctttacttggtcacactttcctgcagtgtttggatctactttcttacatcccataaatgaattaaaaaaaaaaaaaaaaaaaa

SEQ ID NO: 4575 - DNA, 693 bp, Macaca Fascicularis
cacagtgaccgagggcggcgtgaagcaggagtaccgcacgtggaacccattccgctccaagctggccgcggccatcctgggcggggtggaccagatccacatcaagcccaagtccaaggtgctgtacctaggcgccgcgtcgggcaccactgtctcccacgtctccgacatcattggcccagacggcctggtctacgccgtcgagttctcccaccgcgccggccgcgatctggtcaacgtggccaagaagcgcaccaacatcatccctgtcctggaggacgcgcggcacccgctcaagtaccgcatgctcatcgggatggtggacgtgatcttcgccgacgtggcccagcccgaccagtcccgcatcgtggccctgaacgcccacaccttcctgcgcaacgggggccactttctcatctccatcaaggccaactgcatcgactccaccgcatctgccgaggctgtgtttgcttctgaggtgaggaagttgcagcaggagaacttgaagccccaagagcagctgaccctggagccctatgagagggaccacgctgtggtggtcggggtctaccggcctcttccaaagagcagcaccaagtagcacccagctcaggctcgcctgccatctccccaagcctgtgttgtgtttgctattattttctatgtgttttctttgtgcgtgttttgttttgt

SEQ ID NO: 4576 - DNA, 713 bp, Macaca Fascicularis
  misc_feature (1)...(713): n = A,T,C or G
acagagcgagactctgtctctcaaaacacaacacaacacaacacaacacaagtcatttgatgaatggtaaattctatcaaaagtaagtgatttgcatgtataatatcaggaaaattcagcatcccaagtatgactggacaaagagagtagnnnnnnnnnnnnctgtgccataaatttccaaatcccctatgtgtctctttcagaactggccagaccggaaataatctattctcataaattcagtgtgtacgcagaatacatacacaacaacatagggagttgtatgactgataggnnnnnnnnnnnnnnnnttttaatcaaagcagtttaattaaggtatcaaaaatatctttgcttagtatcaaaaaatgtcaaataggttcagcttgcagccaaaatatggatcatttatgaagcaggttcatattttagaggtgttaataaaatcctcatctgaaaagatccaaactacaaggattttattataaacataatttcatagactaaaagtttttggaaaagatgcagggtctgagtcagaccttttggttatattgtgcagtttcaaaagaactatttaaaactcttgcaaactcatgtaaataaaaatcatagggtgaaaattgtattcgttaaaatatcttagtaatttaaaactacccgatttcctggaaaattttattatttgaaaggtggaggaannnaaaaaggaa

SEQ ID NO: 4577 - DNA, 618 bp, Macaca Fascicularis
tactggacagaagtccactcgttcttggcaggatggcttctcatcgtctgctccttctctgcctcgctggactggtatttgtgtctgaagctggtcctacgggcgttgatgaatccaagtgtcctctgatggtcaaagttctagatgccgtccgaggcagtcctgccgtcaatgtggctgtgaacgtgttcaaaaaggctgctgatgagacctgggcgccatttgcctctgggaaaaccagtgagtctggagagctgcatgggctcacaactgaggaggaatttgtagaagggatatacaaagtggaaatagacaccaaatcttactggaagtcacttggcatctccccattccatgagcatgcagaggtggtattcacagccaacgattccggcccccgccactacaccatcgcccgcctgctgagcccctactcctattccaccacggctgtcgtcaccaatcccaaggaatgagggacttctccagaggatctgaaggacgagggatgggatttcatgtaaccaagagtattccatttttactaaagcagtgttttcacctcataagctatgttaggagtccaggcagagacaataaaacattcctgtgaaaggc

SEQ ID NO: 4578 - DNA, 1994 bp, Macaca Fascicularis
  misc_feature (1)...(1994): n = A,T,C or G
aaataaaagcattcatgacctctacttcatacccttcaccattcaactatattttttcttctttagtgtcttctacatgctttcattagtaataaaggaatcttccaaaatttattccatggatgcattttcaatacacaagaattagaactgattttaccaaatttagatttctattctaattttttattcttagtggtctatgaaaacagtgtttattaatttactttattttttaggcaagccaaattagagctgagagttgctgtagcaaaagtggaagagttaactaatgcgactgaagatctgcagggacagatgaaaaagaaggtattttctatttctaagacaaatggatacctgttgcttagttttctttctattttgttgatttattttgaattaggtgttaaagagggttgtcagaagatgaattaatcattttattacccttaaatataaaatatgaaagtaggaagctaaactatattattgaaaacaactttataaataattttttatttccatcctctgtagcctaattcaataaaacatcataatcccacttaatcacatcgttactgaaatgcagattaatacaagatcaggtttcagttaactggttatttgcagttggaaaacaagcatttaatactacttttatgttatttactaaaatatttattggcataatagactccggttcttttaaatatgtaatagagaaatttcagaaggatgtcaaggaaaagtcaagctttatttttagatagatataattattgaaaattctcactctcgggcttattagctatgtaactttctaagctttattcccaatctgtaaaaagttgattatggatttctaataatggtagattttttttaagtgttacaagaatccttccataagtaacaattttaaaacttggatacatttttaaaacaccagaaagcacccaaaacagaaaaaagtaaaagaaataagaattgttaatttttggatttctggcctgtcagttctcccaacccccacagctgtggcttcagaaaacacctctgtatgggcttaaggtacccaggtcaaagtttagggctagaaaagcagtaggagatttaaagaaaaaatagtggcagcaagagtaacacacagaaaaagagccaaattctgagtgtaaattcttaccaaattcatgcctgacaactaaattatgcatatggaagtgggggagggaccccagagaacccagtgaagaagcaggcagagacctaagagaaatctacttttgaaagatagagatgtatgaaactagatatttgagtttactactttttataattgaatgcatgcgagaaatgtgtgcaactgaagcatcagcatactgaagccttccttattgtttgaagtatcagaggacaaagcccaaagctggaaaggcagttgaaaattacaagggaatctctagaagcaagggaaccacaaagaggatgaaccctacctctgcccaaatcttgactgatcttcaaattatgaaggcacagggcctagttataaaagcaatagtggaaagcaataagaactaattacatgtatcagctgatacatactgtatgtggaatagatttcaaatttcaagaccaagcaagataattgtctacttgaactaaaaaaaaaaaaagaaagaaagaaattaatgctcaaaagaacaaaacaagtaactgcaatgtattagctacactgtcgggttttcaataaaaaattnnnnnnnnnnnnnnnnnnnnnnnnnnnnnnnnnnnnnnaaaaaaaaaaaaaaaaaaaaaaaaaaaaaaataattgcaacttttctactgagtgtttgcactatactttctggaatcttatttaacaaaaataaaggaaaaaaattgcttgactaaaaaaaaaaaaaaaaaaaaaaaaaaaaaaaaaaaaaaaaaaaaaaaaaaaaaaaaaaaaaaaaaaaaaaaaaaaaaaa

SEQ ID NO: 4579 - DNA, 764 bp, Macaca Fascicularis
  misc_feature (1)...(764): n = A,T,C or G
aacatgctgtgangatcagagctgcagannnnnnnnnnnnnnnnnnnnntnnnnnnnnnnnnnnnnnnnnnnnnnnnnnnnnnnnnnnnnnnnnnnnnnnngtgcacatttacgtgctcctgatcctgggaacccttgtctgtgtccttctcttcggcttcctctttaaaaggttctttaggatacagagactgttcccgccagtcccacagatcaaagacaaactgaatgataaccatgaagtggaagatgagattatctgggaggaattcatgccagaggaaggtaaaggttaccgcgaagaggtgttgaccgtgaaggaaattacctgaggcctggagggtgtaggaatggcgtggacatctccgcctccgagacactggggaactgttttcttgttgatgatgccgtgagcctttatatcattttctacgtttttatttaaagacatgatgtttgggtccaggcacggtagctcacacctgtcatcccggcactttgggaggccgaggcgggtggatcgtctgaggccaggagnnnnnnnnnnnnntggccaacatggtgaaaccccgtttnnnnnnnnnnnnnnnnnnnnnnnnnnnnngtggtggcgtacacctgtcatcccaccgacgtgggaggctgaggcaggagaatcccttaaacctgggaggcggaggttgcagtgagctgagatcacgccattgcacaccaacctggggacagagcaagatttgcatctcaaaaaaannntaataataaat

SEQ ID NO: 4580 - DNA, 958 bp, Macaca Fascicularis
aaacttgttttattatttatattacaaatgctgagcaattcataggggaaaaaaaaaaaaacaaaacactcatttttcttcagtgctctgttagagtagtcctgggaggcatgtgtcaagagttgtagtaactgacgttcaaaatctcctaatggaatggtgcagcagactagattgattctagagcgctatccaaatggaaactgcttagctactgtccgtctgaaaataggcactgcttaaaaaacagcacttcatactatgacatgtgaacatttctgattgcgtgtggttataatagcttgtataaaagctgagatggaaacatctttgtaaccatgtggtctcttcactcccacggagatcttattttttatagtttcttgatttttctctaaccttcccaaccctagccccttctttggcctcacagaaacagggtacgcccagtggaatcatcccaggatatttttgattagatgagcaaagacaactgtgaagaaaagttgacttatctggtagttggaatacgggccccagaaaaagcaaagttgtaatgtgtgtaaatgttgtttggtgtgcgacgccagaggaggaggacagatcccagtgacactgtgcaccagaaggatgccgcctgcttggctaaaagacccagcagtagggccagctattgtaaagcccctccgccaaatgaacagggacccttctctggtcacaatagccattcacgctgagcagcttcattaaatattcagcctgtgcttccggcagctcattagggccgcaatgagcagtgacgtggatgcaggaaagctgagggccagccagcatcggaggcagaggctgagcgagctgctgatggcttctctcttcattgcctgtcctatgatgaccagtgtgtgctctctgctttgcttgaaatacaggtaaaaaaaaaaaaaaaaaaaaggccaca

SEQ ID NO: 4581 - DNA, 943 bp, Macaca Fascicularis
  misc_feature (1)...(943): n = A,T,C or G
ggaaggaaggaagnnngggaaagagggagaaagggaaaaagaagaaaaagagaaagatgaaaataggaacaaataaagacaacattaagggccacattttaagatttccatgttaatgatctaatataatcactcagatagtgcaacactgagaatttttttaatggcccaaaaatggaaactgaaagtcagccacagggaatgaaatgctttgggcagtgtcttcctgatgtcttcttagctaagaggagggaaaaaaggctgaaaaaatagggaggaaattccttcatcagaaccacttcaagtggataataatatttataagaaatgaatggaaggaaatatgattctcctgacgctaaacacatgcatatatactttgtatgttaaagtttgaactaagtgaatgtatctgcggaggaagtattataaagatacgtcattagatccaagtgcagattacatttttatagtttatcagaaaagccttatatatttgttccacattttgaaagcaaaaaatgtattttttacatacccttcaattgccaaatttgatacattgcactgaagacagaccctgtcatatagttaatggctttaagcaggtacttctctgtgcagtatagattttaataatcttatagcattgtacattattattgctgttgtnnnnnnnnnnnnnnnnnnggataatggcccttggtgtgttgtatagctccctatgtattctctgtttccatctttaagttcccagaccaatatacattaagagccttgcatggtctaagttgtgtttattccaaccactcagaaagctcctggaaagaaattttacatttggctgttctgtgctcctaatgacacttgaccttgttgaacaaatggcagaacctttcccaaggatttgattgtgaattatctgcatgtgtgcttttttttt

SEQ ID NO: 4582 - DNA, 733 bp, Macaca Fascicularis
  misc_feature (1)...(733): n = A,T,C or G
tgatnnnnnntattctccctgcacacaggcagtaattaccatttgagcaaacaaccactatgtaccaaatgctttctatcttttatctcatttttaaatgaattatcacaacaatccaacaaaatgagtattttgttgaannnnnnnnnnnnnnntatatttggattgtacctatattttgtaaatattttaaaaaaaaggcaacttctaatgattcaatccttctcatagctgaggatcagagaatttnnnnnnnnnnnnnnnnnnnnnnnnnnnnnnnnnnnnnnnnnnnnnnnnnnnnnnnnnnnnnttttgctaaattaatgaatctcaaactttactgtatgcacaaattccctgtgtgtctttttagaaagcaaattttgattcaacaggtctgggatggggcctgaggtcccatatnnnnnnnnnnnnnnnnnnnnnnnnnnnnnnnnnnnnnnnnnnnnnnnnnnnnnnnnnnnnnnnnnnnnnacgcacttgcccccatgatcccaaaagaggttaagttggtgtgaccagcagggcaggggagtggcattggtcccttaattcatgtgtggggctgagaaaannnnnnnnnnnnnnnnnnnnnnnnnnacagacaaagcctnnnnnnnnnnnnnnnnnnnnnnnntagaatgggaaaaatgagtgtcctaaagattttttttgcccagtctagacacacagcgggtatttgtaactgtctgta

SEQ ID NO: 4583 - DNA, 671 bp, Macaca Fascicularis
  misc_feature (1)...(671): n = A,T,C or G
gagagcgccgcggatggacctcagggaaggcctggcgcgccgcctccgggnnnnnnnnnnnnnnnnnnnnnnnnnnnagtactggggagcctcagaccacggtgaatgaagagcgacgggccggagagacctcggcctctgcccaggagcagcgtccagcaacccggcctacaggggaccggtggacgccctggtggccactttgccagacccctcatctcccagagaaccagagggggtttccgttcccctcctgcttggtgcccagcgccagggcggggcgggggctgagcagcccctcccatggacgaagcggccagtctacgtgttggaggaggggctctggggaaaggggggtgttaggcaggcggttggaggcagcgggaggtggggaggcgcctggtggggaggggcaggtgtgtggggagggcctgggcagcgcctccccagtcagnnnnnnnnnnnnnnncccggctccattcagcctgggaaaggactccacggtttatgctgaagtggtggtggggtgggtgaacgctgcgcaatggaagagcatggtcctgtgctgactgccccggggtatggggctgtggtggcactgggggggatgcggtgtgtcatttgagcaatggcggccaactgtggcgtgcaggcctggagctgcccctccg

SEQ ID NO: 4584 - DNA, 775 bp, Macaca Fascicularis
  misc_feature (1)...(775): n = A,T,C or G
gatcgnnnnnnnnnnggccaacatggtgaaacctngnnnntgctgaaagtacatagattagctgggtgtggtagcatatgcttgtaatnnnnnnnnnnnnnnnnnnnnnnnnnnnnnnnnnnnnnnnnnnnnnnnnnnnnnnnnnnnnnnnnnnnnnnnnnnnnnnnnnnnnnnnnnnnnnnnnnnnnnnnnnnnnnnnnnnnncaaaaataaataagtaaataaataaagccccttgaatgtaagaaatgtggtaaaacatatactctttcccattccctcataaacacgaaagagctcacactgcagagaaaccttaagaatgtaggaaatgtggtcaagccttcagattttcctgtttttgaagatttgggaggactcagagtggagaaaagccttttgaatctaaatttgtggtaaggccttcagttgtgttagtcccatttgaagacatcagctcattcctgagaaaaaccctatgaatgtccagaacatgggaatgcttcatttctctcatacccactcaaggacatatgaaaatgcacactgtagctggctggaccttgtaaatacaagaacgtacacaggattaagactcttaatagtttagaaactgcaagaatactttcagttttaacatttacttgaagtcatgtgaaaactcccactggaaagaagttctataaatgaagcttttctaatttggaaannnntgatgtgaattgattatcgtgcagtgcttgaaaaaaatgtatgaaatgttacacaagtgcaa

SEQ ID NO: 4585 - DNA, 731 bp, Macaca Fascicularis
  misc_feature (1)...(731): n = A,T,C or G
ttcccatggctggggaggcctnnnnnnnnnnnnnnnnnnnnnnnnnnnnnnnnnnnnnnnnnnnnnnnnnnnnnnnnnncaaagagagagnnnnnnnnnnnnnnnnnactcccatttttaaaccatgagatttcgtgagtctcattccctatcatgagaacagtgcaggacagactcacccccataattcaatcacctcccaccaggttcctcccacgacaggtgggaattgtgggagtgacaattcaagatgagatttgggtggggacacagccagaccatatcaccccttttccccacagaggacagcacaggggagtctggtgcttcctcagggcctgtgtgcacagggcccnnnnnnnnnnnnnnnntgacacagccagccatgccagcaagccgtgggtggaagacacccatcccatggcaacactgccagnnnnnnnnnnnnnnnnnnnnnnnnnnnnnnnnnnnnnnnnnnnnnnnnnnnnnnnaccacatgggacctgctgcacccagctcttacctggtcagctcaatgcaccttcatggaggagaccaaggcacagagaggcttcagaagcaggaagcatcccagtcctgcgccctgagcctggcgtgaatggtgagaaagggtgggaaggagccaggggaggacgggcctgcaggccccagagaggaaccttgcctgcatcctaccctctgaanngtctacgcnnnggaggcgacaggat

SEQ ID NO: 4586 - DNA, 631 bp, Macaca Fascicularis
cgaccacatccagttgaacagcaaggacattggagaaggctggggctgcgggtgctgaccgggggccgggccggcaagctgggggctccccacctccttgctctccccggcctgccaagcccagccctccagagccagcccccctgggcaccggtgactagagcagccgggtgaagttctggagctctgcatcctgtggtctggctgcaggatggaggctctccttgaggaaggggaagcaggataccctcacgggccaccctgccagccagcagctggccctccacaatcttcacattccaggactggcctgaacccgccagtgtgggccacagtaggaggggctggtggtcctccctgtcccacgcctggtggctctgactgtttcctctcatgggtttgcttaacctgtggcagcaggttgctgctttccagggatgtgcccagtgccctgggttcttctggtcatcctggggctctgcacagagcagcagagcaagagccatgagacccacagactcagtgcctgagcgcagctccagagaagccccagccccttccaggtggggaacctgcttcctgccttcactgccccccgcagcactcacagatgtctcccggggcctggctc

SEQ ID NO: 4587 - DNA, 791 bp, Macaca Fascicularis
  misc_feature (1)...(791): n = A,T,C or G
agctcagttcnnnnnnnnctgaagaagtaagcactcnnnnnnnnnnnnnnnnnnnnnnnnnnnnnnnnnnnnnnnnnnnnnntcaatcttctttcaacttttnnnnnnnnnnnnnnnnnnnnnnnnnnnnnnnnnntactccttatcagnnnnnnnnntgcaatggatccagcaggacagctcagcccagagagttgatagcgccacccaagactgtcaaacccnnnnnnnnnnnnnnnnnnnnnnnnnnnnnnnnnnnnnnnnnnnnnnnnnnnnnnnnnnnnnnnnnnnnnnnnnnnnnnnnnnnaccccttannnnnnnnnnnnnnatcgcggagtcagccaatagcagtannnnnnnnnnnnnnnnnnnnnnnnnnnnnnnnnnnnnnnnnnnnnncgctctgcgggcccctccaaagcccaggccccctcctgagcaggccaagaagagtagcgaccctctgtctctcttccaggaactgagcctgggaagctcatctggcagcaatggcttttactcatattttaaataatcacnnnnnnnnnnnnnnnnnnnnnnnnnntttaatttctgtttgtatcagtagaattaaggtagttggacttcatctatagatgcacagttccctttgttttaatattaaatatgttctcacttaattgctttgctgctagacttgcaactaatttttttaaagtatattccattattttgcatttttgatgtgtcaaaactttgacagcttttatgtagaataaaaacaaatttttaaatttgtgtattgtta

SEQ ID NO: 4588 - DNA, 1758 bp, Macaca Fascicularis
gtgtttgcttcccttccaccatgatcataagtttcctgaggccttcccagccatgcagaactattccttttgcaataaaaacaacaccaggtgcctctcaaattcttgccaaaacaattctacatgcaaaggtttttcaaaagacaatgattgttcttgttcaggcacagccaataatgtggacaaagactgtgacaatgtgaaagacccttgcttctccaatccctgtcaaggaagtgccacttgtgtgaacaccccaggcgaaaggagctttctgtgcaaatgtcctcctgggtacagtgggacaatctgtgaaactaccattggtacctgtggcaagaactcctgccaacatggaggtatttgccatcaggaccctatttatcctgtctgcatctgccctgctggatatgctggaagattctgtgagatagatcacgatgagtgtgcttccagcccttgccaaaatggggctgtgtgccaggatggaattgatggctactcctgcttctgtgtcccaggatatcaaggcagacactgcgacttggaagtggatgaatgtgcttcagatccctgcaagaacgaggctacgtgcctcaatgaaataggaagatatacttgtatctgtccccgcgattattctggtataaactgtgaattggaaattgatgaatgttggtcccagccttgtttaaatggtgcaacctgtcaggatgctctgggggcctatttctgcgactgtgcccctggattcctaggggatcattgtgaactcaacattgatgagtgtgccagtcaaccttgtctccatggagggctgtgtgtggatggagaaaacagatatagctgtaactgcacgggtagtggattcacagggacacgctgtgagactctgatgcctctttgttggtcaaaaccttgtcataataatgctacatgtgaggacagtgttgacaattacacttgtcactgctggcctggatacacaggtgcccagtgtgagatcgatatcaatgaatgcaatagtaacccctgccagtctgatggggaatgtgtggagttgtcctcagagaaacaatatggacacatcactggactgccttctactttcagctaccatgaagcctcaggttatgtctgtatctgtcagcctggattcacagggccaatagagagaaaatagcaagagttggaggagactactcagaggcagtggcaggcatactgaacacctcaagagctcctagagctggcattcataataatcactttagaatttaatcacatggtcaaaactggctgcaagaaataatagtctatatcgtcttactattgccatcacgtgctcctctttaactctggagattccttacacaatgtaagaaggggagagtaaatatgggagaaaataagctgtctctattatgttgagtgttattggattctgcctttgaaatattttgagggatatgatattaagctctctcaagaaaatctgagagaatattttccctgctttattatcctagtaactgtcacttgttaatagttttatagttatcataaaaggcaattccatcgttatatctgtgtttttctatagcgatgaatattgcctactacggccgggcgcggtggctcaagcctgtaatcccagcactttgggaggccgagacgggcggatcacgaggtcaagagatcgagaccatcctggctaacacggtgaaaccccgtctctactaaaaaaaaaaaaaaaaa

SEQ ID NO: 4589 - DNA, 738 bp, Macaca Fascicularis
  misc_feature (1)...(738): n = A,T,C or G
aacatagttagannnnnnnnnnnacaaaaaatattaanntttagccaggcaagntnnnnaacacctgtagtcccagctactcgggaggctgagatggaggatcacttgagcctggggggtcaaggctgcactccagcctgggcaacaatgagaccctgtctcaaaattttaataaataaataaataaatgtctatcatttgagccatccactttgttatggaagccctagcaaatgaatacaccctctaaccaattcttccacttctctnnnnnnnnnnnnnnngccaccctgacacatccctatggtgnnnnnnnnnnnnnnnnnnnnnnnnnnnnnggggatggggtggctgtggggtgaatagaagtgtctgtggggacaaatgaacatctactccttcctgggacagctggatggagtggggggactttagaaactgttaacaggtcttagggaactggctctgcctcccttctgaggctgctgtaaggggaaatataaagtaggggcatgaaagcccttggcaagatgtgaagtgaggcagccttcgtgcatgcttggtcggttgtgtaccgccagctagttagtgtgcaatagtcctggtgcttcctctgcaacttctcctctgccatcagctgagctttcacgttctcagttcatgttctcgattgatgagtgttcatgttctcagttatactcttggaatatgattcaattcagaaattctcaatgtact

SEQ ID NO: 4590 - DNA, 720 bp, Macaca Fascicularis
atataagtaaatagatcttgaaataatgcattctaatgatcctgtcatatctgcacagctggagagaataacaagttttatttttaccacgttaacattttgtctcatgtgactttcatttacatttcagaagagttatgctattcaactgaatgccttacaattcttgatcacttgcaatatccatgatacttgttatcattatatatttcatatacatcattaaatgaaaaaaatctttataaaggtgatatgatattgataaataagaagtttctcaagaatatcattttgatcaaaattttagccgggcatggtggtgcacacctatggtcccagctactcaggaggccaaggtaggaggattgcttgagcccaggagcttgagactgcagtgagccaagatcacatcactgcactccaacctgggcaacagagcaagaccctgtctcaaaaaaatcattttgatggttcataaattaccattgtaaaactaaatcctctttttctgccatttaaaaaatacttattttttaactttaacattaacttaaaaaactagtgaaatccaaatgaaatttgtagttcagctagtagcaatctctcaatgttggtgccctagttttgacaaatgtaccctgctgatgttaggatgttagcgcttggggaaactgtactggagtatatgagaattccctgtattatctctgcacctcttct

SEQ ID NO: 4591 - DNA, 710 bp, Macaca Fascicularis
  misc_feature (1)...(710): n = A,T,C or G
ctacacactgacctgtccccagtgtttccaggtaatgnnnnnnnnctgcagaggaagtttcatgctgttgcgtgtggtggctccaagccaagcacctggcatgcaggtcagcccctcccagcagggcgtggtatcatcttcttctcagnnnnnnnnnnnnnnncccaaggtctcaccattttgtgnnnnnnnnnnnnnnnttttcttggtcatttataaagctgctttatagatatctttgatcctggcatgccttggtttcctctcccttccctctttccaatcctnnnnnnnnnncacctgttttagtaattctcaattcaaagtcccaagaatttggaatggtgggatgctgtgcggggagcnnnnnnnnnnnnnnnnnnnnnnnnnnnagttctgctcctcaggggacacgctcccnnnnnnnnnnnnnnnnnnnnnnnnnnnnnnnnngccccccgaatactgtctatagtgacacactgtaggtatcataaattttaagaaatctgcttttaagtactgtttataggtttttctgttacacttgcaacctagttttaaaatacatgaggattttatgaaagctttatacagacctttataggaaactcattctttgattttaggtgccatttaaattgataacacttactttataataaagatgctttttgtctggatacagccttatagtttaaaatatcttc

SEQ ID NO: 4592 - DNA, 3674 bp, Macaca Fascicularis
agggcggggtgtgagaagcagagtacactgagactagcattcactgctggccagtgcctgcgttttccaccacctctaatttcagcttcagcaagttgcttggaactttggttctggcagcagcagcaacatcattaccgctagcggcagttttgtgccgaggcacctacacacctccagtcgtctgtgccagatcgcgggcctgtctgtgtctgctcctacacgccggtcggcaggaccatgtctctggtaagccagaattcgcgccgccgccgccgccgcgttgcgaaggccactgcgcacaacagcagctgggacgaaatgcaggcccctaatgcccccggtttccccgctgatatgccaggctcagacgtcccccagggtcccagcgattcccagatccttcagggcctctgtgcctctgagggcccaagcacctccgttctgcccacctccgctgagggcccaagcacctttgtgccgcccaccatctctgaggcctcaagcgcctccgggcagcccaccgtctctgagggacctggcacctccctgctggccacccccagtgagggcctaagcacctccgggcctcccaccatctctaaggggctgtgcacctctgtgacgcttgccgcctctgagggccggaacacctccaggccgcccacttcctctgaggaaccgagcacctccgtgccggccacccctggtgagggaacgagcacctccgtgccgcccacagcctctgagggaccaagcacctccgtggtgcccacccctgatgagggaccgagcacctccgtgcagtccaccgctggtgagggaccgagcacccccgtgccgctcaccgccactgagggcctgagcacctccgtgccggacactcctgatgagggactgagcacctccgtgccgcccaccgccactgagggtctgagcacccccgtgccgcccacccctgatgagggaccgagcacctccatgccggccactcctggtgagggacggagcaccaccatgctgcccgccgcctctgacggacaaagcatctccttggtgcccacccccggtaagggatcaagcacctccgggccgcccaccgccaccgagggcctgagcacctccgtgcagcccactgctggtgagggaccgagtacctccgtgccgcccaccccttgtgggggactgagcacctccgtgccgcccacccctggcgagggactgagcacctctgtgcctcccaccgccactgagggcttgagcacctccgtgccgcccactcccggtgagggaccaagcacttccgtactgccgacccctggtgagggacggagcacctctgtgccgcccactgcctctgatggatcggacacctccgtgccgcccactcctggtgagggcccaagcaccttagtgcagcccactgcctctgacagaccgggaagctccgtgctgcccaaccctggtgagggcccgagcaccttgtttagctctagtgcttctgtggaccggaacccctccaagtgttccattgttttgccaagccctagggtaaccaaggcctccgtggactcggactctgagggtcctaagggtgcagaaggccctatagaattcgaggtcctgagagactgtgagagccccaactccattactattatgggcctcagtactccccgggttgcaattaccttgaagccccaggaccctatggaacagaatgtagctgagctgttgcagttcctgctggtgaaggatcagagcaagtaccctatccgggagtctgaaatgcgggaatatattgttaaagaatatcgcaaccagtttcctgagatactcaggcgagcagcagcccacctggagtgcatttttcggtttgaattgagagaacttgaccctgaggcacgtacctacattctgttaaacaaactgggacctgtgccctttgaagggttagaagagagcccaaatgggccaaagatgggcctcctgatgatgattctaggccaaatattcctgaatggcaaccaagccaaagaggctgagatttgtgaaatgctctggaggatgggggtgcagcgggaaaggaggctttccatttttgggaacccaaagagacttctgtctgtggagtttgtatggcagcgttacttagactacagaccagtaactgactgtaaaccagtggagtatgagtttttctggggcccaagatcccacctagaaaccaccaagatgaaaattctgaagttcatggctaaaatatataacaaagatcctatggattggccagagcaatacaatgaagctctggaagaagatgctgccagagcctttgctgagggttggcaggctctccctcactttaggaggcccttttttgaggaagctgctgcagaggtagcatcccctgattcagaggtttccagctattcctcaaaatatgccccacattcatggcctgagtcaagattggagagcaaggcaaggaagttggtgcagttatttctgcttatggattcaactaagctgcctataccaaaggaaggaattctgtactacattggccgagagtgcagcaaagtgttccctgacctcctgaatcgtgctgcccgcaccctgaaccatgtctatgggacagaactagtggtacttgatcccaggaatcactcctataccctgtacaaccgaagagagatggaagaaactgaggagatcgtagacagtccaaacaggcctggcaacaactttttgatgcaggtcctaagcttcatttttatcatgggcaaccatgccagggagtctgcagtctgggcctttctgcggggcttaggggttcaatctgggagaaagcacgtgattacctgccgatacttgagtcagcgctatatagacagtttacgggttcctgacagtgatccagtgcaatatgagtttgtatggggtcctagagcccgtctggaaacctccaagatgaaagccttgcgatatgtggccagaatccacagaaaggaaccacaggactggccacagcagtacagggaggcaatggaagatgaggccaatagagctgatgttgggcacaggcaattctttgttcacaacttcaggtagaggaatgcatggcagtcagaggggccttgcaagaaggggccttagagcctcaggtctcatgtattgggggatgggggcgggtacatactgtatttggtatttgtgttccagttatatttacgtcttttcatatttagttcttgtgtggtgtctggaagtgtttcaactgttttaatatattgcccgattgggtaaatgtgattgaccacttgctgtctctgttgtattttggtatgagttttgatagctctataaaatgttttgaaaatctttccatcttgttgcattatctagaagagaatatatagcatatagctatagatataggcttttccttaaaagcttaaaaaattcgccagtaaaataatctagcttaaagtgataaacaaacaaatatattgacaactgaaaaagcactctaaattgtggctggcttccctttctgtgtgctattatataaagaatactgatgtttacctgtatttgctttgctgtactaaagtgtaatgaacaataaaagattaataaatgaaacataaggctaaaaaaaaaaaaaaaaa

SEQ ID NO: 4593 - DNA, 711 bp, Macaca Fascicularis
  misc_feature (1)...(711): n = A,T,C or G
tgtgaactctnnncgtgaaaagatgctacaagtccaggatcgctgcaccactcctgtaattaggtgatgattggttttgacaacttagtcccctcaaacaagtaagataccccctccaacagcaaattcagtgacttaattggaaaacacacaagctggcatgatgtccggtgatttctctaagaaatgcctgtgggagaaggtgtgtgaagtgtggagggcagtgtagacgctgcacagcatctgcagatttgcaaccccttctccgccggtgcctccgtgttcagttctgtgacccaaaaacaaagaccaaagaaggccagtctctcattcgaccctatctttttaatctgcctgttttaaaaattgcgtctgtagtagccgcttgctgtgaggacacatctcgacagtccaagtgattctgnnnnnnnnnnntcgggccctgttttccgctcttataagaaaaaaacaaaaagaccgtcagnnnnnnnnnnnnnnnnnnnnnnttgttactgtgagttggcaacatgcctgactttatgatagcattaaatgttttatatttttgtttattgtatattatgtgtggttttatttggtatttatttgtgttttgaggtcttgcaatgtttttgtgtttctgatgctaataactaaagtttgtaagnctgtagaatgcaaaccngcaagacctcaaaacacaaataaacc

SEQ ID NO: 4594 - DNA, 705 bp, Macaca Fascicularis
  misc_feature (1)...(705): n = A,T,C or G
cngccactggactnnnnngcnnnnnnnnnnnnnnnnnnnnnnnnnnnngtggcaaccaacgccgggggcctnnnnnnnnnnnnnnnnnnnnnnnnnnnnnnnnnnnnnnnnnnnnnnnnnnnnnnnnnnnnnnnnnnnnnnnncctggactgcctgacctccctgaggaaggnnnnnnnnnnnnnnnnnnnnnnnnnnnnnnncatcgggtcggagggcactttgggggtnnnnnnnnnnnnnnnnnnnnnnnnnnnncccaagccnnnnnnnnnnnnnnnnnnnnnnnnnnnnnnnnnnnnnnnnnnnnnnnnnnnnnnnnnnnnnnnnnnnnnnnnnnnnntgctgggcgagnnnnnnnnnnnnnnnnnnnnnnnnnntgctgtgtgcatgcaactnnnnnnnnnnnnnnnnnnnnnnnnnnnnnnnnnnnnnnnnnnnnnnnnnnnnnnnntcatcgagacttcaggctccaacgcaggccatnnnnnnnnnnnnnnnnnnnnnntcctggagcacgcactgggctctggcctggtgaccgacgggaccatggccaccgaccagacgaaagnnnnnnngccccatgttctgctcgcaggtcccctctctgtccgtcaagtccagccttgtctcgggatgcctagaagggtcattggtgcagcctaaacagtgtggggtatggctgaaatgtgactcggtttc

SEQ ID NO: 4595 - DNA, 698 bp, Macaca Fascicularis
  misc_feature (1)...(698): n = A,T,C or G
aaactnnnnnnaagcaaatagagccatctgggannnnnnnnnnnnnnnnnnnnnnnnnnnnnnnnnnnnnnnnnnnnnnnnnnnnnnnnnnnnncccctggctaccctgttttcatctacctcaagacccctatcgtggggctctaccctgtgacaagagccaaacccattctccatggcctatggaagcctcactggagtttggagcctgctgcgatggggatgagatgttttttttatagaattatacttacattccttggatgatctctagttgatttctgaagttctgagttgatgctgttaaggtacctggggtagccagtggttcttggatctgtgttagaatgagtgctttcccttcatactgatgagattgtggattaggaattcttgacctaagtgatttttggccagtggttgggtttaacattctattaaaatttgtagtttgggcnnnnnnnnnnnnnnnnnnnnnnnnnnnnnnnnnnnnnnnnnnnnnnnnnnnnnnnnnnnnnnnnnnnnnnnnnnnnnnnnnnnnnnnnnnnnnnnnnnnnnnnnnnnnnnnnnnnnnnnnnnnnnnnnnnnnnnnnnnnnnnnnnnnnnnnnnnnnnnnnnnnnnnnnnnnnnnnnnnnnnnnnnnnnnnnnnnnnnnnnnnnnnnnnnnnnnnngttgtaatgagccaagatcgtgccac

SEQ ID NO: 4596 - DNA, 727 bp, Macaca Fascicularis
  misc_feature (1)...(727): n = A,T,C or G
tcagaggtattaggccntnnnaatacgccatccgaattcgatgtgagaaagaggaggacacagcctgttgggaaagcccaacctggctctggaagagtcctcgcaagcccaacggccggtccctccagcctgcctggccgggactaccccttcacagaaccgcaggcctctcccagggagcaatgaccaatggctgcgcctccactctgggataggcctgggggacggtggctctcctgctggtcctctgtgtgtggtctggtgtcagtgccctatagaatagatccatgcggtgttgcttcatgtacaacccctcactgtgcatgtcggcttcctgctggggggaactgatgggagtggaccaggcacccctgctcctgtctggacagctgcacaccacagggcggcacccctccccagtcctacccttccctgtgtgtgtgtgcacatggtgactggagctggcatcccacacatcagcctctttctcaagcacatcactgcacggtcccaccaccttccctcacctcttgccttttcacattagagcgtgttctggtaaaggccaatacgttcataaaggtaagtgcataggaggccaggcagaagaaacgagacctcactcacaaaagacaaaactgctggaggggaagtcaggacatctgggttctagtcctcaattctgttggaaacttcctgcatgattttagataaaccacctaatccc

SEQ ID NO: 4597 - DNA, 176 bp, Macaca Fascicularis
ctctctagcaccagcccacccgagaggacccggtacagccccatcccgcccagccaccaccagttgactctccccgacccgccccaccacggtctccacagcactcctgacagccccgtcaaaccagagaagaatgggtatgacaaagaccaccccaagattgacaagatctttga

SEQ ID NO: 4598 - DNA, 693 bp, Macaca Fascicularis
  misc_feature (1)...(693): n = A,T,C or G
aannnnnnnnnnnnnntcctgactctatgatgttagtgagaacacaaagagatgcccgggggannnnnnnnnnnnnnnggtcagatcaagaaaggtatgagaggcacaaccttggagggtaccaatgtttcagaagaggaaaaaacaagggtaaaggcaagaagtgggtgtcactgaaactcaataaatagcaaaatgaatcccctagcctttgtcctcacctaccctaaggcaagtgtgtatgctttaattccttccatatggctgtgagcaacttgggttggagacatatctaaatctttttatttccactcgctatatatagtagatgctcactgtatatttgtggcattgaacggaggaccacaaggtagggtgcaggcgactcaacggctatacatgactaggaggagcttatgtggggtggatttcagcaccttggacaggagcagaggtgtggtggggttggactctcttctggagacccagacaattcagtctccagnnnnnnnnnnnnnnnngtcttttgagggccccagccacaaaggccacatacctctgataggagttgcctacatcaggctttgtgtgacttgcacactcagcttcccacccttacccacttcccttgttgcacatagcttatgatttagaggctttcctggaagcaaagatagtcacatctggcataat

SEQ ID NO: 4599 - DNA, 740 bp, Macaca Fascicularis
atgtaaatatatcatgaataattatacaaattcaccataatgtagaatcagtgggagccctgggcttgtcttcctgcaactagactgtcctgtctgagggtgatgggagacagtgatggataatcaggccttagattctcataaggagggcacagcgtagataccttgcatgcacggttcacaatagcgttcacactcctacgaaaaccaaatgccgctgctgatctgacaggatgcacagctcacgtagtaatgctcactagtccaccactatgtggcccagttcctaacaggtcatggcccagtactgtctttgtgtgtgtgtgtgtgtggagttgggggtgggtaattattttattttactttttaaatttaaagtgtttaatattaaatgaacatggccacattaaaaacattgaaaactaaaggaaacaaaggtactaaatgctaacatcatgacttctactttaatgtatctcttttgacataatgtatattcaaataaatatatactatatatgcagtgttatcactcaacagtgtattataagcatttatgtgttatcacaaaaccttcataactactgttttaatagctgcatcatattctattggttaaatatagcaaaacttacttaaataatctcctatggaatatataggtatgtggtctgagggttggggacctgtggtttgggcaatgcaagactgtctttcttgccctcttcagtgcatttttc

SEQ ID NO: 4600 - DNA, 527 bp, Macaca Fascicularis
agcccacccaccacgggccttgactggcagctcctccacgtccatgcccagcagaccgaggtgttccggcagttctgccaggagctggtgaccgtgcaccaggacatggccaacagcatgcacgtcatcggccaggccatggccgagctgaccagccgcgttggtcagatgtgccagacgctgacagagatccgggatggggttcaggcatctcagcgggggccagaaggggcagctcctatgggctgcactccccaggccacccaggcccaagcccccctgccagagcccccggcagcttccccagcatcagcccccacacggactaccaggtctcggaagagaaagcacaatttctaacccagctagtctacactaggaggaagagccatggaggagggatgtctggcctcacaacaggggccagtctgtcgtgtccaggaacaggatcgatgacccttgtaggacactgggggcgctgtcacctcctcacccagcgcaggttgctgcctgtgctctaacagagc

SEQ ID NO: 4601 - DNA, 649 bp, Macaca Fascicularis
  misc_feature (1)...(649): n = A,T,C or G
ccaggaggtggaggtngttgagccgagatcgtgccattccactccagcctgggtaagaagagtgaaactctcaaaaaaaaaaaaaagaaaaaaaaaaaannnnnnnnnnnnnnnntaatggaacgtaatttgtagatgcaccaaatgtgaagaaatatttaggctaaaattaagactgtacatcagaggatttacagtaaaaaaaactaaggaactaatacttcagactttaaaataaatcagagtattaagtataacagaagttgaacctgttagaaaatttctttgcatataagttaaaagtaggtttttgaagagattatattcaaagtatattttttcacttaaaagtataaattttttgaaaagcaaataattgaactctgaaattatgctatttcaacattctcatttatgtgaaagcatgtgatgaactgtcgctgcactggagatatgggaaattcctttgcatcnnnnnnnnnnnnnnnnnnnnnnnnnnnnnnagagaagaaaaatgaaagaagcgtgaggaaaatcttagcagagaggcttttagttgttgacttattgagtgatgcatgaagtaggtgttcagagtaatactttgcattatagtgagagaaaatctgaattttagtagtaaattgtt

SEQ ID NO: 4602 - DNA, 676 bp, Macaca Fascicularis
ggagcagagcttttttgggtttccgtttggtttttttgtttgtttgttttatactttaagttctagggtacatgtgagcaatgtgcaagtttgttacatatatacacatgtgccatgttggtttgctgcacgcatcaactcatcatttacattaggtatttctctaatgctatccctcccctagtcccccacccccactcagttcccagtgtgtgatgttccccaccctgtgtccaggtgttctcattgttcaactcccatctatgagtgagaacatacggtgtttggttttctgtccttgtgatagtttgctgagaatgaaggtttccagctttatccatgtccctgcaaaggacatgagctcatccttttttatggctgcgtagtattccatggtggagatgtgccaagggagcagagtttttaaggacaacttggtgggtggggagaagccaggagccaggggtgctgactggtcagcgatgaagtcactgggagtcaaagccatcttctcgtgctgagtcagttcctgggtaggggccacaagatcagatgagccagttgattgatctgtgtggtgccacctgatccgtcaagtgcagggagggtcggaatcttgtaaatgacccccggccacgtgactcctaaaccataatttctaacctcgtggctaatg

SEQ ID NO: 4603 - DNA, 666 bp, Macaca Fascicularis
  misc_feature (1)...(666): n = A,T,C or G
cttttctatgcaaagnnnnnaaagcactcagaatctgtgaattttctggnnggaaaaacaatgttctccttttccaaattggaataaagactcagaattacccattcttcataatgatgtctgattggtacatgcactccaggaagtcnnnnnnnnnnnnnnnnnnnnnnnnnnnnnnnnnnnnnnnaactggctcatcttctgacccaaactcaaaacatatgagtacnnnnnnnnnnnnnnnnnnnnnnnnnnnnnnnnnnnnnnnnnnnnnnnnnnnnnnnnnnnnnnnnnnnaggtgcgtgggggtgttctttcaagtgattcacatctcaaacccataccactctcaacttttatttgatgtgttcaaagccaaaaaataaaataaaataaagcagggctgaacacttaatttgacatgaagatgaaggagtgagcaagccagaggagagaggttgaatgaagcatagccttggcttcataccacactttttgtgccttgtattatcaatgtaaattctgaatgttgtacagtaaatacttggatggactnnntagaaaagnnnnnnnnnnnnnnnnnnnnnnnnnnnnnnnnnnnnnnnnnnnnnnnnnnnnnnnnnnnntggtaatgccaannnngctgtgttatattgtatgaacaaa

SEQ ID NO: 4604 - DNA, 214 bp, Macaca Fascicularis
aaaaaaaaaaaaagattggtagcttctgcttttgtgaacaagagtcccgattggtacacaaggtgtttttaaggtgatgtgggtcacgttgacaagcagaggctggcattgaggctgacccccaacacggtacatttcagatgccttgacaggcatcagcatgtggatgtgccccctttaaagagcagtcgtggaagaggcaggaggaagagta

SEQ ID NO: 4605 - DNA, 774 bp, Macaca Fascicularis
  misc_feature (1)...(774): n = A,T,C or G
acagaggntnnngcnnnnngggcagagannnacaggcagatgccaagtttcggagagttccccggattttggtttgtggaaggatttccttggcaaaagaagtctttggagaaactttgaatgaaagcagagaccctgatcgagccccagaaagatacacctccagattttatctcaaattcaagcacctggaaagggcttttgatatgttgtcagagtgtggattccacatggtggcctgtaactcatcggtgacagcatctttcatcaaccaatatacagatgacaagatctggtcaagctacactgaatatgtcttctaccgtgagccttccagatggtcaccctcacactgcgattgctgctgcaagaatggcaagggtgacaaagaaggggagagtggcacgtcttgcaatgacctctccacatccagctgcgacagccagtctgaggccagctctccccaggagacggtcatctgtggtcccgtgacacgccagaccaatatccagactctggaccgtcccatcaagaagggccctgtccagctgatccaacagtcagagatgcggcggaaaagcgacttactccggactctgacttcaggctcnnnnnnnnnnnnnnngagcagcaaaaaaaaagctgttaaagaaaagctgtcaattgaggaggagctggagaaatgtatccaggatttcctaaaaatcaaaattccagatcggtttcccgagagaaaacatccttggcaatctgaacttttacggaagtatcatc

SEQ ID NO: 4606 - DNA, 1331 bp, Macaca Fascicularis
  misc_feature (1)...(1331): n = A,T,C or G
atcattataatactgtttaaaatgtgaggcaataagaattactttatgttggatcnnnngannnnnnnnnnnnnnnntttcatgtaaatgaaannnnnnnnnctcttctaaaatagcaataactgaaaatgaaagtgttaattttaccttgtttgagtnnnnnnnnnnnnnnnnnnnatcaaaacattttataaatgatatcaaagaagagtcaacattgatccagtaattttattttgtaacattgagggataattggttattgaacagaatagtttaggagactttacaaacctttatttcaactttcttatttggaaatagtatcatttataaagggacacttttatgtttttcccttttctatgttggttaatataacacaaagagatatttaggaaaatgcttattgatgaggtttattctatctgtttttaaagcacagaggttgcattctagataacctttattattttattagcatggcatatttttaatcattatttgagactgtcctttgcctgattattttagctgaattcagggagattggtggggcaggaaagcatgcattgaaaaatgtctaaccacggttatttaagcataatctgaaaacatctagcccaaaggtaagttgctattttcatcacagttgcctatgcccagggaataagatgtattttttataattgaattggtttttcccgcttcaaactggaaacaaaacagaaggggtgccataaatttgaataaacagaacatactgttctcaacatactgtaatcaaaaggaggaatttcagtgggtctctgtgtgtgtatgagagagagagtgtgcgtttgtgtgtttcaaggtcagaatagannnttttttgtgtgtgtgtgtttgtttttttttttttttaagnnnnnnnnnnnnnnnnnnnnnnnnnnnnnnnnnnnnnnnnnnnnnnnnnnnnnnnnnnnnnnnnnnnnnnnnnnnnnnnnnnnnnnnnnnnnnnnnnnnnnnnnnnnnnnnnnnnnnnnnnnnnnnnnnnnnnnnnnnnnnnnnnnnnnnnnnnnnnnnnnnnnnnnnnnnnnnnnnnnnnnnnnnnnnnnnnnnnnnnnnnnnnnnnnnnctgacctctggtgatccgcccacctcggccttgtgaagtgctggggttaccggcgtcagccaccgtgcctggccagaataggtttttttctttcaacttagtcagtagaaaatggacatcaagtttgaacagataaagcatggacagccttattgtgattgaaactgcttgtaggttctgtgccaattttccaccactgtgtactttgttgcta

SEQ ID NO: 4607 - DNA, 146 bp, Macaca Fascicularis
  misc_feature (1)...(146): n = A,T,C or G
atatcagatttnnntngttaccacgannnnnnnnnnnnnnnnnnnnnnnnnngattagaagcgtctgcacagaagctggtatgtttgccatcagagcacggcgaaaannnnnnnnnnnnnnnnnnnnnnnnnnnnnngtaaataag

SEQ ID NO: 4608 - DNA, 643 bp, Macaca Fascicularis
  misc_feature (1)...(643): n = A,T,C or G
cnnnnnntcccgccgcccgtcccgcagtggcccgcggagtcacctctcaggctgtagcgcgcctgcatnnnnnnnnnnnnnnnnnnnccggtgcccgtgcggtcgtccttcctgacgccgcagcggaggatgtgctcgatctgccccaggtacagcagttctccgtgcggcggccgtggctcggcgtcccgctcctgtgaggcgggctgcaagggcgggcgcggcagctctgagccggcgacgggcatggcgcggcgggacagaggcaggcgaagtggcacggcgagcggcgggactgaggaagacgaagtggcgcggcgggacggaggcaggcgaagtggtgcagtggcagtaccccttccgcgcgcttttttcccgccgccgtcccgcgctccgcctcttcctgctcagcgggatccaagcggccccagctctggagcgcgtgcgccagggggaaacgcaggagccacaggtgtggctcggaacggagccctgggtaacagctgagagtcttcggaaacccgggaacctggatgcaggtgcggtggcccggagggactgctcccctggggaaccgtctggtccaccgcgccttctctaagccagnnncacagttcccacgttttcctgcggtcttatcaac

SEQ ID NO: 4609 - DNA, 400 bp, Macaca Fascicularis
agaaaaaagcttttgaaagtcctgtgggagacggtgtctgtggacaacacggagctaagatttgttcccacagggcctcagatcacagcggtagcagctgggtcttccgaaggtggacgctgcaggacggaaacacacaggctttccccagactccctgtaggcagacgccacacgacgtgaaaaggcggggtcctcccgcgctggcaccaacgcaccgggttcctcccccgccgcccgacgatgccccgtcccctggccccaaaacacaccaggttcctccctcctcgcccgatggcgccatctttacctccttctccctgctcgctgtcatctggggctgagatcctttctttttaatctacttttgctatgatgcatttaataaaaagaaaaagagg

SEQ ID NO: 4610 - DNA, 1802 bp, Macaca Fascicularis
taactggtgcaggcctgcaggatttggtttcagcatgtccttctctgaatgatgaatacttttactactgtgacaacattaacggtaatgccttttaacaatacaataattttgaaggaattaaacttttttagcagttctaataatttttccatttagttttctagattgctaattaccagactgccttactttcagatttagttaaatttgataaaattttaaaattacattttcattaatatcttgaaaggtaagtttttcttgcagatgtatattctaaatatccattgtgtcagacttttgaggcatgtaatagtgtaatcaaaaatggtaacttaatggaagtactaaaattcttgtttaaaagttttggatattcctctagagttctgtagcgctcattaagaatttagaactatttatgttctagatatactgctttcttagggatgatagactcatttttcttgtaagatggctttatcaaatgtagaaaaatgaggactttagtaatgtggacttctagagtttctggatctgatgtcaactcttactgaagattgaagggagttgtagtattgagaagaggctgagatgctttagacatgattaggattcctatagtgttttggaaattgattcctggacctactttcaaaaatcacaagaaatatttcttgattttgttcttttaaacatattctaccctacagtgggcttattgaacatgctttttcaaagtatgttcaatgcctttttgcacatttgatagtcactgatagagattgaatttcccagaagcagaagaagctgctcttctgttattaataagcaaatcaacctcctgtatttataactggagaaaattttaaatggctcagactactgtgtacctgtctttttatactacgccctattgtctttgagtgcccaattcaccttaagtgacaggaaaatcaacaaaatttttctcaggcagaacaattgacaggagtcaggaagaccagagggagtaatgacataccagaaagtggagaaatgaacaaatctgctatttctcgagattagattttccttaaaatatgtaagaggaaactgaagattgcagctctcttatttctggaatcacattgttatacaggagatgacctcccatgttcttgatatatcaacactaagttggacatttcttgttttctgttgccttctgtgtataatcaagggatggccaaagggaatgtcatcgtagttggttaaagtgaatgtcactgtagttgcaacatgctaagcctatgaaaacagtgtgattgatgcagtgaagctgttacttttgtggatgctctggatttgagacaggagttttgttttgttaacataaagttatttcattgtaggtttagtgctatactttctaaggcttataggacatattatcaagagtaattaataagcaattttttttatcagaaaattttatttgtatgttgcacttgaatttttcatactgatttcagcataggttatgcttcggaataaatctcactatcaaattcattatttatttttgggtacatagatgttactgggtagagggaggggactgggtttcagattgtttttatgcttacttgttttatgtttatatgtttttaaactttgaaaaaatttagatgatgggataaaatgaaatacttaaaatcttttgcactttgtccttatgcatttcctctaaactcgttttgaatatgtagtttcagaggagctactatattcctattgtcgaaaaaaaaaaaaaaaaa

SEQ ID NO: 4611 - DNA, 757 bp, Macaca Fascicularis
  misc_feature (1)...(757): n = A,T,C or G
ccacggaagcagaagtggacagtcggcctatatccaggcaaggtgcgggaagcacagtgccaggcgtcagnnnnnnnnnnnnnnnnnnnnnnnnnnnnnnnnnnnnnnnnnnnnnnntggaaccttaagtacctgaaggtgagggaggtgaagtatgaggtgtggctgcaggagcagggggagaacacnnnnnnnnnnnnnnncctggccctgcagaaccacaccttcactgagaacatcaagcccttcaccacctacctggtgtgggtccgctgcatcttcaacaagatcctcctgggaccctttgcagatgtgctggtgtgcagcacgtagcgagcgggccacagcccgctnnnnnnnnnnnnnnnnnnnnnnnnnnnnnnnnnnnnnnnnnnnnnnnnnnnnnnnnnnnnnnnnnnnnnnnnnnnnnnncccaggcctgtaccnnnnnnnnnnnnnnnngccccgggggtgtggtgtcacagnnnnnnnnnnnnnnnnnnnnnnnnnnnnnccgacttccccttctcccatcctgaacatttgtaccccnnnnnnnnnnnnnnnnnnnnnnggaggaagaggagaggaggaaggaaagaaagaatcacaaggaacctctggctnnnnnnnnnnnnnnnnnnnnnnnnngtttttctggtannnnnnnttctggaaaccgagtaatcatgtactgtttgattgggtggttcatctgcttccatcccagtgaaatttacctgtagcccagttaagg

SEQ ID NO: 4612 - DNA, 2027 bp, Macaca Fascicularis
gtgctgcctatggcggcgctggagagggggcgctgagctgttgggtatgaagtgtaacagaacagactttaccacctgaaactgctgcttcaagttcagatcaggcaaggaacaaacctcgtaacaactaacaagaccaaagaagagtacacttaagttgaagacacaacacttgatctgaaacaagaagtttgtgcctactcaacagctttgaaagagcacttcccaacgctgctagtagtctttgttttcttcagtgctgtactgtgagattgcccggtacagcagcagttgtattctttattagcttggtagatcattttctctcgctctttttttttaatactagcaactttcatcctttgaaacgtgtgctgaaaagaagaatcagcaaatactactgaaagtgcaatattcgattatcactgcgagatgagctttgatccaaaccttctccacaacaatggacataatgggtaccctaatggtacttcagcagcactgcgtgaaactggggttattgaaaaactgttaacctcttacggatttattcagtgttcagaacgtcaagctagacttttcttccactgttcacagtataatggcaacctgcaagacttaaaagtaggagatgatgttgaatttgaagtatcatcggaccggcggactgggaaacccattgctgttaaactggtgaagataaaacaagaaatcctccctgaagaacgaatgaatggacaagaagtgttttatctgacttacacccctgaagatgtcgaagggaatgttcagctggaaactggagataaaataaactttgtaattgataacaataaacatactggtgctgtaagtgctcgcaacattatgctgttgaaaaagaaacaagcccgctgtcagggagtagtttgtgccatgaaggaggcatttggctttattgaaagaggtgatgttgtaaaagagatattctttcactatagtgaatttaagggtgacttagaaaccttacagcctggtgatgatgtggaattcacaatcaaggacagaaatggtaaagaagttgcaacagatgtcagactattgcctcaaggaacagtcatttttgaagatatcagcattgaacattttgaaggaactgtaaccaaagttatcccaaaagtacccagtaaaaaccagaatgacccattgccaggacgcatcaaagttgactttgtgatccctaaagaacttccctttggagacaaagatacgaaatccaaggtgaccctgctggaaggtgaccatgttaggtttaatatttcaacagaccgacgtgacaaattagaacgagcaaccaatatagaagttctgtcaaatacatttcagttcactaatgaagcccgagaaatgggtgtgattgctgccatgagagatggttttggtttcatcaaatgtgtggatcgtgatgttcgtatgttcttccacttcagtgaaattctggatgggaaccagctccatattgcagatgaagtagagtttactgtggttcctgatatgctctctgctcaaagaaatcatgctattaggattaagaaacttcccaagggcacggtttcgtttcattcccattcagatcaccgttttctgggcacggtagaaaaagaagccactttttccaaccctaaaaccactagcccaaataaaggcaaagagaaggaggctgaggatggcattattgcttatgatgactgtggggtgaaactgactattgcttttcaagccaaggatgtggaaggatctacttctcctcaaataggagataaggttgaatttagtattagtgacaaacagaggcctggacagcaggttgcaacttgtgtgcgacttttaggtcgtaattctaactcaaagaggccgtttatctttgtaaacacaaaacatttttgctttctccagttttctgttaatggcgaaagaatggaagcgaataaagttttactgatttttgaaaaaaaaaaaaaaaaaaaaaaaaaaaaaaaaaaaaaaaa

SEQ ID NO: 4613 - DNA, 960 bp, Macaca Fascicularis
  misc_feature (1)...(960): n = A,T,C or G
cccccgcagtgctnntacaaannnnngagatcggggctcccggaaatccaaggactgcaagtacccccagaagccannnnnnnnnnnnnnnnnnagttcatcccgttcccgaagcaggtcacgggagcgggtggataatccaggaaaatacaagaagaaaagtcattactacagagatcagcgacgggagcgctcgaggtcatacgaacgcacaggccgtcgctatgagcgggaccaccctgggcacagcaggcatcggaggtgaggtggggttgcagtgactggaggccgcaggcccttccctggggggttcctgatggctgccctttgacccccggtggctgccctttgacccccgggtgtgctccctcagcgcaggtgaccctagagcaggattctttttggaaatgtatgttgagtggaccttggtggatttggaaatggaactgagggaccggtgacatgtgcttcagaccggtctggggtgcggcacacacctgggcccgtgtagggcccggctcggcggcagctctgaggccaactcgatgaaaaagtgaacgcacacgcccctgttggcgtggcctggnnnnnnnnnnnnnnnnnnnnngccgctctccacnnnnnnnnnnnnnnnnacgtgaagccaagaaagatgatttttagnnnnnnnnncctatattaggttgtacttatgtacatattttgcagtgtttcacaagagaaaatggccttaattgccccttattctctctacacgttgtaaataaacatgtgtttaatacaagttaaagctatatatgaaaactcagaacttgaatcctgtcagcttnnnnnnnnnnnnnggaatcctgacnnnnnnnnnnnnnnnnnntttggatctgtgttgaaagtcgtatatttttatctgtgcagtgctgagtgcaggccaccagctcctaaatagaggttccctatatgcgc

SEQ ID NO: 4614 - DNA, 568 bp, Macaca Fascicularis
tgatactgggaggttcagttcgttcatcattgacaggaggattacatccaatgtaggcaatcatgtattacagacgctgaatataatgatatcaaagggtacagagaaacaaaaatgttttatgatgcatggaaaaaaaccatgttgatacagctggttattcagggtcacccagcagtcctccagcaaggtagaaacaccaaatcaatgagtttaagctagaagttttcacgtggctactgggccattgtggaagtagactggttgaaatattcttagtatgacataatatttgtttgaccctcatcctgtgaaagcattatctgtcccaaacagtatatgccttttatcagggatacattcaatataaatgtttaaccacaagaaagttgtttttataatgaaattataacagggatttacaagagggaattataagagggatcatgaaagggaattacttttgagcaggggaagccatttgggagtgattcaagatactcgaacatgatatatacaattatgatttctaagtcaaaagtaatattaagaacaaaaaaagagttaa

SEQ ID NO: 4615 - DNA, 680 bp, Macaca Fascicularis
  misc_feature (1)...(680): n = A,T,C or G
tcctgttgctgcatattgattaaatggnnnnntnntttcttccctctggttaaatgaatggctaatgtgtcattcctgagtgcacaacttgcagcaattggccattagttatcattcgtagtactgagtaatattctgagacttgtggtgcataatcttatactactgtcagtaaatatcttttttagtcttaaaactcttgattatattttgtctttaactgagttgtcaactcatagctcttgagaattacctattagtaatctcttatgaatgggtcttcagaatatgagggttatatacatatgaggattatatacaaacctttggaactatgaaggaggaattttaaacttatttgaatgaactcagtaagctatattttagcatctgtattttattaaaaagtaaccctgttgctgctttaccagtttgatcacaagtttatgtctttaaagtttgtaaaacagatatacccatagtaactctactggatgataacttctactcgtggaaagctgttcattgcatttatagaaattaagtggcccttacactggcccttattcattccatataagtacctttgtgcctctggggctgagcacaaactgtaatagttgtctttgagtccnnnatatttgtgaaagctgagaaaccctctaattttagtatactga

SEQ ID NO: 4616 - DNA, 634 bp, Macaca Fascicularis
  misc_feature (1)...(634): n = A,T,C or G
agagggctgncnnnaacgtgagaagggtaccagcagcattccacacccagctcttccttgccttcctcnnnagtttttttttttttttttttaacttaaaaaggaaaatgggtggtggggggagaaactagaacagaagatgtgcaatagggnngagagcagccccaggaagtgggccgtgtctatggggagcaggggcctgccgagcccacctgctattgttctggatgaggctgggcctgccnnnnnnnnnnnngcctcatcccccagcgtgggcctgtggtgctcgtggctgaggctccacgagggtgcaagtgccctgccaggatctaaggcctgaagaagtcggtgatatggggggcactgcagagcnnnnnnnnnnnnnnnnnnttatattgtagccaggggaccctggnnnnnnnnnnnnnnnnnnnnnnnnnnnnnnnnnnataccctgcccctggatgggaaaggcagggtcagggcccactgagagccatgcagagtttcccanntgagcactggaagtgtgaggtcacacgagcagcgtgggaagaagactctgtcaagactctcagaagaatctggagtaattgtgcctgaagctnnngcgtnnnnnnnnnntccccccacc

SEQ ID NO: 4617 - DNA, 624 bp, Macaca Fascicularis
  misc_feature (1)...(624): n = A,T,C or G
tgaggaggcaaagccaatnnccagctccannccggcccccgcgcaccaccccctcagaaggctggtgacatctnnnnnnnnnnnnnnnnnnnctcttcctaggagttttatcctccccctccctataaaaattttgcctggggctccaaagtggggctcatgtgtcggtttctttgtgaagtttcatggctcttgcattgtaatggtcttgacatgaaattttctggaagcctcctgattctcgccatcttaactgctatgattgaaaaccttttctagatgtagtcaaatttccttagtccatttgattaatttactctaaaattaattattgcatgccctccatgtagcaggtccattataattcactaaaatagtnnnnnnnnnnnnnnnnnnnnnnnnnnnnnnnnnnnnnnnnnnnnnnnnnnnnnnnnnnnnnnnngcggatgacctgaggtcagnnnnnnnnnnnnnnnnnnnnnnnnnnnnnnnnnnnnnnnnnnnnnnnnnnnnnnnnnnnnnnnnnnnnnnnnnnnnnnnnnnnnnnnnnnnnnnnnnnnnnnnnnnnnnnnnnnnnnnnnnnnnnnnnnnnnnnnnnnnnnnnnnnnnnnnnnnnnnnnnnnt

SEQ ID NO: 4618 - DNA, 732 bp, Macaca Fascicularis
  misc_feature (1)...(732): n = A,T,C or G
cagaggtgnnnngtggcagctgcttcaggtatgagtcctgggaccacatggcttgagtgacccnnnnnnnnnnnnnnnnnnnnnnnnnnnnnnnnctgagccacccattgcaggagaggacatccacgcaggcctggataagccagattgccttactaaggatttcctccgtatctgactgcaactcagcactcagctgcatgtgggacaggcgagcctgcaggagcaggttggccttgatgtgtggatcattgaacttagggttattcagcttgtgggggaccttctgagcnnnnnnnnnnnnnnnnnnnnnnncatggtgctggatgggaatgttctcgtaccctgctgcattggagatgatctcaataagccctcgannnnnnnnnnnnnnnnnnngtatatttccaggaagaggaagatcaaaacgttgtgctggaaactacctctgaaggctataccttccaagttcaggatgggctcctgggacctttaccttttagatcacgtagctgaggcatacatttgttgtgtaccgcgtttggtattttgtcttattgtttctctactaagaactctttttaaattgtggtttgttattgtagcactttttacactgaaactatacnnnnnnnnnnnnnnntgtacatactgtatgaagcttgtcctctgactaggtttcttatttctatgtggaatttcatatcttgcagcatcctgtaaataacataa

SEQ ID NO: 4619 - DNA, 756 bp, Macaca Fascicularis
  misc_feature (1)...(756): n = A,T,C or G
annnnnnnnnnnnnnnnnnggtgggctgcgagggcctgcattcccaacatcccattacatgtttcccactccagaaagtctccaggtttattccagctttttatcttgatgtgtcccatccacccccatagtttggttggttttgttttgtttgtttttttaatcaagaaagnnnnnnnnnnnnnnnagaggtcggaaattttttaacctagcagaagtacagagtcatatattttgctacgaatattgttgtagtacagaaaacccactttgcctgttagtgtgtggatagtatgtgtgtgtccgnnnnnnnnnnnnnnnnnntgttgaaccagacatagggttcgtttttgaaaggttaaaccacaccgcttcaggaacttgctccaaatactacttggttatcccttcctttaccagttagagctaaagagtgtgatgtgtgaacacactgggttgggattttctgnnnnnnnnnnnnnnnnnnnnnnnnnnnnnnnnnnntacagaagcaagatttcatcctacttagtgatttgaatcannnnnnnnnnnnnnncaatctctctttaattctctctggccctgcccacactctatatttgaaaatattgtttttnnnnnntccagagcttcacccctctacttacatattgtaaagttgtataaatctatcaatgaaaggtcccctctgccaccagtggcgccaccctttggtttgctgtggtactttgctgtgtactctgtggcatcatg

SEQ ID NO: 4620 - DNA, 720 bp, Macaca Fascicularis
  misc_feature (1)...(720): n = A,T,C or G
ttgcagcacagtttttnnnccagctccctaccaccatttaccanctgatgccgatcattaaatatcagttctgtttatctgaagttggctcctacccagagattctacccagtgaaactcccacagcaacnnnnnnnnnnngggctgacctggcctctccaatgtctcctcgaactagcaaaagccgcatgtccatgaagttgcgtcgttcctctggctcagccaataaatcctaaggagacagcccaacagtgatcagcagtagccaccttagcacgaacatagggttaaccctttcagtcctttgtgnnnnnnnnnnnnnnnatgtttcttcctgtacatttatttgagaaaacactggatttaaataattttaaataatttgtagcttaatattaaagatttgggttatttattgtttcatttttttcccacagtccaagctgccatattttgagggcaggggggagttttattctacaccctttgccttcctagataattatgtctaagtagttttatctttaatttcatggttaactttgagccaaaatacaattggacaacagtctcattatttattgtgcnnnnnnnnnnnnnnnnggttcaataaatatataattttttacaaatataaaattttaaatttaagcatttgtaaagttacagcaaaagatgtacctgttaatacacagannngtgtacagnnntatttatgtt

SEQ ID NO: 4621 - DNA, 584 bp, Macaca Fascicularis
  misc_feature (1)...(584): n = A,T,C or G
tttggtagcagaaataagttgagtcacccacaactcacggnnnnnnnnnnnnnnnnnnnncccacaataaagcaaacgccaacaggctagaccccagattgcaggggctgccacctacaaggtgggaccgcaggctgcctnnnnnnnnnnnnnnnnnnnnnnntagctggagtcatagannnnnnnnnnnnnnnnnnnnnnnnnnnnnntgaaaagcatagtcctatgtgatgaattcatatgtgttattttttaaaaagctattttattactgcatgttcccgtcccgtcttgnnnnnnnnnnnnnnnnnnnnnnnntgagctgcagttgttgcagcggctggtgcaggagtgcggctggcgcgtgtgtgatagcatcttgtaggtgttnnnnnnnnnnnnnnnnnnnnnnnnnnnnnnnaacacatagtatgagaagtgtactttttaagaaattaatttatttgagttcaaatatttttgaaatatgaaaattggttgtattttttaaagctataattcttgtagannnnnnnnnnnnnnnnnnnnnnnnnnnnnnnnnnnaaatgnnnnatctatgtttt

SEQ ID NO: 4622 - DNA, 690 bp, Macaca Fascicularis
ccatcacgtttaggcacatcccaatagacagaaccaggctgagttacagggggagtgtgtcatcactggcccagattaagatggcctcgtcagaatgaccattgagtaggtacggatgaatggaatatttagtggaggaaccctttcctttttccttctttttggggtctcttcttaaaatgaaaagcttccaaaatatcaaatctagggctgtttcctaaattacactattctaggcatcattttgattcccatgtcactccttaactcacttctttgagcactacaagtatgttgtcagccacgagacaggacttcctaaatagtgtgtgcaccagcctaactctgccttactcagaaaccaaccacctaagaggaaactcagaagatattaatgaaaactaataattgaaagtatgcacacttctcatgtaggaacaaaattaaaattttacatttttattttacaatgtaaattacattttgtagcaacaaaatgtaaattttgtaaatacaaaattatttttaaagtcctgtttaaagaacaatagaactaagtgaaaatattcagaacgagctccttagaagaaaggagtaagaattttttactgggactatttcccatctctagaaaaagcgcttcttccctccccctccctctccatggtgcgcttttgtgaaaatgctttt

SEQ ID NO: 4623 - DNA, 668 bp, Macaca Fascicularis
gccccctcctgtctccctcctgtgaactcctctcagccacggtcttgccttgcatgcttccagagaagacatacaagttgtctggcaaatgtgtttggctaagtaaatgcacttggcaaacaccctgtgtatcttcctggctcactgtgaagcctgcggcgaggtaacgcattacgtcacattgccatgcatcgttccttgcttcacttaccttttttctggccctcacctctctgttcttacatatcccaaataaaataccagtgcttacatgtgctgtgttggtttgctgcacccattaactcgtcatttacattaggtatttctcttaatgctatccctcctctttccccccaccccatgacaggccttggtatgtgatgttccccaccctgtgtccaagtgttctcattgttcaattaccacctataagtgagaacatgcagtgtttggttttctgtccttgtgatagtttgctcagaatgatggtttccagcttcatccatgtccctacaaaggacatgaactcattcttttttatggctgcatagtattccatggtgtatatgtgccacattttcttaatccagtctatgattgatggacatttgggttgttacatatgtaacaaacctgcatgttgtgtacatttaccctagaacttaaag

SEQ ID NO: 4624 - DNA, 733 bp, Macaca Fascicularis
  misc_feature (1)...(733): n = A,T,C or G
ctcataaatatggacgcaattaaagatgctctaggaaagttggggaccgtatttaattttctttccttccatctcaggaacaaggaaatcctactgctgaatagctgttagtatgtattnnnnnnnnnnnnnnnnnnnnnnnnnnnnnnnnnnnnnnnnnnnnnnnnnnnnnnnnnnnnnnnnnnnnnnnnnnnnnnnnnnnnnnnnnnnnnnnnnnnnnnnnnnnnnnnctgcactgaagggaaatgtcacggtaaatagctgccaaattatggatcatgccgaagtgtcacaactgcactaaagacaaatagcactagaggctattgccactgtgacgcttttgagttatgaagaagggtagcggcctgatgcgaggctctttgtgtcctcattatagcaaaggnnnnnnnnnnnnnnnnnntaggaaagcctgtccagtgtggtgcttagttattcatccgtccctttcagacctaacagccacagcaacacggaaagagactttgcctcgcttttacattcacaaacaaacaaaggagggggggagcaggttttatgaatgtaactgtgcacaggaaatgactggtaatggaaaaatgttgtaataaaataatctaatcaaagaatattattaaatttaacatagtcggtgtccaaaaggcttagttgcctcttatgcagatagatgtgtgaaatctaagcaataatgtactttctccctttgtaaaga

SEQ ID NO: 4625 - DNA, 756 bp, Macaca Fascicularis
  misc_feature (1)...(756): n = A,T,C or G
gtaaaggttggaaaatggggaaattgatgagtgttcacttatgaggaaatgaagaatagatagaaaagaatgagttaaattttggaattcaaaaaagaagcaatttgtaaaagcgaggaatttgatttgtaggaaaattgcttgcagaatatttgctttctcagagagggnnnnnnnagatcactaggttactgtgaaatatattggtatggttctaaaattctagaataatctcactagtgagaaaaggcatacctttccatattaggacaaaacttcaaatcaggtttgtaaaatcctcnnnnnnnnttgtatcccattgccatggccaacttgtttgtctctggacatcccagtttctacatctgaaaaccatatgnnnnnnnnnnnnnnnnnnattatctcattgaatgaagcgagagattcaggatgtgtaagatcatttatgaagcatttggatgaccaagaaatgtgaagtataaagatcaagaatgattaatgtaaacactggtggtaaagaggtgtttccaagttgataccaaaaatgagttgcttatttcagtctctctttgatatatctgcctttttagtgctgactctatcatgtattcaccactatatgattttaaatgaatcacacgtttaaagcttttaatctgtttcctcaacaaatatatagttttaataatgtctactcacaggattgttgtgagaataaaattgattcaattgattttccaaaaaaatgggaaatat

SEQ ID NO: 4626 - DNA, 738 bp, Macaca Fascicularis
  misc_feature (1)...(738): n = A,T,C or G
gtatagtgaatttctgaggtcaagttnnnnnntttaatgtattctccttttagttcattgaatctgaggttctaaatctgtagcttcattttgagcacaagtctgcattgtcattttttaagttttaagagattagcaagtatatgcttttgtgatatgtaggaatagactggcagcaaatgaaagtaaaggttatcaactgtgaatgaaatttagataattcttcagcgattggttaattagatgggttagtgcttttggaacatataacagtagacttgtattctttatgcactatacatatgatacgcactgacagaaaagcacagaagacatactgctaagagtttctnnnnnnnnnnnnnnnnnnttctaggggactgctgtctctttggttccttttaggtttgtgttaggatgttgcacaagtaaacatttaatgttaaatgcaagtgtccaaagaaatgagtcttaaagttctttggtcatatttcacttaaaagttaggacaggagacagctaacctgacttccattttacaaatattagaaactttcttcaataacaaaaatagcgaaggacaataaaaccataaactattttgctttatgtctatttttaaaaaataattgttttgaagtttgcttattagcttaataccttatagtacttttgaaaaatcatccttggtaattattgacttatcctatatccatgtacaattcagttttatctgtt

SEQ ID NO: 4627 - DNA, 271 bp, Macaca Fascicularis
actagggagttttttttttttgtgtgcaaaataaaggggttgtctctgttttttttaagagaaaatacactaatgcgccctatccccatgcgcaaagagtgttttttatttttaagggggaaaaatttgaataaccccctttgcgctgaaaaaaaaaaaacacaaacacaaaaaggggaaaaaaaaaccctgtattttgtaaatatttttttttctcgctttggagatgtgtaaaggcagagaaacacgtagcggtgtttgttttatagaa

SEQ ID NO: 4628 - DNA, 2842 bp, Macaca Fascicularis
attgcattcctactgtcttcctcacactgttctaggtatatcagggagcaaaacatccaaaaatcttgccattgagggagtttaattctagtggagcaaggaataaacaataggcaatatataagacagtatatagttgttctagaaaatagagactataataagtgttacaaaaagcgaaagtagaatagagtaaggggaattgatagtgcagggctaagaaatgagaattttacacagagaaggcaaaatttccatcaaaacttgaaagaagtgaggttatttcatggtagaacatatcaattagtatgtttcatgaaatactagacaataacatttttaaaagattttgtgttgttttttcacagtaaaaagaagaaaaaaagcaatgctttctcctaaatcgagactgttctactttcatctttcaacctgtttcatgttaataggtgtttttagctgataattaatttcttccttaggatattcatgtttgttcatgaagattgtaaaatcacaaagttcatgtgattattaatatgttatcagggaattatctctctgcagacatttacatttgcctctcactaaacacatttatgttcctcagcattccaaggttgtgtgtggatatgtctgcatgtgtattttagtcacacaacctgctgtgtatcctaatgagatctgtaccataaccaattagacacctgcagtagaatcgcactgtatcctcaaatagtcgttttctctgctcttaaagagttcaaactgagtcacctttacttcaagtctatgcagctttttcctaaaatctcaaaggtgcatggagcctttactcctttgctcaaaccaatttttgtgaatgtttggtacgtaaaaacagcttcaaagtaaacatttagtaattaattaatcaatgctataaatatgtaatgagtctattctgcaagggacattttgctagcttttgatggcatataggatactatttgaattggagcatctttctgtgtactctaaagaacagctcccaccctcagttttagatatgtcttgggaggcttattgcgattagattttcacattagattttcctggtaattatatcttaaagcccttaagttcaagtgaaatttgagtaagtcacaggtgatgcaactaaattattggtcatgagtgtatatgtaacatcctaaataaatcttgttatatcctcagtaattagaagtggtccttcagggagtcactccacaactgaagagggagcagtattataaaaccattgttagggcagaagaatagtttaatttatagttcttttttatttgatacagtaactgatgagctgcagatctctcatacacaaaaatctgatctttattccctgcaccaatttaacttttacttcccagccttaccctcaaaatactccacacggcaatgtccataataatgccctccacctccatcaatgtgctaatcagtttccttactcaggctttaagggagacacagacccctcgaggcaaggtggacaggaagaatagcaaggcctctactctgctcctcctctttcttttcagtcctatcctttgcctcctagagaacccatagttgtcttgtaatattcaccaaaagaaattataaccgtaaatttctatgttaaattttttctgcagaagaaaataatcatattataattgattctgagtttttaaaatgttaatatgactaattttaaaacaaaatgtacattgatttacaaataaatgttaaattcagactgttttattttctgttgtatttccaagaacgtctaattccaatatttactgtcttccattaatttgtgttacataaagctttctaggagatgcaagtaacttttgatttgaagtaatttaaaccttcatgttacattgattacacttttacattgtcaagtattttaatggagaaatagtgcaataaatatactcaaaatttatcaacatttattttaggatttcaataaatgtgatttaaaatacatatgttgaatttttatttctttcaaaaaattttattataccatgaaagctaagtttttttgaaaaaggaagagtttattttattatgccattacattcattacactatctgtaaaagcatgtgaaaattctctctgcacattttgttgagctagccatttatataattggcaatatataaaagttcataaagcccacagatcattacagtagtaatcagtgctgactctagtttaaaaaaaaaaaaaaatagaaaaggaaaggaaaagaaaaaaagaggcatagtacaagtgtattagaccgtttttgcattgctatgaagaaatacctgagactgggtaatttattttaaaaagatgtttaataggcttacggttcttcaggctttacaggaagcgttgtgctggcatctgcttggcttctagggagacctcaggaggcttccaaggtgaaggaggagtaagcaaaagagagagcggggtggtgccacacacatataaataactagatctcctgatggctcactcaccattgcaaagatagtaccaagtcatgatgggtctacctccatgactcaaacacttcccactagtcccatccagcattggggattacaattcaacatgagatttggacagagcacattaagtctgaaagcaacagaggtttgttttagaactgaaggcaatttaatcaaaattcctgtcaagaaaagctgcttataaatgtaaatgaaatcacattgaaaataaactgcctctgacccaaaaaaaaaaaaaaaaaaaaaaaaaaaaaaaaaaaaaaaaaaaaaa

SEQ ID NO: 4629 - DNA, 771 bp, Macaca Fascicularis
  misc_feature (1)...(771): n = A,T,C or G
tatggcccaancnngannncnttgacnnnnngcgcttttccactgagaatgcgtccaaacgccatccctttgcctttatgccnnnnnctgctgggcccaggaannnnnnnnnncannnnnnnnnnnnnnnnnagatgaaggtggttacagccatgtgcttgctccactttgagttctctctggacccctcacggctgcccannnnnnnnnnnnnnnntgtcctgcgctccaannnnnnnntccacctccacctgaagccactgggccctgggtctgggaagtagctctgatgagaatggggccccggatggctcaggctgtgacctctccctgggcagcaccctccccgggctggatgtagaggagttggggcaccctgccttcagaaggcttgtagtttagaaggggactaggcattaccatagacaactcctagaggacagtgctatgtacagatgtgtgtctataaatgtttatcattcatttattcaacaaacatttggtgagcacctatttggttcaagaaacttcatttatctcctgtaattggcaaacttaaaaatgcagcagaaacttacattccaaccttagagagactcatagtgaacacaaggaaagttttgccctgagattcgtggttatgactggataccactgaatagaagaatggcttaagggattgccccttcactgagatgtgtttctttgtttaactttgtatgtgtgtatttcgaatataacagacataagaaaaaattgcctaaacgaaga

SEQ ID NO: 4630 - DNA, 754 bp, Macaca Fascicularis
  misc_feature (1)...(754): n = A,T,C or G
gattcagtcccnagtgnnntgatagagtattcattaatgtcatgtattcattaacatctttaaagttannnaggctttgatgccttaaaagaagaccctggccaggcatggtggctcacacctgnnnnnnnnncactttgagaggctgaggtgggcagatcacttgaggtcagtagttgaagaccagtctggccaacatggtgaaaccccatctctactaaaaatacaaaaattagccagnnnnnnnnnnnnnnnnnnnnnnnnnnnnnnnnnnnngaggctgggggcatgagaatcacttgagcctgggaggtggaggttgcagtgagcagagnnnnnnnnnnnnnncttcagcctgggtgacggagtgatactctagcnnnnnnnnnnnnnnnnnnnnnnnnnnnnnnnnnnnnnnnnnatacacaaatgatgccccattctgtattctttttaattttaaaaatcacgacacacacatacattacaggaagataaaaggtataaaaatatagtaagtactttttaaaaaggaaaattcatgttttggattattactaaattattgctagttactgtaatgtaagtcatatgttctcacagttttgaaaaatnnnnnnnnnnnnnnnctaaaaaaaatgtgtgaataactgatagtcattgctgtatcattgatgtatcactcaatttttggtaaagaattataaagatcttatctagtaactatgtaaaaaggtattaaaaatattgtgag

SEQ ID NO: 4631 - DNA, 1770 bp, Macaca Fascicularis
caatctcccagatttgcccccagctttggtcccttctcccctgaagagagccaggtccagcccttgccaccccctgcctgaggatgaggacccagaagagaagctgaggaggcatgatcagcacatcactgctgtcttgactaagattattgaacgagatacaagttcagtgactgtgaatctgcctatgcccagtggcgttgctttccccgctgtgttccatcgctcgcgggacacacaggggaaatcagcaacatctggtaagagaagcatttttgcccaggaaattgcagcaaggaggatagctgaagccagggtcccatcagttggggaagtcgtgcccaacctgggcccaccagagggtgccgtgacctgtgagacacccactcctagggaccagggctgccagcttcctgggagcagccacagctttcagggacccaaccctgctactgcctgtgcctatggagccgctgctgcccaccgactggcccttcctgccgctgattcacctctaccaccgggcttcagacacgccctcgggactctctcccatggacaccgtaggcacagccatgcgggtcctgcagtgggtgctagttttagagagctggcgcccccaggccctctgggctgtgccccctgctgcccgcctggcacggctcatgtgtgtgttcctggtggacagtgagctgttccgagagtcccgagtacagcatctggtggcagccctcctagcccagctctgccagcctcaaatcttgccaaacctcaacctggactgcccactccctggcctgacgtctttccctgacctctatgccaacttcctggaccattttgaggctgtctcttttggggaccacctctttggggccctggtcctcctgcccctgcagcgtcggttcagtgtcaccttgcgccttgctctctttggggaacacgtgggagccttgcgagctctgagcctgcctctgacccagttgcctgtgtccctggagtgttacacagtgcctcccgaagacaacctggccctccttcagctctacttccggaccctggttactggtgcgctccgtccacattggtgccccgtgctctatgctgtggctgtagctcatgtcaatagcttcatcttctctcaggacccacagagctcagatgaggtaaaagctgcccgcaggagtatgctgcagaaaacgtggctgctggcagatgagggtctccggcagcacctcctccactataagcttcccaattccacactcccagagggctttgagctctattctcagttgccccctctgcgtcagcactacctccagagactgacttcaacggtgctccaaaatggggtatcagagacctaggatagttgctatagatggaaagatgggtacattgttctgtatccagcctttcaacagatgcctggccagacaaaggacattgtgtcctaatggcaggcagaagaccaaggagcagaaagcttgccttcctgggagcaggtggtttgagctgttttggagcagaatgagccctaccattacatcctgatacctggggcttcgaaggtctgtgctgggagtgaagagcagcttagctatttaccccctctttggggacagggcaaactaaatgcatcccttcttacctaactcccaacccctgccctgggctaaggtatatgaatgctatagttgtacattaaaatgttttttatctcccggaaaaaaaaaaaaaaaaaaaaaaaaaaaaaaaaaaaaaaaa

SEQ ID NO: 4632 - DNA, 1712 bp, Macaca Fascicularis
  misc_feature (1)...(1712): n = A,T,C or G
tccggcctgccccgagacggagcgtgaagccgtctttcatgaggacattttccatggtgatttgacgtgtccctgtgtatttaaccagttctccgttggtgaccactggctttcaatatcttgcccttgtacaacactattgaaaatccatacctacgtgtctgttctttctgggggagaattgctgggtcatgtggttctgacgcccgctttcccttctcagggcgacctcaccgggacctaccccaggccgtctgcactctctcctcccacagccaccttctcttcctctgactctgctgctggcggcccccctttcccaactatgcgctccttcctgccacaagtggaaaggcaggataatgacacggggaaatggactgggagttgggcagacctgagttggaatcctggctccattggagttgctgtgtcctgagaagtgaactgctctctgcccccgacgtttctcatcaacagaatggaaataacagctgcttcatggagtgagattaggttggctgaagaatgaaaagtgctggcacgtaatagaaattgagtacattttggtttgtttccctttccgcaccactgtccatggtctgcacacagctcaggacctggcctccggccctgtctccacgctgcctggcttacgtgcagccatggctcagccttctgcgcctgtgggctctgccatttgtgcactgtctgcttcctggcctgtgtcttggggagacaacctggggcttctgtagcgctcccttgtatttcctcaggtggttttcccttttccttgttctttttctttttatttttttgagatgtnnnnnnnnnnnnnnnnnnnnnnnnnnnnnnnnnnnnnnnnnnnnnnnnnnnnnnnnnnnnnnnnnnnnnnnnnnnnnnnnnnnnnnnnnnnnnnnnnnnnnnnnnnnnnnnnnnnnnnnnnnnnnnnnnnnnnnnnnnnnnnnnnnnnnnnnnnnnnnnnnnnnnnnnnnnnnnnnnnnnnnnnnnnnnnnnnnnnnnnnnnnnnnnnnnnnnnnnnnnnnnnnnnnnnnnnnnnnnnnnnnnnnnnnnnnnnnnnnnnnnnnnntctgtgcccagcaggtttcccttgtcttttctctccctctttaattagtggtgctcactggtgtctggccctcctgcccttctgggcgtcctttgcagctgggggaaggcatggcgagttttggccagtgtgcctggaacgtggcacgtcacttctgggtgtgagctcctgagtcctcttgtgccattgcaggcaatgctgaggcagcagcttccatctccgcatgggttgcagagtgaggagataggagtggcctggccacctgccaggaggggtggccggggcgggagctgggcctggttgttcagagccccttgggtgcctccatgtttgttggcgcagtgtcacttggctgctcggaccagtgcgctgtgctgctggtatagggaaggaggccagcctggcgtggtggtgctgagaggggcatctgctgcatggaccctcttaggatgcccctgcccaggagagcctcatcactgtgatggcagtgggagctgaggggtggggcatctggccttcccctgattcctcaaagtggcaaggactgggacatttcttctccaaatgaggactgcaaaaatggggaagactaaattgggttggggggcattggaagtgg

SEQ ID NO: 4633 - DNA, 487 bp, Macaca Fascicularis
  misc_feature (1)...(487): n = A,T,C or G
taagaaagtttaagtgactggaggggaatcagcttagacaggtgatttactctttatccctgattctccatatacccagtaaagcttcaaaaacccagataacaatgaattagtcaaccttatagattcttcctcaaatacgaagaattagttccaataagtattttaactttgttaacaactgaaataccccataaaaaaagaacttgttgagtattcctttaaaattgttacttgctgcccaggcaccannnnnnnnnnnnnnnnnnnnnnnnnnnnnnnnnnnnnnnnnnnnnnnnnnnnnnnnnnnnnnnnnnnnnnnnnnnnnnnnnnnnnnnnnnnnnnnnnnnnnnnnnnnnnnnnnnnnnnnnnnnnnnnnnnnnnnnnnnnnnnnnnnnnnnnnnnnnnnnnnnnnnnnnnnnnnnnnnnnnnnnnnnnnnnnnnnnnnnnnnnnnnnnnnnngttgcagtgagccgagatcatgcca

SEQ ID NO: 4634 - DNA, 1737 bp, Macaca Fascicularis
ttcttatagaacatatgaaaaagagagaagcataaaaaaagtgaggagagaaaagcccttagcctcatcctaaaatagtactccagagatttttttgtccttgagtctattttctggatgaattttgggttttgtttttgtgcattggtatgtgatgttgacatcaactttctaagcatccctcttgttggatgcatagtattcctcggagaggatgtgccatggtttgtcataagcgtgactgcatcctcccccacaggacgtagcctgggtgacccacccaggagggccctggtgaagactgtgagtaattgggttgtctgcagggtaggaaaagggtgggttacaccatgcggtatttaagctgcaagggggccatttaggaggctggaaaattacagagtgctcatactgagcctacatctgccagaaaagggcacttaaaacaaattccatgaaattatagcttttgcagtctatgagttagacaggaaagtacacacgaccaatgtgtttcagtaggaacaccgggaacaatgatgttagccatcactggggcatgggaaggaagggtttgaaagagaaaggtcttcccaagtgtggttctcagtaaacattctttgtaattcagagctgatatggtttatgccctcggcagagatgccaggggttcccttgctggaggggcagctcttcgaaagggaagcattacaggctgaggctgtaccaagcgttgatatgggagggttcctttggtgtagctttatccctgaaacgccacgtgtatgccgagggggagtcgggtagtccaagatgctagtgctcgtgtgtccgtgtgtctggcatcagggtggaaggctgtcttcgttgctaatactctctgcggaagcagcagtcactccaatagaaacagaggagacatgggtggtgggctttccagaatgttggcctttggaagccaccaagagtggagggaaggcaggccctgggtgcttacccccacatctgggagtccctgcttccaggagcagtgacagccatcctcctggctccttggtagaaagaacctcagtcctcctcccatcagtggcagaagtagctatgaggattgaagctgggtgggcgatgtctcaatccttggcagaaggatgggaaacaaagactttaaacatgttaaacatccttttacagatctccagaattatagtgacagcggggaggagggaatgacccatcccccatccccagcttgccagcccagctcccggaagatcagcctctgggcagtgccagcctgcatgaccgtcctcatcccccactctgccctttctcccaaagagccaacagagcatatgtcttggagaagacaccccgtcgccttctaggctgtcctgccatagaacaggagcgcccagcaatccagcagagcttcccacaggtttctgcagtgtcgtcagagacccgcaaggagggtcagcctttgtggagtctctgactcaaattctgacattccctctatcacttattcacaaagtgaccttagactgcacttttctgagcctcagattgtgcatctaaaaaccgaggataatgcttacctcactaggtggttgtgaagaaatgtaaataaactgtgtgtgaaaatgatctctaaaaccagaagaccccacataagcctcagtgaggaaagcaacacagtgtagtaatcagagctaaaaaaaaaaaaaaaaaaaaaaa

SEQ ID NO: 4635 - DNA, 1874 bp, Macaca Fascicularis
aaaagctgagcgagtcaggttaattcactggactgggcctctgttccttgggagttgaaaagatttgacctggaagaaaccctaccgatcattcagttaagccgcaaccccaacccgttttatatagggattccggttcacaatggatgctgatcaagagaaagatctgcagaaatttcttaaaaatgtggatgaaatcaccaatttaattcaggagatgaattctgatgacccagttgtgcaacagaacgctgtcctggagacagaaaagagactactgcttatggaggaagaccaggaggaggatgaatgcaggaccaccttgaataagactgtgatcagtcctccacaaactgctgtgaagagtgccgaagaagtaaactcagaggccttcttggcatctgtggagaaggatgcaaaggaacgagccaagagaagaagggaaaacaaagtcttagcagatgccctaaaagacaaagggaatgaagcatttgctgaaggcaattatgaaacagctatcctgcactatagtgagggtttggagaagctgaaggacgtgaaagtgctgtacaccaaccgagcccaggcttatatgaaacttaagaactatgagaaggccctggtggattgtgaatgggctcttaagtgtgatgaaaaatgcacaaaagcatattttcacatgggaagagccaacctggccctgaagaactacagtgtgtctagagagtgttataagaagatcttagaaataaaccccaagctgcaaacccaggtgaaagattacctgaatcaagtagatcttcaggaaaaagcagaccttcaagaaaaggaagcccatgaactgctggattcaggaaagaacacagctgtgaacaccaagaacctcctggagaccctttccaagcctgaccagatccccttgttctatgcaggggggattgagatcctgactgaaatgataaaggagtgcacagaacaaactttattcagaatgcacgatggatttagtatcatcagtgacaacgaggtcgtaagaaggtgtttttccacagcaggaaaagatgcaattgaagagacggtctgtgtgtctgttctcaagctctggcaagcagtgtgctgcgggaacgaggaaaatcagcgtgtgctagtgatgcaccctgacagggccaggctgttggccaccctcttgtcctccaaggtcctggccatcaggcagcagagccttgccctgctgctacagctcgcccagactgagagcggacggagcctgatcatcagccaccttgacctgaccagattattggaagccctggtgtcatttcttgatttctcggataaggaggccaacactgctatgggactgttcacagacttggctctggaagaaagattccaagtctggttccaggccaaccttccaggtgttctccctgcagtcacaagcgttctgaagacagatcccaaggtaagcagctcctcagctctgtgccagtgcattgccatcatgggaaacctcagtgctgagcctgccacccgaggacacatggcggcctgtgaggaatttggggatggctgcttgagcctcctggccagatgtgaggagaatgtggccctgttcagagaggttatctacacactcctgggactcatgatgaacctgtgtcttcaggctccctttgtctctgaggtttgggctgtggaggtgagcagaaggtgcctgtctttactaaacagccaggatggaggaatcctgacaagagctgctggtgttctgagccggaccctttcttcctctctgaaaattgttgaggaggccttgcaagcaggagtggtaaaaaaaaaaaaaaaaaaaaaaaaaaaaaaaaaaaaaaaaa

SEQ ID NO: 4636 - DNA, 758 bp, Macaca Fascicularis
  misc_feature (1)...(758): n = A,T,C or G
acaaggactttactaactagctggaaaaagatgatgtaattacttcgggnnnnngcggaaccttctctgtacagtgccccctttctgttgtgctattggttgcagctgccatgctcagaatgcgtttgagagctgaagcaaggnnnnnnnnnnnnnnnnnnnnnntccgtgtggcccagggccccagccgcctttagggcccccattgtccataannnnnnnnnnnnnnnnnnnnnnnnttgtgtctgcagcttctttgccaatatagtaatgcttttagtagagtactagatagtatcagttttggattcttattgttatcacctatgtacaatggaaagggattttaagcnnnnnnnnnnnnnnnnnctaacgttggtacataatatcaaatcaaaagttatctgtgactattatatagggatcacaaaagtgtcacatattagaatgctgaccnnnnnnnnnnnnnnnnnnnnnnnnatcagagtttattataacttattgttcatattcatttctaagttaatttaagtaatcatttattaagacagaattttgtataaactatttattgtgctctctgtggaactgaagtttgatttatttttgtnnnnnnnnnnnnnnnnnnnnnnnnnnnttaattttgctataaatgtgtggaatcacaagttgctgtgatacttcatttttaaattgtgaactttgtacaaattttgtcatgctggatgttaacacatcttactctaaataaaaaggtg

SEQ ID NO: 4637 - DNA, 708 bp, Macaca Fascicularis
  misc_feature (1)...(708): n = A,T,C or G
caggagcacagaaacatgaggaagtacagcctggagccagtgtcccagtgtcctttnnnnnnnnnnnnnnnnnnnnnnnnnnncaggagaggggtaaactgannnnnnnnnnnnnnnngcttttgtctctgcctactgtcctttggtagctaggtcagctaccatgggaacacatttgttctcgtggggttttgtcctggagagtgtagtgaagtctgagagccccnnnnnnnnnnnnnnnnnnnnnnnnnnnnnnnnnnnnnnnnnnagtaaaacagtcctgcacacagcagggtgggtttgtgcctttggcccaacagatacatagccccataatttaaaaattattctatgcacttgtttccctcttcttttattttttatttgatatatgcagacctagaatcctgtcaggtagcttttgtatactaagaacattatttttaaagaagtgctaactttgaggacatatctgttccctggagatatttgggcttnnnnnnnnnnnnnnnnnnnnnnnnnnnnnnnnnnatcttgggatgctaccagggctttgttctcgggatcctcgcacctggagagagtgaagannnggcatgatggcaggtgaaggggtttgctgtgaagtaagaggnnntaannnntttccaggaaatgggaaactgcctcctcctacacatggggcctgtgctcagaatgggcttagtt

SEQ ID NO: 4638 - DNA, 721 bp, Macaca Fascicularis
  misc_feature (1)...(721): n = A,T,C or G
agaagaacattcaaaagtaaataagttacataggtacattacaatcacatcagcaagattctttagtgtattaattttttcttataaaaagcacacaaaaaataaaatcttcagtctctatcacaactgtacagcaaaagaggtaatatttatatatatgtacactattttaatatgtaacagtctttttcaaaaagggtgccacaggcagcaaacacacaaaaggcagtgtctgatcatttttgtttcaaaataaaaggaatatacttatttatatgctattaaaatatttgtacaataattacagactgtcaaggctgttcctgtgctctgtcccctccaacaaggcctnnnnnnnnnnnnnnnnnnnnnnnnnnnnnnnnnnnnnnnnnnnngttagaggcaaatattaacatagcaaaatgtgggnnnnnnnnnnnnnnnnnntaaaaatatccctacttcctgtaaacctatggagttaggcttgccagtctgataataaataccatcccagaaaagcgagccccagtgaaaacaactaaacagctgaggcttgagtatgtgttgtattcctccttcatcttaacatctggcacatgagaagaaagaggttaggtcactgaggcagttaaatataggcgatccctttagacataagcagcaaaagaccttggtgccaggagtggannnggntgcggcnnnnnnnntggtatgtacc

SEQ ID NO: 4639 - DNA, 772 bp, Macaca Fascicularis
  misc_feature (1)...(772): n = A,T,C or G
cgtgacccagcctgtctttnnnnngggagagaccagggacatcatttgactacgcatcctcagaattatttagagaagaaagcagcagataatttccattcggctggtagttttttgttgtttttttgagacagggtcttgctctgtcacctgggctggagtgcagaggcatgatcnnnnnnnnnnnnnnnnnnnnnnnnnnnnnnnnnnnnnnnnnnnnnnnnnnnnnnnnnnnnnnnnnnnggaccacaggtacccaccaccaccacgcctggctaacttgtttttgtagagatggggttttgccatgttgctcaggctnnnnnnnnnnnnnnnnnnnnnnnnnnnnnnnnnnnnnnnnnnnnnnnnnnnnnnnnnnnnnnnnnnnnnnnnnnnnnnnnnnngccttggccttggcctgcactttgaatgggaatnnnnnnnnnnnnnnnnnnnnnnnnnnnnnnnnnnnnnnnnnnnnnnnnnnnnnnnnnnnnnnnnnnnnnnnnnnnnnnnnnnnnnctagccagagcacgagggggtcagagctgtgtggttttggcctgattttgcatttggttgttcctggaggccatnnnnnnnnnnnnnnnnnggaaagcactgtgccatctgatcgtgagcccctccgcgccccctggtaaggtgaccttgcagcaggagctgtgccctgcccgggtaggcacccactgggtaggaccggagcaagcctggcagccgccacctgcacccacgcactngtgtttctcctcgc

SEQ ID NO: 4640 - DNA, 1057 bp, Macaca Fascicularis
  misc_feature (1)...(1057): n = A,T,C or G
ctttaaggaaacgtgtnnnnnnnnnnnnnnnnnnnnnnnnnngtcaggacattgcttcaacattgccttcattccttaaagttannnnnnnnnnnnnnnnnnngtaaattaatatggataattttatttacctccaggtctaaaaggnnnnnnnnnnnnnnnnnnnnnnnnnnnnnntcatgtgaaaggactgggtttttagcaaacacaagtctaatctcttttgtgtttttgtgcaccaggcccggctgcgtagcagttgagtgatgctggttagctattaaggtggcnnnnnntgcagtgcagagtgtgagctgctccntgnttcttctgattgctcctggggaaaacacgccttgtcctgaagaacaaatggctgtccagtnnnnnnnnnnnnnnnncaactgcacttccagtcacccaggccttgcagataaataatggagcatgcagtgagcacatctagctnnnnnnnnnnnnnnntttccccccgtcttttctgaaaaattgtaactctgatcatatcaacatgtatgaacttaaaatatggagaatgttatgtaagaaatggtttataagtttgttaagtacttaaaacgtgtatctttttgattatgaattttttacgctaaccattgtttctgtagttaaaattgttttcttggtgttatcttttctcaaaattagaaacttttgatggaaagtaggttgttttattttctgtgtgacttttggatatttgtacttttgagaaaattgttagcaccaagtgtttctcaaaataatttttaaaaaatccttaataggcttttagccatgtgctttattgttttatcacaatgcagtttatttgtagtttctctcttttctcctcatacctatggtttttttacttctaaaattattttcaaataatccatttttggctttcattattatccctactggatgttatgtgttcttttgaaattgtttctgcttatacctttactagcaaagggaaaaataacaatttgatgtctatgatctagtgacaataggatnnntggagccagtg

SEQ ID NO: 4641 - DNA, 671 bp, Macaca Fascicularis
aaggtaatttgggattatacaaactgggccagatgcgttactgaaggttcttaacatagaaatatcttggtgagcagatggcctcatttggaaatttttaacagctaaagtgtgagggtcacttttgcaaatcagaaagagaccttagcatttggacatgaacaagctcaagatatgcgtttgtttttcctctacagagatttgcaccttttataaaccttaagataaatattgtgtcattcctttagatggtgacaaagtagtttgtgaagatggccggttttaaaatttttttttgctttaaaggcaagatatttaaagattgtatgattccttatttctggatgtctttgtccatactgccatcttgctcttatccttcttacttgctgaatgtgtcactgagtagcaacttttgccagtgtatattcatagttatcttaccttgtatctttattactagacagtctgtcatgaattaatagttgaaagcatttaaatatgtttgcaattgcagttttcttaaattgtaaacaaatccctttgaatatatagatttttaatgtaaattgtatagtaaatgacaataccaaatcaaataggttaaaattggttagttaagacaaaataactcaagagaggccctttacctcactgttactgtttatagc

SEQ ID NO: 4642 - DNA, 274 bp, Macaca Fascicularis
ataagaaggacattgtacgagtaaaagggtgcacttaagaactggacagacctgagtttcagtatgccacatcatgggagagttatttaacatctccaacctcagtttcccactctgtaaaatggggataacaatagtaccataggggtttatgaagattcagtataataacacatgagaggtgatcctggtaatcatttagtaaatggtagctgttattttggttattacctgattggattatttgttgtaatgaatattgctaaataatgaa

SEQ ID NO: 4643 - DNA, 2571 bp, Macaca Fascicularis
gcagaacgcgcaaaggcccgaaagaggagcgtggggaacgcggcgacagtctagtaatgtaaagctccgctaagagggagagtgccgaagaaggggacagtctctgtacctgtggcgcggcccgagggacggacgcgactggagtggcgcgctggaggctgtttacagccctgttaggaccgcgcagggagtgaaggcggaagcctcagagctcctcggatgatggtgcactgagaaggcatccggaagcctgggccctcatggcatccaacgacgaaggtatggcaccctcgctgggctctccctgggcctcccagacagggccctgggacgccatcctcaaggctgtcaaagaccagctcccgtctctggactcagactcctccttgtcggactatggggaagaggagctgtccatcttccagcgaaaccaaaccgccctgattccagacctgtcagaggagctggctgaagatcctgccgatggcgacaagtccaggacctgggccgctgcagctgaagaatcccttcccgaggtctgtgggacacagaagagtgtgcgcctgtgtgtgtgcaatccagctctggtgcctgcagaattggccacagaacctgggaacagacggaacacaaggacaaaggatgcatcctctcaggaaggaagagaccctggcaggcctgttgaaacctctggtgaggtcagcgcttttcttgggatggccgaggagacccccaggtggctgggcagcgaccttggaagcctgtctttcaacaccaaaggatcccagggtcctccctgggacccccaggccaaagccagtctctcccgccatgaaggagacccgaaggcagagcccgcctcacaagaatctgtgaaccgccgggccctccgacaggagagaaggaaaatgatagagaaggacatcctccagaaagtcacccgggatgcctgcggcccggccagcagtgaccaaggcggggtgaaggaggcgccctgccacgctgtggagtcagctgccagatccaaaatgccccttgcagagcctccagagggaccaccagtgctctcgctccagcaacttgaagcgtgggatttggattacatccttcagagtctggcggggcaagaagacaaccagggaaatcgtggaccaggaactgtgtggtgggcagccgaccgccgccaagttcaagaccgcacggtgccgagcgccgacgacaggctcatggaacagctggccctcctgtgcaccatgcagtccagggcctctgcttgtgcctggaaggtgcctgccgacaccccccaggacaccgaggaggcaggggcaggaagcagatgttcctcgaggaagccgggctccgaggccgggccaggcccacagctggcccagggcatgaggcttaacacagagccccccaccatcttcattgacctgcggcagacggtgccaccagaccacctgtccccagcaaggtccagaggctccagccacagctcctctgacagcgaggaggaggaggaggaagtggagatggcagctctgggagacgcagagggggcatctccttcctccctggggctacggagctgtaccgggaaaagccagcttctccagcagctcagggcctttcggaaggggatagcccagcccaagctgcccgccaacaaggggcctggtggcgagagggctcaggcccctgaagacacggctgcatcaggaactgtgaggaagcaacatatgaagctctgcgccaaggggcagagcgcccaggcccgactcccaagaggcaggcccagggccctgggggatgctcctgagccaggggcagccagggaggccctgatgcctcccttggaccaactgtagctgcctcaggatgtgtcccgctgcctgccccatgggaagaacagagaaatcatcatcacctcaggccccacagcaccatgggctcaggcagcacagcagggtgccaggcctttgggccagtgtcccagcttctcctggggttcacccctcgctgccatgtcgccaaggatgggcaggggtctctgcatcaagccttgtgccaggcaaaagacaggccctgcctggctgtggtcactggccaccaagatcagggccacagacatctactctccagaccccatgtgatcgggccactggggatccccacccaaccccactcccaatgatgaggggtgttttcgttacaagtcaaaggcaagacagacttccataaagtcccaggaggttcctcctgcagggcacaaggccaggctgcctcccagccctcaggccctctcccacctacagagaccctcctctgcccctctgctccgggacatgtgcacccacaacaggcctccgccccatcccctgccctcgcctccgcttggctgcctagctgtcaagagcaaaggctttttttttcttcaaccccattttcttccatttcccccacctttttaatgccagtaacctcatcgagaatgttttacagtgatggaaaataaattcggttccaagttcaaaaaaaaaaaaaaaaaaaaaaaaaaaaaaaaaaaaaaaa

SEQ ID NO: 4644 - DNA, 756 bp, Macaca Fascicularis
aggagagaccaggcccggtcgctagagagaaaagcggcttctccaagtcatggctccgacgcgggagagagactcctcttcaacctcgatacgacagggatcccccaacttatctcctcgcagaggacgacgccccttatcggaggcgtacgctctttcttagcgctcatccgttggtcagcagagggagacccactcccggggttcgaggggcattctgaacttatcctgaggaggagtaagagataacccctaaatgagacctttcccccaactttggtcagcgtcccccaggtgaagagtgagactcaacttgcctgaaagtgacagaggggatctttcttcccagtaagaaagagacttaccttcctcctttatttttcacgtgtaccccaagatacggagaggaagaccctgaaaatttactttatggtatcagaagtcaacctttctccctctcccatcgcgatgtccacagagggagcctcgcttctcttcttccctttaagcctcttggtgtgcagtgagctcctttcccttgcacaattaagagcatggcttttggagtgtgatagttacaaacctgggtctctcacttaacatctttgtgaccttgactatttgtttaacttgtctcaatctcagtccatctccaatttgggttctgttttcttaaaattgtcatgcgggctaagggagcatttgtgtaaatactaattacatagtaagcttttggtaagctgttgctgttactct

SEQ ID NO: 4645 - DNA, 726 bp, Macaca Fascicularis
  misc_feature (1)...(726): n = A,T,C or G
atacaacacatcttttgacactttaaggtgggtgtgtgtgtgtgtgtgtgcgcgcatgtgtaaggttttatgttgctgttatttatttacaaacttcagatacgtttttatgtatttttcattcttctggagcttcctaaaaattgataagcatctgcactgaaatataatttaacagcaaagataaaaaaggattgaaagttgtaaattcctcatatcactacagtgacgattattctagaaatcgttgcttatgtagcaaagaccaaataannnnnnnnnnnnnnnnnnnnnnnnnnnnnnngattttggacagctgctgtttattaggaaagggctccaggtggcaaaggtgnnnnnnnnnnnnnnnnnnnnnnnnnnnnnnnnnnnnnnnncacaggtgaatgggacggattcgaagtgagcaaagggattcacaaattatgtatttatttgttttcatagttaagtagctgaagctcnnnnnnnnnnnnnnnnngagatgaaagtgtggttttttagttttgtgaatggatgatcannnnnnnnnnnnnnnnnnaaaaagtnnnnnnnnnnnnnnnnnnnnnnnnnnntgaagcgcattgcatttccattagcactgaagcaccagtttccattcctgggctgagattgctttccccgtggttgtattgttctgatttcacgttcaccagagtaactgattttttttgttttcttgtggag

SEQ ID NO: 4646 - DNA, 748 bp, Macaca Fascicularis
tttcattactaactttctgacacgacttccataactagaggtggaaaccaaaaccctcatggtagtatttcctctggcagctggtgctgtgggcaactgttttgttcaatcgggtttcttttctttttgcctctaatgcagaaatcaacagaatcactcacacatacaagtacactcacataaactaattatttctctggatatcgttctgtgttccatgtaaatttatttaccaacatctattgtcaacatgtacatctaccttagtgtggtctgcattctttctctgagagtacctcacagggctcctgcctgatcttcgtagtttgttcattcatccatccacctgttcatttgttcatccatgtattctaacatttgtgtgtagtgtgcaactgtaatgtcatgcttttgaagaagagaatagctgcccatagcagccatccgtctggataatagcaaaacactctatagataagttattttgcactttcttatgtataaagttggtagaaacttatttttgctttgtatcatttaaatacattttgttttggtaaatgaactgtgtataaaatatttatgccgttaaaactgtttttagaaagtatttttaatttcagcaagtttggttacttgttgcatgactattaacacagctgactttttgtgtcagtgcaatgtatattttttgtcctgttattaacttgtaagcccctagtaatggccaattatttgacagcaacag

SEQ ID NO: 4647 - DNA, 712 bp, Macaca Fascicularis
  misc_feature (1)...(712): n = A,T,C or G
atatagtttattacatcacaaattatgctttctgtacttacgctcttagtgaaggaggtaacattgaagtgataacaaataacatcctcagttatttgtgaacttagtccctattccatttttttttttgcagtccctattccatttttttctgatgaaaatggatacacgaggtctcatttattgctgtcctcaacaccttaactgtcctaggttccgttcgcgttccaaatcatggacgataaaactgaagtcagataaacacagacacagctacaatgtgagcgagttttaatatactggtaattttgcaactgccaccatgaatactagtgagtactcaatttacaacagacaatttcacagaaacaaaccagagnnnnnnnnnnnnnnngcttcttagttttctaatccatataattaaaaaaattaatcctgtagaaatgatgtattagacatctctaacccaagaaaaagatgtctttcgtataagttttaaattcctatttgtcttagtgtatcttagnnnnnnnnnnnnnnnnnnnnnnnnnnnnnnnnnnnnnnnnnnnnnnnnnnnnnnnnnnaaagctagaaccatgggacattaagccacaatactactcttattgaggctcccagactacaactaacggtctttatgtatttatcatcttgattattgttttacctcaagcatatacagtgtgcagaa

SEQ ID NO: 4648 - DNA, 681 bp, Macaca Fascicularis
  misc_feature (1)...(681): n = A,T,C or G
nnnnnnnnnnnnnnnnnnnnnnnnnnnnnnnnnnnnnnnnnnnnnnnnnnnnnnnnnnnnnnnnnnnnnnnnnnnnnnnnnnnnnnnnnnnnnnnnnnnnnnnnnnnnaacagggacacagtttcaccacgttgatcaggctagtctcaactcctgacctcaagtgatccgcccgcctcagcctcccaaaatgctgggatgacaggcgtgagccaccacgctcagccccccaaatgtttacatggataagtaacagcttttggtcccaggcagtttggtgtgaaagcagcttatgtttcactctggaaaaactgtgctcttcttcccatccaggaagctgcctgggtctgggccatatgtggataccttacgggtgtaaggagctcaggaccctgtgtagaagcccaggacaatgcgagtgggaaggttaccatgtacagaactgggtttctgtttgggtaggactaagagacgcagggcagccttgggcaacctgcctactctcactcctcttcctattttcccgtgccaggcacctcctggcaacttgcctgccaaagaccctgcatcccaggcataagagctcctactctccccctcctttcacttttgagcttacacagactcagacagaacccaccacggtgctgtctcctgaggacaaggctaacatcaaggcgg

SEQ ID NO: 4649 - DNA, 788 bp, Macaca Fascicularis
  misc_feature (1)...(788): n = A,T,C or G
catgagactgnnnccagcactnnnnncgggatacactgattctactgctctgnngggnctcctttaccatctgaaccaaaagcttttgttncgactccagcctcagcactnntcnnnnnngctagaccctgtgttttttgcttttagagcaagcaaaatggggccccaatttgagaactaccctacattccaacatactcacctcttcccatattccctttccaactgcatgggaggttctaagactggaattatggtgctagattagtaaacatgacttttaatgagtagcgtcttctttattgtttgcgatttttactaccttttgtcaagagaaaaacagatgagttttgtatagctggtcagatacaaataatagtgacttcacagtttagcaattataatgggtactttttaaacatttggtactaaattatgttgctacaaagtaattaaaattaatatctagagctagtttttggtgaattattcatttattttgtactgctgttaggcagctctgtagttgctaatttaaccaatgagtcaatttgctgttcattaaataagaaatgattctgagaatcctgtcaggaattggggaatgaaaaaatatgcaaaataatggtctttgtcccagtagagttcgtagtctatttagtgtgcatgtttttccttaatgatgtatttgatctgacttttccttctcagaagaatcatacttgggattacaggtacatttgatgttatgtgatggataagtgaaaagttttaaaggagattttata

SEQ ID NO: 4650 - DNA, 759 bp, Macaca Fascicularis
  misc_feature (1)...(759): n = A,T,C or G
cacaaaactgatactantgggaggagtatttttgcttgtgaaaggaaatatttaaaagacatacttatttttattttatttattttttcagatggagttttgctctttgttgcccaggctggagtacaatggagcnatntcagctcactgcagcctccgcctcctaggnnnnnnnnnnnnnnnnnnnnnnnnnnnnnnnnnngttgggattacaggcacctgccaccacgcccagctaattttttgtatttttagtagagatgaggtttcaccatgttggccaggctgacctcagcctcgtcttgaactcttgannnnnnnnnnnnnnnnnnnnnnnnnnnnnnnnnnnnnnnnntgtgcccggccagacatacttatttttnnnnnnnnnnnnnnnnnnnnnnntttgttgtgacagatgtcactaacatccactttgaacaattagggaaaaatgacaagtcacacttcacacatggcttttgttgaagagagggatggggacagttnnnnnnnnnnnnnngtgtgccaagtatctgagcccccgctcagaggcagtttaactagagtgcctgttttgcagatgaggagacaggttcagagaggtcaagaaacttgctcaccatcacannnnnnnnnnnnnnnnnnnnnnnnncttcccaggacttcttttaagaaaagctnnnnnnnnnnnnntaacttagcaaaatctcttcacnnnnnnnnnnnnnnnagaattttgcgagaagatgagataaa

SEQ ID NO: 4651 - DNA, 1609 bp, Macaca Fascicularis
  misc_feature (1)...(1609): n = A,T,C or G
aaaaaaaaaaaaaaaaaaaaaaaaattgcaagactctgaggagagctggaggtgggtcagtccgcagctcgccgcgcggcagcaccttcctgcctacccaggccagtaggcgcgggtctcgggcctggcagaagcttctccggccccctgccctcgcctggcctcgccccgtcgcttgcgtgcttgtctcgtcctgcccccaggccctgccggtccccacccttaggccggcgtccctgcccggccctgcgcgagttggcgccagctcaggaagacgccctgaagccgaggcctcggaagcaggtttctcccggaccttctcctgccccgcgttcccccctaggctggcggtagggaccagaaccccccagcaagcccataaccggccttcgcgctcccggtggccctggctgccgccgaggcctcagcctggaaccccgctcctgccgtcggggacctttctgcggctgcccacacgcgaccccaggcaaggggtgggggcgcgggaccctccacgacagggcggcggggcgctctcccttcttcgaaatcagcgtaaactggacccgccccacctcccagaccttgggggagtcccgggaaaggctgtggcctgggggtctgcagggcgttggcagtagaggtggggagagaccccagctctttcctgcccctcagccgtgccttcctgcccgtgagccggggacagtggaggggagtcagggaggctcctccagaaggactttcttatgactcgtcctataaagcccctcgggcatagccatcctccccaggacccacgtactctcccggaccgtgctggaagctcagagccagaatgacttttccactgaggctggctggcccagtgggcggcagggacgggggctgtgaagagaaaactcacccgccagggtcaggagctggttgcccactgagtaaagcagaggggtccttgccgcttgcctcaggatcaaagccagttggtgaggcactgccttgcagttgtaggaggggaataacggcccccgtgggtgcttggttggaaagattaaaggagaatagcagtttagcacgattatttcacacagttcaaaccagcttatgtggcgtcttcaacaaaaagtaattgttgagagaagtgacaagatgaaggaggactctgagtccgagtctccctcctcgagtccctgtgtgagcagaggtaaataatcgaaactcaccaaccaggagaaattcacctaggactggggcagaaggtatacaccatgagcctggaaatgattaaaaaaacaatgaacacaggctgggcatgggggcttacannnnnnnnnnnnnnnnnnnnnnnnnnnnnnnnnnnnnnnnnnnnnnnnnnnnnnnnnnnnnnnnnnnnnnnnnnnnnnnnnnnnnnnnnnnnnnnnnnnnnnnnnnnnnnnnnnnnnnnnnnnnnnnnnnnnnnnnnnnnnnnncagctcctggggaggctgaggcaggagaatcacttgagcctgagagacggaggttggggtgagctaagatcacacaattgcaatccagccaggacagcaagagtgaaactccgtctcaaaaaaaaaaaaaaaaaaaaaaa

SEQ ID NO: 4652 - DNA, 746 bp, Macaca Fascicularis
  misc_feature (1)...(746): n = A,T,C or G
ccagagaggnnnnnnnnnnnnnnnnnnnnnnnnnnnnnnnnnnnnnnnnnnnnnnnnnnnnnnnnnnnnnggaagtctgctgactcctcagagcagtggcccagcaaggaggagatcaggcgcttttggaagctgaggcaggagattgttgagcacgtgaaggcagacactctgggaaatcagctcttaccgagggaattacctccaaatctcaaggcggccttgaacnnnnnnnnnnnnnnnnnnnaaagccaagacacgttttcagaaggaacatggcctcctccagggacatcttacccgacctcttgtcaccgtaccaaatggcgatccgagcaaaaagactggaagagagccgagcggcggcactccgagagctccgggagaagcaggctctgatggagcagcagagacgctccactgaccgcctggctccacccatccctgggccccaggagtccggccggcatggaccgcagccatagcacccctgtggccctcacttggtggttggctttggccagtgggggctcccagcaggaggccaaggaggaagaggagagcgagggcctcgtctttacttgcccggcttctctctgagctgcctggagctggccgagtccagcctctccctccttctgggttccggcaatctctccttccctggtctgtcctgcggatagctgcagcccggccctgactggcacagggctcctgcactgcccctgtggctcacctgctccctc

SEQ ID NO: 4653 - DNA, 706 bp, Macaca Fascicularis
  misc_feature (1)...(706): n = A,T,C or G
ctgacgtgaagagagctatgatatgcaagcactgctaactcatcctccgcccccacctcgaaacccacggcccctagtggagggacgctactcatccccattggtttcccaggggaggggtgttgtctggaagggcaggtttagatgcaaccttccagatttagaggcacggggaggacagtggctgagtggaggcgcccagacctgggcaggcagcaggctcaggcccacaccttgtgatatttgaaaccaaagctttccctctccgtggctttgccctccttattgcaaaccatgctgtgccttagggcccttctcatagctgctcctcatggccatgactcgaacagggatgccacctctttctgcataagcatagttagttgggtgaagtctttttttttttttgagatggagtttcactcttgttgcccgggctggagtgaagtggggtgaccttggctcactgcaacctctgcctcctnnnnnnnnnnnnnnnnnnnnnnnnnnnnnnnnnnnnnnnnnnnnnnnnnnnnnnnnnnnnnnnnnnnnnnnnnnnnnnnnnnnnnnnnnnnnnnnnnnnnnnnnnnnnccatctcctgacctcgtgatccacccacttcgacctcccaaactgctgggattataggtgtgagccaccgtgctgggccagttgctggcatcttaatgttcgtgggtgggacat

SEQ ID NO: 4654 - DNA, 762 bp, Macaca Fascicularis
  misc_feature (1)...(762): n = A,T,C or G
tatgatgatagactctagaaatttcaagaaatgtnnntactgtatatcaactctcaggttctagtgtgaaaaagcctatactttactattacttnnnnnnnnnnnnnnnnnnnnaactaagtttattcatgacacatttaaatttgatcataaataaaagaannnnnnnnnnnnnnnncggagttagtcatggtaatcattagtgatatttctgaacagttcttaacttaaaatacttcaaaggaagtaaaggtcatggcttagctgaaggaaatgctccagaaattggannnnnnnnnnnnnnnnnnnnnnnnnnnnctgtgtatgtctgtgtatataaaatgagaattatggcataattggagcatttgcattatcaacaaactcagattgagacaaaacttcgtcttacagctgtcttgattaaagccaagtgttccatgttgctgtgaagaatagcctctttcaaatactttggaaagtagtcgcttggaaacgtgtaaaggtattacatttttatatttaaacacctatagagatcttcaattccttgagtctgagcttgtggttggaattctaaatttgtatcataatctgtcttttgtgaaagattttgaaaatatgtatatataatattnnnnnnnnnnnnnnnnnnnnnnnnnnnnnnnnnnnnnnnnnnnnntttttctttatatttctgataacttgttttgcatatnnnnnnnnnnnnnnnnnnnnnnnnnnnnnnngcaaacactgttg

SEQ ID NO: 4655 - DNA, 753 bp, Macaca Fascicularis
  misc_feature (1)...(753): n = A,T,C or G
cctcacatcatggccctgttacaaagctgnttcccatttgnnnatcacatcagatcaaatcngannnnnnnnnnnnnnnnntgaagccgacgccactgttcctggcaagcctcgttgcccttcgatcccggcgttggcctccgtccctgtcannnnnnnnnnnnnnnnnnnnnnnggcgtcctgccatctccagctctgcctgcacgttgctcctgcatttctctccacctcataagactcttattccacagctctggccaggccaaagcatacatggcccagttagctcccttttacttgaaatattccctgaggagcccctaggtatttttctttactcaccagagacttgtagtcaaggccacactgatatcatttgggaattatttgcaaagtcacagctctggacttctctctccagctacatcatgagtttctcagctaaatcacaggcccannnnnnnnnnnnnnnctggtaaacactttcagtcacggaaggaagcctttttcggttctcagctctgccaaggaacttatttcatgtacacgaaaccaccaactgtgagaggatggctgcctgtatcctgttccccctcatcttttttttctttaaaaagatgggaaannnnnnnnnnnnnnnntaagtaacatggccctagaactacactctgactctgagccctgtgtcctgcccacagcaccaggccacgaagacgtagcacgtcgctaccctcacatttgcttgtaactta

SEQ ID NO: 4656 - DNA, 770 bp, Macaca Fascicularis
  misc_feature (1)...(770): n = A,T,C or G
tcaggcagctcatcgcctggggnnnnntgccaacgtggggnnncttctaacttcagcacttggcatgcggtcaccggtagcagtgcggtgtgttggagggaaacggtagctagtccttaccagttgccaacagcagctcctcgcctgctgtatcgtggatnnnnnnnnnnnnnnnttcttcagacaaggcattaaccccatggttaatggactggtcgccagtttttattttatttttatgaatctacttttccattgattgatttaagttcaggccacttttctgtcttttatttggttactgttgttatttgtttttaagttaggatgctttttaacagcctttagaagnnnnnnnnnnnnnnnnnnnnnnnnnnnnnnnnnnnnnnnnnnnnnnngcagaaaagggagagaggtgttgcattcctgtttggtaacctcagtctccnnnnnnnnnnnnnnnnnnnnnnnnnnnnnnnnnnnnnnnnnagagggtagctgcctgcataggagccttgcttccgattattcccttcccaatgttattcatccggacttannnnnnnnnnnnnnnnnnnnnnnnnnnngagaggcagtgaacaccacagcttctccccagccaggtgccttttacatcgggtttgttctccttccatggtgtgttgctgacattgtcactgagtcccatgtgaggtgctggtgagtattacctttcatctgtgccatgctctagaaccttgannnnnntagttcaccacctctgatggatc

SEQ ID NO: 4657 - DNA, 2613 bp, Macaca Fascicularis
aagagacgctggtctccttaggcgtgaagcttggatttgggttgggactttgaagtctcgccaaagggtgaatcatgtttaagaaggtcaacaggattgagcacaagaggaataagacaggaaaacgaaaaaaacttaatccatggattccacgcatcttcaaccaccaatgctatgtcaccttccttactggctgctatagttgcctttggaaattcagacaatggaaaaaaactaaagttggattttgttgctgcacttggaaagagcaattattttgcccgtgcctggtaatttcatttgtcttgtctgtgatgttgctgttcctgtggatagaaacatccaatgaatactttaactttgactgggtcatttttctaggaacaggatactggttttactggtctatttttattctgagtttagctgggatcctgactgcctactcttcattgctgttgttacttggattgttgttgctttgggaagggattgaactatacctgcacttgtgtcataagatcctgattctgctagtgattcttccgtgtgtcattttaatgttcattatatgcaaattctggaaagaaagatggctggtagctgggctgtctctgcagatctttgctccctatgtgcacctggtcagcataactgtgatggttatccttttctggcctgtggccatctacgtggcacgtttggaaagagaagttcgaatgagaagatacaggatgacacattctgagaaaaaaaggctcaagaaatgtaatgtaatcgcaaggttaagaggtctacaagtggctgttggattaccctttcttcttatctttttaagtctctgtttgatgccactagggatttattctccctgcattcaggagaaggagaatttggggcccaagccaaccctttttggacatagaggtgcacccatgttggggcctgagaataccatgatgtcctttgagaaagctgttgaacatggagcccatggattggagactgacgtacacttaagttacgatcgtgtgcctttcctcatgcatgactttgacctgagaagaacaaccaatatccgggaagttcagccagaatctgccttcaagaaccctgccaccttcagttgggatttcctgtcgactctgaatgcaggcaaatggtttgtaaaaccggagctcaagccattttacaatatgaaacctctatcaaaggcagataaagaaagagcaagaaatcaatcaattccaacactagctgatttattgacacttgcaaagaaggaaagaaaatttgtgatatttgatcttcgtggccctccaccaagacatcctctcagacacacatttgtccgtcaagtagtaagcgtgatccttgcctctaaaatcgagcaacatctgattttttggttgccagctcatgataggcgatatgtcaggtccatggctcctggttttcagcatgtgggccatttagtatccgttaaaacccttgctaaaaacaatatcagtataataaatgttgactacaagaagttgttccctaatgggttaagagattataaagcagctaacatccgtatcaacgtatacaccatcaatgagccttggcttttctcactggcctggtgctccaggattaactcagtgaccacagacaacattgggctcctgagtcagcttaatcaccctcacttcttcatgacaccaaagttctatatgttcatatggctccttgtagatatcatttctgtgctttttattgttgccatattttgttttcactggcggagagagactataaaagaaaaattgtttgaaacctccagcactctcacagatactcagagtagaagtgagaatgaggaagatttgcacatagccatgaaacctgcccgagttgtggaaagtccttggactctagcagccctctacccagctttatccaagagtggaaaggaacaccaaggccgtttcaattttgcagcaccatccaagaaactagtacctatcaagaatgctgtcacacctttgaaacctggcaagcatgacattcaaccaccgatgcccaccacagtctttgaactcacccaagcaccctccaggcaggctaaaagtaaggctacctttcaaactacattgcccaccctgaaggtggataagccaaccatgccctccgtagaggtcccctatccttaaataagagacctctaagagatccccatggccgaatactccaaagaatcctatgtcacaatatattcaactgcatctgacatatccttctatgtttccaaagaagaattatccacatctcccctgcttcttcctcttcctctctctgcctaagggtggtgatggtggggagtggttggtaaaggcacacagaagggccattgaggctctcaggggaaccattctgatctagctttctatcaagaatgcatctcaaggggctaggcaaggggaaaactgttgtgtgtggtcttggagctggttgctgtcaagtttatctcattctaacacctccataatattctctgctaaagaagtgactgtgcatataagtaagggcaacctctcaggaaaaaaaaaaaaaaaaaaaaaaaaaaaa

SEQ ID NO: 4658 - DNA, 737 bp, Macaca Fascicularis
  misc_feature (1)...(737): n = A,T,C or G
tcagaggtaggccaggngtcggccccaagnnnnnnnnnnnnnnnnnnctggctcagtggaacntcnnagnctctnnnnnnnnnnnnnnnaccaagcttctgggttctaaacccgatttgttggcttcctgggcttccaacattgattctgtaattcacnnnnnnnnnnnnnnnnnnnnnnnnnnnnnnnnnnnnnnnnnnnnnnnnnnnnntgctttcccttctatgacccactgaaggttccaagattggtaggttccaggattgggttggaggtttggtgacttgccgtgtggttcccgtttctgaggcctccctcatgttgcagatggcagtactacaagacaagaggtnnnnnnnnnnnnnnnnnccctgaccgcttggagcaggaataagcccccnnnnnnnnnnnnnnnnnnnnnnnnnnnnnnnnngcaaggaataaacttttactgcatgaaggggatgcgacatctaggttgacttagtacaccattgcccaccctactctaacacacacagaaatgggttctttgaaatggagtgatgctgttaacagacaggtaaagtatcaccagttgggggctgggcggtaaggaaaggtattttaggtcgtagcagaacatttgctaaaattgttnnnnnnnnnnnnnnnnnagaccttgtnnnnnnnnnnaaaaaaattattttcaataaaatctcctgccaacccagaatattctctccacaaatgtggaa

SEQ ID NO: 4659 - DNA, 1943 bp, Macaca Fascicularis
  misc_feature (1)...(1943): n = A,T,C or G
ggaggtttttggctcagggcacccaactgtcaggcacaaagacagcattgtgtccctaccctcactgttctcctgtgcccaggttattaacacaaattccattattgtcaaggctttggctagaatgacttgttgctgctggggctgaccattagaactgagatggaggaacgaaagctcccccagtcccgatcctcaccttccacccagtcccctcccactccccaggtcccataaagtgactggagcatcttagcatagaaagaagccgccacaccttcctgcataacctgggaagatggaagagctcttcaaagctttgctcttcatgtccccctgaaacaagggttactgtgagtcttgcacacagggaacatgcactccaaggttcctagccaggtgggtgctctgcaaagttagggcgaagagagtctggccacatgcagcctcgccactggagaaggattttcacctgccaggcgacagggcccttagcctcattaatcctgctagaacacacctacgggcagcccactttccacccagagcatcccttgaaggaggggccttcccagagtgctgaggattctggtcttctcagactccgatcagatgcacctcagccctgggatcagagccccagtcctgcctgccagtttcctttttcacttcaccatgagcataagtttgggtgggaactcagcctgttcattcacttaatactgagttcccactctgtgccagggcatgacctgtgcactgccaatagagcagggaacagcaaaaccccttcctcccaccgtgagccttggagaatgaatgcagggagtggccaaaggtagtgtctggggcttggttctcactgcactaacctcgccagcctggcccagcttgccctgatcccctgacggtccatgcacatgtgtttatacttgcattgttgactggggtccaattgcctttggcaaaggcatcaagcattcaaagatgttcagatcttttctgtctggctcttttcctcagaatgaggctccagtgtgtccctttggtcccttagccattatctgagaggctagaattctggcagtgtccccgtgcatctttccccagtgaaggagagagctctcggaccagtgaggtagagaagcaacccaccccggccgctggaagcagggaggtgaaatgtgtccgaactcctctcaggctatcagatggccttgagcggcaccaagtagaaaacgcactcctgcccccaacctgcttctcggcttcattgtgagacctcgagttcctcagcttccagaatgatccaacctagctgaaaacctgaagtccctcccgatacaagtccagacagtccccagccagggagaccaggtgttctctgacatcccacacacatcggcacacttgggggattgcaaaagaggggaaggggagccaaaggctggggccccagggtacagctgacactcagcacccctcccaaagagcaccccctgtgtgttctggatctctagaagagtttggtttgggccaagtagtgcttagttttaattttctctttctggaaataaatacttttagtaagtaaagatgctgctcagctatcatatcctgcaaagttagaagaaagatgggccannnnnnnnnnnnnnnnnnnnnnnnnnnnnnnnnnnnnnnnnnnnnnnnnnnnnnnnnnnnnnnnnnnnnnnnnnnnnnnnnagcccaggtaacatggtgaccccatctctaccaaaaaaaaaaaattcaaaaattagctgggtgtggtggctcacttctatagtcccagctactcaggaggctgaggcatgagaattgcttaggcctgggaggcagaggttgcagtgagcagaggttgtgtcaccgtactccagtctgaatgacagagtgagactctgtctcaaaaaaaaaaaaaaaaa

SEQ ID NO: 4660 - DNA, 2202 bp, Macaca Fascicularis
gactttcctgcgaccgcctggtctctggaagtatgtgtgctggtcgcgcccagccgcctcacccaaaactggtgtctgtgggacagtgtaagcgtcccttcgaggtcggaccccgtctttagggcacgactcctaaagttaggtctgaagacccgtgggcagcctgagcgctccaacttagccctggaaacgtttttccgtacagcaacatggcggcgcccatggactcttagtaaagaagaaagcttttttttctgtggactgaaaggggcgtttttcatgatcagtatttagatgggtgctgttttcatgaggagagtctgggaaggcggcgtccgcttctctgacaagggaaaaggatactttgtccttttaaggattcagtgacttcgtgacttggaggatagtggctagacccaaggaccaaagcaagaagtcgtggggggcccagaaagacaggaggatcacattgagattccagacataagatcaggttttaaccccttttggccaaatttaggctgaaaatgttgaattatcaactctgaagttaaaaagaaagtttatattaaaacattgcaattttccttagaatttctgtatatattaacatatcatgaatgctaaattctcttcaatgtgcatgtcaggtttatgtacttgtacatcacatctgtgtgtatgaagtgtatgtttattgaaatacaagacatttaagaagctgatctgggaagttggattttacttctagttcctaattcccagaggcttttttaaaggaagggaatgtctgtggttcaccagttgtcagctgggtggttactggatcatctttcttttatcaacaagataaactatcaacttcaccagcatcatgaaccttgttgcagtaaaaatgagttcactacttctgttcactttgagtctcttcaaatggattctgtgtcctcttctggagcctgtgctgcatttattgcttctgaccctaccactaagccagagaatgatgatggaggaaattatgaaatgttaacacaaaaatttgtttttcgacctgaactgtttgatgtcaccaaaccttatataactccagctgttcacaaagaatgccagcaaagtaatgaaaaggaagatctgatgaatggtgttaaaaaagaaatctccatttctattattgggaagaagcgtaaaagatgtgttgttttcaatcaaggtgaattggatgcgatggaataccatacaaagatcagggagctgattttggatggatctttacaattgatccaggaaggtctcaaaagtggttttctttatccactttttgaaagacaggacaagtgtagtaagcccattactttaccacttgacacctgcaatttgccagaattatgtgaaatggcaaagcatttgccttctctgaatgaaatggaacatcagacattgcaattggtggaagaggatacatctgttacagaacaggatttatttttgcgagttgttgaaaacaactctagctttacaaaagtgattactttaatgggacaaaaatacctgctaccaccgaaaagcagttttcttttatctgacatttcttgtatgcaaccacttctgaactataggaaaacatttgatgtaattgtgatagatccgccatggcagaacaaatcagttaaaagaagtaataggtacagttatttgtcacccctgcaaataaagcaaatacctatccctaaattggctgctccaaactgtcttcttgttacttgggtgaccaatagacagaaacacctacgttttataaaggaagaactttatccctcttggtctgtggaggtagttgctgagtggcactgggtaaaaatcaccaattcaggagagttcgtgttcccattagattctccacacaaaaagccttatgaaggtcttatactggggagagttcaagaaaaaactgctctaccattgagaggttttaaaagactacatcaagccagatggggaatatttggaattgtttgctcgaaatttacagccaggttggactagttggggcaatgaagttctcaaatttcagcatgtggattattttattgctctggagtctggaagctgactatgatcttgattaaagtagtggtttcttcattgtttcctcaaaaaaaaaaaaaaaaaaaaaaaaaaaaaaaaaaaaaaaaaaaaaaa

SEQ ID NO: 4661 - DNA, 645 bp, Macaca Fascicularis
  misc_feature (1)...(645): n = A,T,C or G
gtcnnnnnnnnnnnnnnnnncaaataaaaatcagccccaaacaatgtcatagagatccctcgagtagtnnncaggggagagataggttctcatttgaagtctcggagaaaactggatccatgttcacgtggaactgctctcacgnnnnnnnnnnnnnnnnncgcattaaactttaagcaggannnnnnnnnnnnnnnntgatatttgaggtttgactttttaaaaatctcattactcttaannnnnnnnnnnnnnnnnnnnnnnntaacctggggaggaaaatcttccttgactgcnnnnnnnnnnnnnnnnnnnnnnccaactaaattattgtagcaatactgcaattataattaattttcacccctctcaaaaatcttgtcaaaccaggaggctaaatagcttcacaaatgtaaaacacaccaggccatttcctctaaacagaccttaaagggttaggtcacgtgggtcacccttatccnnnnnnnnnnnnnnnngagggcctcgcacttgtatagatatgnnnnnnnnnnnnnnnnnnnnnnnnnnnngcttcaggttgtagtgannnnnnnnnnnnnnnnnnnnnnntccaaattagagtgtgtatgtgtgtgtgcctgtgttcatgctccnaaacatttc

SEQ ID NO: 4662 - DNA, 899 bp, Macaca Fascicularis
  misc_feature (1)...(899): n = A,T,C or G
aacagatgaaactcttnnnnnatcnnnnnnnnnnnnnnnnnnnnnnnnnnnnnnnnnnnnagctgtcattgagaacttaggttggcacgtagcgtctcaaggtatgcgttctctcgaaggaaagctatgcatcgctgcttcgtnnnctgattttgcttagattttgctttggttaggttgcgttttggggtttgcctttttctattgtcgcttcaatgcaatttggttgtaaagagttgattcctttgtgttcatctgttctgcttctcagcagtccatctcagtgtctcccttcaggaaccgccgagtgtcctctcgtaacatccaagccttttaatgaaatcgtactgaaatctgtatcagctaagagtcctccaatcctggtcccattaactccaagtgccttttttacagtgacaacagacagtccctcgctttttgttgttgttggttttcttaactcgtttaatgaaactgcctggattttatacagttattaaaggatgtcccttttgctttaaactgcatgctgccaagtgccatttggggtcagcatcctcatttcaacacagtgtgctctctagttatcatgtgtaacgtgggtnnnnnnnnnnnnnnntagactagaggacacgttagagatgcccttccctgttccnnnnnnnnnnnnnnnnnnnnnnnnnnnnnnnnnnnnnnnnnnnnnnnnngtattaactctggaatcctatggactcatcttgctcacccaacgtgggagtctggattgagcaagtgggctgaatgtgacgcttaaaaaaattaaaaaaaaaaaaatcttatgtactatccaaaagtgccagaatgactcttctgtgcattcttcttaaagagctgcttggttatccaaaaatgaaaatcaa

SEQ ID NO: 4663 - DNA, 1976 bp, Macaca Fascicularis
  misc_feature (1)...(1976): n = A,T,C or G
ctcgggctgccgtgggcagcgcggggcccgcggtgtagagtccgccgccccggagccgcgtcccgcacccggacggtcccgagccatgggggtgttgatgtccaagcggcagacagtggagcaggtgcagaagggtctgcaccagggtattccatgatggctgcctgcgccgcatgggctacatccaaggagacagtgcagcggaggtgatggagacggcccacacagaaacaggctggagctgccactactgtgacaacatcaacttgctgctgactgaggaggaaatgtacagcctcacggagacctttcagaggtgtaaagtcatccctgattgctccctgacactggaggactttctgcgctaccgtcaccaagcagccaagcggggggaccgtgacagggccctgagtgaggagcaagaagagcaggcggcccgccagtttgctgccctggatcctgaacatcgaggccacatagagtggcctgacttcttgtcccatgagaccctcctgcttctgcagcagttgcgtccccagaactctctgttgaggcttctgacagtgaaggagcgggaacgagcccgagccgccttcctggcacggggcagtgggagcatcatcagtgaggcagagtgccgccgggcccagcactcttggttttacaaacagttcccagaggctccttcctgcagtgtcagtatcagccatgtgggtcccattgcagatagcagcccagccagcagcagcagcaagagtcaggacaagaccctgctgcccacagagcaggagtccagatttgtggactggcctaccttcctgcaagagaatgtcctctacatcctggctgctcgccccaacagcgcagccattcacctgaaacccccaggatagcatggagcagagaagctcagtttgaggacagtgacgtcctctcccctctctcctttctcccttcccccaccaacctctggcactgagactcatggggttgggacactgccagcgtcttaatttgtcactaagctttatggcactgaaatcaccattcccctcacaacagaggcagtgaatgcattgccacaaggagaagccctgggagctatggcagcatcctctcctggaccatccctgccccacatcatagatgggacctgccaccacacttacacacacgcacacatgctgcccagctgtccatgccatcagaagcctggttctttttggttgagaaaggaccaaagtccctttgtggagcccctgatatagaggaggaggtctccactcaccccttctataggccagttctaatttccaatagacaaatctccggccaaatcattcttaataaggggcatgtcagattcgcatgcctgcctagagatcctagagatcttaacgggccccactttccccactgaaaatcccttctgcggtgagctgctgttactagtaggtgtgtattatgtacctcggctgtactgagttgggaaaagagttaaacatcaccactgaagttcagccctttatttatttaaattccaattcctggtgacagagaaggcaactagcctggagaatcctgactggaagaggaggaggcagcccctcccagggactcaggattctaggaacctctcagtcaggttacctgagtccaaaagtctttagcaggggtcgggcgcggtggctcaagcctgtaatcccagcactttgggaggccgagacgggcggatcacgaggtcagnnnnnnnnnnnnnnnnnnnnnnnnnnnnnnnnnnnnnnnnnnnnnnnnnnnnnnnnnnnnnnnnnnnnnnnnnnnnnnnnnnnnnnnnnnnnnnnnnnnnnnnnnnnnnnnnnnnnnnnnnnnnnnnnnnnnnnnnnnnnnnnnnnnnnnnnnnnnnnnnnnnnnnnnnnnnnnnnnnnnnnnnnnnnnnnnnnnnnnnnnnnnnnnnncaaaaaaaaaaaaaaaaaaaa

SEQ ID NO: 4664 - DNA, 733 bp, Macaca Fascicularis
  misc_feature (1)...(733): n = A,T,C or G
aatgcagccacagcaggctgcagtcaggagcaaaccacaacngnnnnncagattccagccaagtcagggtctatatggatnnnaagcannnactggannnaaggtacacatgggtttgaaaaggaggaggagggggctgcgcttattggagaaccttttaaatgttaaaccggtggtgacaccagaagaaattcaacccgcctaaaccgaattcagtgccagagtttggaagaagacgtgactgtccttcacctctacccacctgagaggtggacaggaaagagaaggcaaaggtaagacagtaacaaacctcatttaatagacaccttatcttttgaataactctctaatgttgactaaggaaaagctgggaaaccttctaacatgaagatagcctggagatccagaagccattggccctgacttatctgttcttcatctacagcccattgtttcctccaagcacgcaccccggggaagcagggcaaaggagttaatgttcaataggcatccgctcccttaaggtgcacctctgggggactgaagggcaaccctgccttaccctagaatgggaccaaacacaggggaggagcggtttggtgcttttcaggcaggatccccacagcttcttttaagagaacaggcactgcctttaggagagataatcccacaatggatgcccattaaaagtattaggatgtatactgccaccatgatccctgggaggagagct

SEQ ID NO: 4665 - DNA, 678 bp, Macaca Fascicularis
  misc_feature (1)...(678): n = A,T,C or G
ggcacagggagcnnnnntatatnagnnnnnnnnnnnnnnnaggttgtcagttgatcagttgattgtttgcaacctggaatgtattttcctttagagaccacgttatccacggtggttaggcccctagannnnnnnnnnnnnnnnnnnnnnnnnnnnnnnnnnntgaaatcgaataatgtaataggtttgctaaagaatctaaccatcaaatataannnnnnnnnnnnnnnnnnnnnnnnnnnnnnnnnnnnnnnnnnnnnaatctggactgtccatcccagccacatcccacctactggacagtgggggtagagatgccaccagactacaggtgaccagagtggcctgaaacatggtgtccagcaaannnnnnnnnnnnnnnnnnnnnnnnnnnnnnnnnnnnnnnnnnnaggaggagggtgaaggagggtgaagggnnnnnnnnnnnnnnnnnnncctccagggacatccgtcagctgctacctctgctgttgtctggaaggttcannnnnnnnnnnnnnncttctgcttgtctgacttttggctcctatggcccatatcctgccctgcccaccannnnnnnnnnnnnnnnnnnnnnnnnnnccccatgtaccnnnnnnnnnngccagcgcacagcacttttaatgtttttagtgctagtaaccnnnntttgaactc

SEQ ID NO: 4666 - DNA, 1006 bp, Macaca Fascicularis
cactaaaatctcagactttagcattaaacaaaagacaaaagtggttgtacttacagagcgtttgtgttgttgcatatgctagctaggacttgtcgttaacagactttatttttgctagtccggagttgtgtattactcatgaacagcagtgttcactgggctatttgcatcagtacacttgcaaaaatttaaaagagtttaactgtcttcaaggggcttatgttattcttatatagacaggaagtagtggaaaaaaggtaacagtgaagtgctagtgaaagttatagacaaggaactatgttttccttgaattttttaataattttactgagtttgtctagctttttattgtgaaaaaattcaaacaaatggaaaagtttaaagaagaatatagtataattgcagtatactcatcacctaagttaacatattgctgtatttgttttatttatgtgtgcttgtgtgtgtattgggtgtgtgtgtatatgtgtatttgttgaaacattttggaaataagacacataaaacatgacatgaatctgttaaatattcaacaagcattttctaatgacaagggcattcttaactataataccattattatacctaagaagattaataggaattctctgatttcatctaataggccaatcttacttaaatttctcaattatctcccaaatgtcatccataaaagcttttttgtttgttttgcttttttggttgtagaatcaggaacctatcaaagcacaaatgcagcatttggctgtcatgtctcttaatttagaatagtcctcatcttttcatgatactaactttttgaagaggctagtcaattgtcttgtagaatattacacatttttgattaactaattgtttcctcagagtgtctttaagttgttcttttgtcccctgtggtttctgtaagccagaaacccgactgctttgttagatttgtgaaacactttttgtttttttagacaggttctaaaaaaaaaaaaaaaaa

SEQ ID NO: 4667 - DNA, 656 bp, Macaca Fascicularis
  misc_feature (1)...(656): n = A,T,C or G
gctggagaacggcgacataaatcgcaaggtcctnnnnnatctgatctttaaccaacctgaccggcggcagctgctcaacgccatcacccaccctgagatccgcaaggagatgatgaaggagaccttcaagtacttcctccggggataccgctacgtgattctggatatccccctgctgtttgagaccaagaagttgctcaagtatatgaagcacaccgtggtagtatactgggtcttaccatgttgcccaagctnnnnnnnnnnnnnnnnnnnnnnnnnnnnnnnnnnnnnnnnnnnnnnnnnnnnnnnnnnnnnnnnnnnnnnnnnnnnnnnnnnngcctggggtgacctctagagnnnnnnnnntccattgctctgccttctacactcactcttacccaccccacccctacctgcaacatgattatctctgctggcaaaacaaccccaccagcctctttggggatggcagcccaccatttgtcaagccaggaagtccttctgacaatctaccttaaatctctcattggttccctcagggaaaattgaaagaacgaacagcaaaaagaaaaatgtttnnnnnnnnnnnnnnnnnnnnnnnnnnnnntaaataccccccaaagagggtggggggacgggaattaccttcggacaca

SEQ ID NO: 4668 - DNA, 694 bp, Macaca Fascicularis
  misc_feature (1)...(694): n = A,T,C or G
acagaaagccactgtgannnnncagagggacgccctggaaggccaacnnnnnnnnnnnnnnannnnnnnnnnnnnnnagctacnnnngctgacaannnnaggttctccnnnnnnnnnnnnnnncccggaccttcgcannnacgattatacggaaggaaaagctaagaactctggtgaaacatttcgacatcacatcactcaccactttaacactggaagccaccgaacatgtccttttgaggagggtgggacacaacagtgcagaagtaagtgctaatttcaaagctatcattttctgtttttctaagataaagtacatgaattccaggttaaatgttcactttaaggtaatnnnnnnnnnnnnnnnnnnnnnnnnnnnnnnnnnnttggctgtcaagaatatcgannnnnnnnnnnnnnntaaacttgtgataaggaagatgaagggtcttcagagaagaacctcttaaaaggcccacgggtgcaccagggctgaggtctgatggagaggacnnnnnnnnnnnnnnnnnnnnnnnnnnnnnnnnnnnnnnnnnnnnnnnnnnnnnnnnnnnnnnnctccctcccggacactcacctcgccatccctgccgtcccaaggctctctctcaacgatggtagggaaagccccgcctccnnnnnnnnnnnnnnnnnnnnnnnnnnnnnnnnnnnccct

SEQ ID NO: 4669 - DNA, 652 bp, Macaca Fascicularis
  misc_feature (1)...(652): n = A,T,C or G
nnnnnnnnnnnnnnnnnnnnnnnnnnnnnnnnnnnnnnnnnnnnnnnnnnnnnnnnnnnnnnnnnnnnnnnnnnnnnnnnnnnnnnnnnnnnnnnnnnnnnnnnnnnnnnnnnnnnnnnnnnnnnnnnnnnnnnnnnnnnnnncaaaaataaataaataaatacataaataaaaataaataagcctgtggtctgttttgagggaaaagtaacataactctgataactagttatgataataactatgatagttaaaagtatgtcattttaaagatttcccaaaccactaaatttgttttatgaattgattttatttgaagttatataatgtagtcaactgtatgtggaagtttgttcttgtttctttgtcagtaaccttaccagttttataatgaagttttcagtggaattaaagaacttgaaagcagtcagttacaaaaaggtagttttgatcaagtagtcttaatatgtaaatttgcaagtttttgtaggacccccaaactcgttctccatcggaattaagagggcctatggtaggcagccatgaatcataaaaataagcctggcgagttctgttgttaaggggcatagcattaatttttgcagtattaaaattacacttcttgacttcagagtgtctcatttgcgtgcac

SEQ ID NO: 4670 - DNA, 771 bp, Macaca Fascicularis
  misc_feature (1)...(771): n = A,T,C or G
aatnnnnnnnnnnnnnnngtggtgacagtcaccatgaatgtgngggcaggtagaaaccacagtgttaactnnnntnnnnnnnnnnnnnnnnnnnnnnnnnnnnnnntacnnnnnnnnnnnnnaaccaacatagtgacacatagggcccaagaaaannnnnagaaatcagnnnatcggtgaggatacccggctgaatattaattccagtcatnnngagcatgagcctttactgagacgagaacaacaagctggccntgatgaaggtgttctggatcgtcttgtggacaggagggaacgaccactagaaggtggccgaactaattccaataacaacaacagcaatccatgttcagaacaagatgttcttacacnnnnnnnnnnnnnnnnnnnnnnnnnnnctgggccatcaaagcccagaagagcacagaggcnnnnnnnnnnnnnnnnnnnnnnnnnnnnnnnnnnnnnnnnnagcagtatacagataggtgagtcaacacnnnnnnnnnnnnnnnnnnnnnnnnnnnnnnnnnnnaaacgtgtgaaaactccctattctcttaagcggtggcgcccctccannnnnnnnnnnnnnnnnnnnnnnnnnnnnnnngaagtcaacnnnnnnnnnnnnnnnnnnnnnnnnnnnnnnnnnnnnnnnnnnnnnntttaccttgcagaaggaggcactgccacaaccatggtgtctaaagatataggaatgaactgtctgtgaaatgttttcaannnntatggagtgaaattattttg

SEQ ID NO: 4671 - DNA, 590 bp, Macaca Fascicularis
  misc_feature (1)...(590): n = A,T,C or G
cccccaacagagccggggcgcaggccggcgccagggcgctaatcccggcgcgggttccgatgacgcagcgccccgcctgggagccgcgggcaggccaggctggcggagcccccagacctcccagtggggacagggaagggcctggcctgggaagagcacagccgcagatcccaggcccctggccccccactcaagactaccaaagccaggacacctcaagtctccaagtctccagccccactacctaccccaccccactcctgtattcttttgttttttagacagggttttgcttccttnnnnnnnnnnnnnnnnnnnnnnnnnnnnnnnnnnnnnnnnnnnnnnnnnnnnnnnnnnnnnnnnnnnnnnnnnnnnnnnnnnnnnnnnnnnnnnnnnnnnnnnnnnnnnnnnnnnnnnnnnnnnnnnnnnnnnnnnnnnnnnnnnnnnnnnnnnnnnnnnnnnnnnnnnnnnnnnnnnnnnnnnnnnnnnnnnnnnnnnnnnnnnnnnnnnnnnnnnnnnnnnnnnnnnnnnnnnnnnnnnnnnnnnnnnnnnnnngccctgtattcttattcttcagatatttatttttc

SEQ ID NO: 4672 - DNA, 728 bp, Macaca Fascicularis
  misc_feature (1)...(728): n = A,T,C or G
tgaagccagagtttgagnnggcagcagaagcccnnnnnnnnnnnnnnnnnnnnnnnnnnnnnnntgcagctgtcgatgccactgtcaacaaggnnnnnnnnnnnnnnnnnnnnnnnnnnnnnnnnnnnnnnnnnnnnnnnnnnnnnnnnnnnnngaaatatgcagtgcccgnnnnnnnnnnnnnnnngaagtttctcgagtggatgcaaaaccctgaggcccccccgccgccagagcccacgtgggaagagcagcagacaagcgtgttgcannnnnnnnnnnnnnnnnnnnnnnnnnncctgaagaagaagaaacacaccttggtcatgttctacgccccttggtgcccacactgtaagaaggtcattccgcactttactgctgctgctgatgccttcaaagatgnnnnnnnnnnnnnnnnnnnnnnnnnnnnnnnnntcaaagacaagaaccaagacctgtgccagcaggaggctgtcaagggctaccccactttccactactaccactatgggaagttcacagaaaagtatgannnnnnnnnnnnnnnnnnnnnnnnnnncaattatattcgagccctccgggagggagaccatgaaagactagggaaaaagaaggaagagttataannnnnnnnnnnnnnnnnnnnnnnnnnnnnnnnnnnnnnnnnnnnnnnnnnnnnnnnttctnnnnnnnnnnnnnnnnnnnagacaaagttttttatagcc

SEQ ID NO: 4673 - DNA, 346 bp, Macaca Fascicularis
  misc_feature (1)...(346): n = A,T,C or G
gnnnnnnnnnnnnnnnnnnnnnnnnnnnnnnnnnnnnnnnnnnnnnnnnnnnnnnnnnnnnnnnnnnnnnnnnnnnnnnnnnnnnnnnnnnnnnnnnnnnnnnnnnnnnnnnnnnnnnnnnnnnnnnnnnnnnnnnnnnnnnnnnnnnnnnnnnnnnnnnnnggctcaccaactgatatatttcacagtaagcacagtatttaaattctcattttagaaatactgataataaaagacaattccggttaagcacttccagtcaggtaaaaatgccattctgcgaagttattgagcccttttcacacctggtttcctaaagggattttcacgagaatttcaaacatca

SEQ ID NO: 4674 - DNA, 703 bp, Macaca Fascicularis
  misc_feature (1)...(703): n = A,T,C or G
accaaaagtacttgacctcaagtaaccaacagtaatgcaaacttgctttaaaggaaccaaaggcattgccaagtatttgccaaaaggaggcactttttatttaaaatttgagactaatgagatctcaaaaatcagtcccaaaaaggtattatccatctaaggttataattttcacaaagatgtagatatttctctattgttttcatgtaaaatagcatagagtcgttttgttggtttaagaataacattcagtagtaatacaaagtttttttctatgtagaaattagttttcttttcttgcttgcagtagaaatgcaatgtgataggtgtttctcttcttcttttcattgtcacattatgtcttagcatctcactttatgaaaaaaaggagaaagataccaatctgcagagccctgcttgctaaagcactcgtttaatcaacacaaaattatggcaatcgggggtccattcatgtattgcctttatgttgttttttaaaagaaaaaccatgatgcctttgtatttgctgtttgcacccctgaaatcaattccatatcatgtttgaatgccatacattttgcacatgtactgtacataggtaatgcatactgtatttttatatnnnnnnnnnnnnnnnnnnnnnnnnnntgtacatagtggcaatattgtagctgatcgggaaatgtttgatatctcagcaatt

SEQ ID NO: 4675 - DNA, 2342 bp, Macaca Fascicularis
gccgctggctaggcaatgctgtctctcttgctgatcctctcaggcctgggccggctgacctccgcgggcccgcattctgaaacaccagttctgcaaattacagtaccacggaagatccagacaaacaccaatgatggcgatgtttcagaaacgcatgccacttattccatcaaaattgaggggaaaccatatactttcctgcttgaaaaacagtcatttttacacccacatttcctggtgtatttatacaatgaatcaggaacattgtatgtagattcttcattttcaaagggtcattgtttttaccaaggatatgttgcagacattccaaaatcagctgtgacactacgcacgtgttctggactcagaggattattgcagttagataatattagttatggtattgaaccattggaatcttcacctacatatgagcatgtagtttatcgaataaaaaatgatgctattggtcatttctcctttcaagaaaattaccctgtggctcaatatatagatcagtcctacaggattcttgtcaaatcagatataaattcaggtgccatgctatcgaaaagaactctgaaaatacaaatcattatggataaagccatgtatgattatatgggctctgcagtggcagttgcagttgagaaagttttccaaatctttggtcttatcaatactatgttttcccagcttaatataacagttatgctgtcttccttggagatctggtcagatcaaaataagatttcaacaagtggtcatgctgatgaaatactgcagcgatttttgctttggaaacaaaaacttttgtttcaaaggtctcatgatatgacatacttattaatttataggaaccattctacttatgtgggagcaacatatcatggaatggcatgcgatccaaagtttgcaacaggaattgctctgtatccaaagaaaatcactgtagaggccttttcagttgttatggcacagttgcttggaattaatctgggattgacatatgatgatatctacaattgttactgtccaggacctacatgcataatgaatcctgatgcgatacgatcccatggtatgaagttttttagcagttgcagcatggatgaatttaaacagatagttctgcagcctgaacttaaatgttttcaggataaaacaatttcagaaatgacttaccaaaaatctgcaacttgtggcaatggaattttggaacctacagagcagtgtgattgtggctatagaaaggcatgcacttttaaaaaatgctgtaatcctgcagattgtactctaattggatttgcagaatgtggcagtggaccatgctgtaacaataaaacttgtacgatctatgcaagaggccatgtctgcagaaaaagcatagatatgtgtgattttccagaatattgcaatggaacatctgagttttgtgtacctgatgtgaaagctgctgatttagaatactgcagtaataagactagctattgctttaaaggaatatgcagagacagggatagacagtgttcacagttatttggaaaattttctaagtctgctaatcttctgtgtacagaagaagtgaattttcaaaatgacaaatttggaaactgtggtcaacgctgtcctttttttgatatcctttgtggaaagattgtttgtcactggatacattcagaactagtaccaatgacagacttagatatacaatatacttaccttggaggtcatgtatgtttgtcggcacatgcaagaaatgcttcaaaacaattggggacctatacagaagatataactgcgtgtggtcagcaaaaggtatgtcgttctcgtggatgcagatatcttagtgaactaaatataacaaaatgtactacaaattgtggacagaatgggatttgcaatgaccgtttccattgtcaatgtgatcctggttatgctcctccagattgtgatccatcaatgtcatcaccaggaggaagtatcgatgatggattttggctttcagtagataaaagtgtacccttgtttccaaaacaacgtgctgctcctaaaaacaatggtcttttgatcagtttctacattttttcacctttgctcattttaattgctattgttagtcttaaatggaataaaatgaagagattttggagcaaagtgggaacagtaagcagcagatctatctcagaagacagcagtagtaacaacagccagtcacagagttaaagtaaccaagtgataaaatcaaagccatcagatgaagaaaggatattaccaagaaactcaccattaacttaaaactttcaatttcacaaaacaaaataaatcatatgactaaaagc

SEQ ID NO: 4676 - DNA, 1444 bp, Macaca Fascicularis
attttctccccagggagctctaggctgtggatgtgagaaggggagcaagagaggcagatggcgacaaggaacagccccatggccctgggcacggctcagggtgaccctggagaggcaggaacacggccaggctctgacgccggcctccgggacacaggtgcggccactcagctcaagatgaagcccaggaaggtgcgcaagatcaaggcggttgtcatcgacctgggctctcagtactgcaagtgcggctacgcgggagagccgaggcccacctacttcatctcctccaccgtgggaaaacgctgccccgaggcggccgacgctggcgacacccgcaaggggaccctggtgggccatgagctgctcaacacggagacacctctcaagctggtgaacccgctgaagcacggcatcgtggtggactgggactgcgtgcaggacatctgggagtacatcttccgcacggccatgaagatcctgcccgaggagcacgctgtgctggtctccgaccctccgctcagccccagcagcaaccgggagaagtacgcagagctcatgttcgggaccttcggcatccccgctatgcacgtgacgtcccagtcgttgctgtccatctactcgtacggcaagacctcggggctggtggtggagagcgggcacggcgtctcgcacgtggtgcccatctccgagggcgacgtgctgccgggcctgaccagccgcgccgactatgctgggggtgacctcaccaactacctgatgcagctgctcaatgaggcgggccacgcattcacagacgaccacctgcacatcatagagcacatcaagaagaagtgctgctatgcggccttcctgcccgaggaggagctcggcctggtcccggaggagctgcgcgtggactacgagctcccggacggcaagctcatcaccattggccaggagcgcttccgctgctctgagatgctcttccagccctccctggcgggcagcacccagccgggcctcccggagctcacggctgcctgcctgggccgctgccaggacacgggcttcaaggaggagatggccgccaacgtgctgctgtgtggcggctgcaccatgttggatggtttccccgagcgcttccagagggagctgagcctcctctgccccggggacagccctgcggtggctgcagctcctgagaggaagacctccgtgtggaccggcggctccatcctggcctccctgcaggccttccaacagctctgggtcagcaaggaagagtttcaggagcggggcagcatggccatctacagcaagtgctgagcctgggcatctccacagacaaggcccccagcacaggtggccgcaggccactctgtacacatttacagaatttcacataaagctttactctgaaaaaaaaaaaaaaaaaaaaaaaaaaaaaaaaaaaaaaaaaaaaaaa

SEQ ID NO: 4677 - DNA, 572 bp, Macaca Fascicularis
  misc_feature (1)...(572): n = A,T,C or G
ccagggcaaggccaagcacctnnnnnnnnnnnnnnnnnnnnnnnnnnnnnnnnnnnnnnnnnnnnnnnnnnnnnnnnnnnnnnnnnnnnnnnnnnnnnnnttccacnnnnnnnnnnnnnnnnnnnnnnnnnnnnnnnnnnctgagatcacccttcacnnttatgtgcgggcccagggccccccgccagagccgggccccgcgccccctgccacgccagcgccccccgcctgctggagcgacccgcccggccagcactacttctccagcctcgccgcggctgcctgcccgcccgcctcgccctctgacgccgccggcgcctcttcgtcgtccgcctcgtcatcttcggctgcgtcggggccagcccccacgcgccccgtcgagggcccgctcagcgtgcggagccgcagcaacagcgctgagcgcctgctggaggccgtggccgccgccgccgctgccgaggagccccaggaggccgcgcccggccgcgcgcgcgccgtggagaaccagtactccttctactagcccgcggcgccgcccgggtgggacannnnnnnnnnnnnnntgaagacac

SEQ ID NO: 4678 - DNA, 786 bp, Macaca Fascicularis
  misc_feature (1)...(786): n = A,T,C or G
atagtgagaaaattcaatgtagcagactactgagaaactactgtgcttctcaggctttctttgaggtcctgtatatacagcactgaaaagagagaaaggtctctgcccccatgcattctggtggaagagacaagcaagcaatgaacaaataagcagaaaacctagttttagttagtgaagaatgctgtaaagaaaatataaatgcgatagatagactgctggcaggctagtgtagataagtggtctgaaaaggtgactaagccgagggcgtgtgagctggggcctaaacaactagaaagagagcgccctgtgaacatccggagaaggggacccaggcagagaaaaggaaatnnnnnnnnnnnggtaggaatgagcaggtcagattcaaggcagtaaggtcaggccccctgaatcttcaggagagttggggacttcatgcaaaactccagcctaggctttcagagtcaaagggcgatacagtgggtaccaagcccctctgctctccactttgtagagcctggcatgaggtggcatgtactagaattggatcctaggtgctnnnnnnnnnnnnnnnngggcctcatgggtgggagctgcctcgggctggcttgcttggccatagagccatgggaggaacctgtcagcccggagtgcctgccacctagacactgatgctattgtgtgctgcctcaagacagctggnnnnaagacattttgtagnnncttttccagttttactaaaaaatttttccattgaaaaaaaaaaaaaaaaaaaaaaaaaaaagg

SEQ ID NO: 4679 - DNA, 2104 bp, Macaca Fascicularis
tgttatgttctttttttgaccaatggggaggatttagtggggaagaggtgagtttatcacagagaataggaaaaaattagtcctgatagagagtttgtattagtagacttaggtgggaaggaggagcagaggcaggagttcatactttggggccacctttgttggtgaaggcaggaaggattggggataaggatgcatcagatttggtttgggaaagggagtcaactagcactgaggaaaaggacagaggcccagccaaccgcacttgttaattgatcatggagcctgggtattttctccactgtggaggctgagctttgccaatggtagtttgtacttctttgatggtaaatgagattttaaaagtgatttcataaacatttatgtcttttgctattgtgtatattactcttagagcagtgtgcagcaggcagtgaaagaatgaataattggtttaggtacacacggcttgttggagatgaagacctggtttggtgcatcagaaaattaaactcatgtgagagcgtgcgtaagtgctgagatgctttgaaaggtcagtggtaaacaaattgcagtcttttctgctcaagtggtttatgaactttgattttgacttttctgtagagatgggaagccattgaaggtttgttacaaatgatgtttccatttagaaagatgagttggatagcgatatatggactgaaccaaaacagaaataaagcctttaagtgtcaaagacggagcaggtgcagatgacctttgcgtagacagttaagacactagaatgtaagtgtttagaaagatgcattattaatgtgctatgacaaatacaagtttatttctgaatggaaaagatgtatagatttgacctgagtttagaagttgagagaccttactcagtaccgtaatttcagtgggtgagatttttataagcagctttggaatctaggtctttatagggagctgataaaattgaacttgtttcatgcgtagttacattcatgagggggaaacaagcctataaaaaaggtttttatgtcagtgatacatccatgattatcaccctaattggaacaccagctctccagaagggatatttttgttttgagaatatcttgtgattgttaagcctcagtgctctcaacttgctcaaaaccaaccttgtttgagaattgagtaatgtgcacagtgtgatctatgttcatgaacattgcatgcattaaaatgccttccatataacctgttcattagattttagctgattaaatactgaccctgctcggaccattgatttaaacttccttatttgaaatatctattaattggtaacacatatttgtactaaggagagtgctacagcttcttgacaatctaaataggataggaaaatgtctgattgtgccacaatgaagctgacattgaaaagtttctcgggagttcttgattgacaagatggaacaatgattgtatttagatcttgttgaaatttgctgtctaatctatggccactcttggaccacatgtaggttgaatgaaattattgtcatactggaagatccataagccaaagaaagagtcctgggaggccatgtccctgtgaaggattgttctcccccaaccctgcttccttggctttccgaagtgatctggcaacccagccctctgcatatggactccagagagagcctgctgctccagcagctggtgtggccatttctgaatggaaaatctgtgatctaaaatagcttcagaaccttatctgcacagctgtatgttcctgttaatggtcactgtaacaataaggattgtcccaagatggccttattatcggagagaactattcaaaaggcaagcatgttgaagtcttaagagttgcttaaaaatatttaactctcagcagatttaagtcacgtatattcatttggaaacctagtcagtgattaaggcatatggtcaagtgttcataatttatagctagctttcctgtgatttactaaactttcatttttaaagtcactatatggcgaaagtaggatatgagaccctcaaaaatttctagcccttctgctcctgaactaggtgatagcaaaaaaaaaaaaaaaaa

SEQ ID NO: 4680 - DNA, 682 bp, Macaca Fascicularis
  misc_feature (1)...(682): n = A,T,C or G
ccgcggaggcgtnnagacggcgaggaggggcggccngagagcacggggcggggcctccctgaggagcgtgacgtggctactcaccggctccttccctcgccgggccactcgcgggagctgacggattcgaccgcccgggtgccgccgggcccgaaggcctgccccgccccggaggccctccgagtgcgagggaggactaaggggacgactcccggctcacggtctgaggccgcccctactgcgggctcaggggcgggacgcgcaccaggcctctgtggctcgcggcctgcccccgcggcgacggtggccaagggcctgggcgggccgcgcacatggcgccgggaggaccgggcgcttgatttgcccttaggccctaaagctgggtcgcggctaggctaagggagggaacgcggtgtcgacccccggcctggggcggctcccaagtgaagtgggctcccgggcccggccgcttggccccctggcgcccggcgcctccccactgtgaaagttgcctcctggcgcctccgggcactgcgatcacctgtaatcttgagccacgtccgagatgaaagcggagttacctnnnnnnnnnnnnttagnnnnnnnnnnnnnnnnnnnnnnnnnnnnnnnnnnnnnccgcccggattcccacccaccaactaaaagagtttaaagggtactg

SEQ ID NO: 4681 - DNA, 135 bp, Macaca Fascicularis
tgaatatattatatttgcattctttgctacagatggctattttcaaataaccatgttattatgatcccatttccaagaatgggagttcactaagttgtaatcacctctgacaacacactgatgctatgcatactt

SEQ ID NO: 4682 - DNA, 744 bp, Macaca Fascicularis
  misc_feature (1)...(744): n = A,T,C or G
gaaggtaattgatacacaacagatgacttggnnnnnnnnnnnnnnnnnnnnnnnnnnnnnnnnnnnnnggaaataattgaatagttatgtatgtaatnnnnnnnnnnnnnnnnnnnnnnnnnngtcagaataactccacacatattatttctataactacatttaaatcattgtcagaaacttggnnnnnnnnnnnnnnnnnnnnnnnnnnnnnnnnnnnnnnnnattgggtgaaaaaaaaaagggattcctttcaaaagttaagagaaataagaaattatnnnnnnnnnnnnatattcagtaaatggcattctcttgtcagtaaaatggagaaataagctaaaaataattggctaagtcctattaagttacaggattaagtgtattgtattttcattcaaaattgggtgttcattaatttataatcggtagtatagctaaattgctatgtttgtatcaaannnnnnnnnnnnnnnnnnnnnnnnnnnnnnnnntgaacagaagttgaaacctacttagttcagtagggcagctcagggattttttacacaatatgtatatcttcccattttaagttagaattaattcacattatctggtacacannnnnnnnnnnnnnnnnnnnnnnnnnnnnnnnnnnnnnnnnnnnnnnnnnnnnnnnnnnnnnnnnnnnnnnnnnnnnnnnnnnnnnnnnnntttgttggnnnnnnnnnnnnnnnnttgtttcatagctctgtatttcct

SEQ ID NO: 4683 - DNA, 673 bp, Macaca Fascicularis
gacatttgttacttttttcttttttcggagggaggggttgaagactgaaacctcccttggaagaataccagaggctagctagttgatcctccccaacagccttgtgggaggattttgagatatttactctttatttgagccagtcttgcaaggttaacttctcactgggcctagtgtggtgtccaggtttttgccttgcttcacttgtctctttacatttaaatagacaggttaggcatataaaccttggcttttcataaactctacctgcctattcccaggagttagggaggatctatttgtgatggcctagggtataagagctgtggaggactgaaaactggataaaaagagggtcgtttttcttgcccttgtttctcactcagatgcacttcttttttgccactgtttggcaaagttttctgttaagcccccctccccctgccccagttctcaaggtgtgttactatttctgggatcatggggtcagttttaggacacttgaaaacttcttttccccacttcccttcacagtaactgggtcaagggcccacggggaggggcttgtactgaactatctagtgatcacgttaacacctaactctccttctttcttccaggggccgggctagagcgacatcatggtattccccttactaaaaaaagtgtgtat

SEQ ID NO: 4684 - DNA, 442 bp, Macaca Fascicularis
  misc_feature (1)...(442): n = A,T,C or G
aaaccccccacaacacaggattaacctatataacaaacctgcacatggatccttgagcctaaaataaaaacctaaaaaaagggactccaaaaaagtaaggaatccgtctttaaatcaaacttttttcaaactaaaataacttaactgtaaatttgaaataatgacattagggaaatccaggtgttacgtgccttcagcaaaataatataaaacggccgggcgtgnnnnnnnnnnnnnnnnnnnnnnnnnnnnnnnnnnnnnnnnnnnnnnnnnnnnnnnnnnnnnnnnnnnnnnnnnnnnnnnnnnnnnnnnnnnnnnnnnnnnnnnnnnnnnnnnnnnnnnnnnnnnnnnnnnnnnnnnnnnnnnnnnnnnnnnnnnnnnnnnnnnnnnnnnnnnnnnnnnnnnnnnnnnnnnnnnnnnnnnnnnnnnnnnnnnnnnnnnn

SEQ ID NO: 4685 - DNA, 675 bp, Macaca Fascicularis
  misc_feature (1)...(675): n = A,T,C or G
taaaagtcaaaccaaacntnnncaagctgcatgcnnnncacaaaatccagaaagcatttaagaattgaactaggggctggaagaagtgaaagggaagcatctaaaaatgaaaggtgagtaaccaggcagcaaaagaaaagggaaagccatccaaatttgaaagctgttgatagaannnnnnnnnnnnnnnnnnnnnnnnnnnnnnnnagctactactctttccagaattcctgggtcttccaagagaattcttaaggtaccagagatttgctagggaaccaaaagtgcttgaaaatctgcctgagggcttgcatagctttcacattgaaaaaaaaagctagcagattactcctttttaggggatcatatcaagaaagtctggttggaaatcaagggaatggctgatgtctctttcttggaatatgtgaannnnnnnnnnnnnnnnnnnnnnnnnnnnnnnnnnnnnnnnnnnannnnnnnnnnnnnnnnnnngacaaaaggtatgcttgctttggaatgattttagacattgtacaacctnnnnnnnnnnnnnnnnnnnnnnnntaataaataatgcagatccatgtgattattaaaatgactgtagctgagagctctaattttcctgtcttgaaactgtataagaactcatgtgattaagttcacagtttattg

SEQ ID NO: 4686 - DNA, 751 bp, Macaca Fascicularis
  misc_feature (1)...(751): n = A,T,C or G
atataactgcnnnnnnncaaaaattagcccatgtcccagtccaaatttggaaaggatggtctccagataccctctttgggggctggtgttcgtcccttggaggatttaagaccttaatannnnnnnnnnnnnnnnnnttgggagtctgcctcatactcccttgtctcctacctctcctcaaaaacatccaatcagccatagaggttcttgtaacnnnnnnnnnnnnnncccaactaatggctttaaccaaatatcaacctttgccaaataaagaactaactcctcatggagaattaaattctgatgataattctttgtattaaactttatttataaacagcatcaaaggggagaattaagcaggaaatataagaaaaacaagtaaagggaaaacaagtccagctggagctatgatnnnnnnnnnnnnnnnntcaggcaggggtcccaaagaaatggttccaagagtagggatgagaaaaacaagttcttatcagtctcccnnnnnnnnnnnnnnnnnnnnnnnnnnntctttgttctgctcttataactatttttgtaactatttctgcaagtttgcaaggattttatatgttcctgttttcccatctgtgcaggatggcaaagatcacaagacatgcctgagatgcaaaacctgtcacagtttaattaactgcctttgttctgcttctgtaagcttgctttccctgccccacaagttttgtgccatggctagccaccccccttcagttac

SEQ ID NO: 4687 - DNA, 729 bp, Macaca Fascicularis
  misc_feature (1)...(729): n = A,T,C or G
catggtgattngnnnacagcaaccaagagcaaaacaagtgaagacatcagccagacctccaaatacagtcccgcctactcaccagacccnnnnnnnnnnnnnnnnnnnnagtactggacctaccacgggtcccccaaagtgccccgagccagaaggttctcatctggaggagaggaggatgattttgaccgcagcatgcacaagctccaaagtggaatcggccggctgattctgaaggaagagatgaaggcccggtcgagctcctatgcagacccctggacccctccccgnnnnnnnnnnnnnnnncgggaagccctgcacacagctggctatgagatgtccctcaatggctcccctcggtcacactacctggctgacagtgatccnnnnnnnnnnnnnnnnnnnnnnctgcctgcctaccgaagaaatgggcnnnnnnnnnnncccagcgcagacctcttccactacgacagcatgaacgcagtcaactggggcatgcgagagtacaagatctannnnnnnnnnnnnnnnnnnnnnnnnnnnnnnnnnnnnnnnngtctgcccaaggatgtagacaggacccgtttagagcgccacctgtccnnnnnnnnnnnnnnnnaagtctttggcatgaccatctctgagtttnnnnnnnnnnnnctctggaagaggaatgaactgaagaagcaannnnnnnnnnnnnnnnnngaggctctataaatatatatg

SEQ ID NO: 4688 - DNA, 192 bp, Macaca Fascicularis
atgttgggccacagcatccggaggttcacaacctctgtggtccgtaggagccactatgaggagggccctgggaagaatttgccattttcagtggaaaacaagtggacgttactagttaagatgtgtttgttctttggatctgcattttctgtacccttccttatagtaagacaccaactgcttaaacaataa

SEQ ID NO: 4689 - DNA, 785 bp, Macaca Fascicularis
  misc_feature (1)...(785): n = A,T,C or G
cgaagcgtatgagcccagaccagcatcacataagaccaagtgaggaannnnnnnnnnnacctgcacggctttgtgcacggaggcgtgnnnnnnnnnnnnnnnnnnnnnnnnnnnnnnnnnnnnnnnnnnnnnnnnnnnnnnnnnnnnnnnnnnacagcttctgtggacgcaattaattttcatgacaagatcagaaaaggctgcgtcatcaccatctcgggacgcatgaccttcacgagcaataagtccatggagatcgaggtcttggtggacgccgaccctgtnnnnnnnnnnnnnnnnnnnnnnnnnnnggctgccagtgccttcttcacctatgnnnnnnnnnnnnnnnnnnnnnnnnnnnnnnnnnngccccagctcgnnnnnnnnnnnnaggacgagaagaagcgctttgaggaaggcaaagggnnnnnnnnnnnnnnnnnnnnnaagcgacagggccacacggagcctcagccctagactccctcctcctgccgctggggcctcgagtagccatggcaacggnnnnnnnnnnnnnnnnnnnagaagttccccccttggccaaaaacccgattcacattgagagctnnnnnnnnnnnnnnnnnnnnnnnnnnnnnnnnnnnnnnnnnnnnnnnnnnnnnnnnnnnncaccaaagctttatttatatcattccagtgtcaatgctannnnnnnnnnnnnnnagcgccgggaggcattccgcagaaacccttgggaatgcttccgagcacgctgtagggtgtgggaagaacccagcaccact

SEQ ID NO: 4690 - DNA, 661 bp, Macaca Fascicularis
  misc_feature (1)...(661): n = A,T,C or G
actnggagttctcaacctagagactacatgaagaaaagaaaataatcagatttcaattttccctgtgggaaactctgaggcagccacttatcttggctaaatagatcctcacctgctcatgaccaaagagcatttaggataatagaggacctacctgaaggaatccttgtatatgaaaggagttattttagaaaagcaataaaaatattttattcatcatagctctctgctttgggctctgcagaccaccaggtacacaggaggccctctgcttctcaagctgggaaggccaagagccttccttcagcctttctggttatgttacacctagctgaatgtttacaaggtctggatccatctgccctcaggcacagttgggccaagcagaaagagaaacacttctgctgtcaccttgagtgacctcaggagtagcttccctctggactgtagaggagctaattgtttggaacagaaaactgctggctgtcgattttgtccggttcctttgccaacatctgggcacaccctttgcccacatctgggcacaccctttgcccagacatgagtggggaaagcagttttttctcctcagtttccaaagtaaatggggaatcccagctttcttttctactagcaaatgaccctaccatttgtttctgcc

SEQ ID NO: 4691 - DNA, 654 bp, Macaca Fascicularis
  misc_feature (1)...(654): n = A,T,C or G
tgacaccatggtcagctcctgttgtggctctgtctgctctgagcagagctgtggcctggagacctgctgccgcnnnnnnnnnnnnnnnnnnnnnnnnnnnnnnnnnnnnnnntgcaggaccacctgctgccgccccagctgctgtgtgtccagctgctgcaggcccnnnnnnnnnnnnnnngtgtgctgccagcnnnnnnnnnnnnnnnnnnnnnnnnnnnnnnnnnnnnnnnnnnnnnnnnnnnnnnnnnnnnnnagctgctgccgcccctgctgctgcctgcgtccagtctgtggccgagtctcctgccacaccacttgctatcnnnnnnnnnnnnnnnnctccacctgcccccgccccttgtgctgtgcctcctcttgctgctaaatctctccttgtgatatttgtcatactatgaannnnnnnnnnnnnnnnnnnnnnnnnnnnnnnnnnnnnnnnnnnnnnnnnnnnnnnnnnnnnnncctgccaatttgtctcatgtggcattcagagtggacattcagnnnnnnnnnnnnnnnnnnnacatacacacattcattaaaatatgttgtgccaggccccaatgcagttatttttagnnnnnnnnnnnnnnnattcgaaggggacactaacnnnnnnnnnnnnnnnnaata

SEQ ID NO: 4692 - DNA, 3338 bp, Macaca Fascicularis
  misc_feature (1)...(3338): n = A,T,C or G
aaagaaaataaggaaaggaagaaaaggtccttaaattgatggaaatcttgaaacatgaaaaaaaattatggacagaaatgaacatataaaaactgtgcttggctttttctctctacccaatacaaaccacttgttctaagcagtcagtaccgctggggtctcccttgtcacactactcatattctagcttctccacatgctgggaatgttccagtgccctttcctttccaagttctactccatcatgccttaacaccttcttcaagcctcagcatctccacgaagcttttcccaatgcctggaaccctcatggaattctctccactttcctcctgagctcattatgctgtacagttctctacttcatctacagggctacagaggcaacatgtaatacattctgctccctggctgctaaagatactcaaagtgtggtcagtgttccaatgctggtctgtgataagcacagacattgagagtaaggatttagagacttttataataatttgacattgtcacaacatccaagtacatgatcaaaatattttacaaaagtattagcctacaagagattagaaatttagaaaacaaaaaaccccaaaacctgcccttcaccattgacagtctaagaagcactgggtctagagtaatgggtaaaaacttaagctctggagttgaacacatgggttcaatcccatctctgccacttattagccatgtgatcttgggcaagtcacttaaattccctaagtctctattctgtacaagggtagatttattctttcattgaacaaatatttcttgaacttcttttgttttttgttttttgttttttgttttttttagagacagcgtctcactctgtcatccaagctacagtgcagcggtgcaatcatggctcattgctgcctcaacctcgtaggctcaagtggtcctcttgagtagcacaagtgtgtgctaccatgcttggctggttctttaatgtttttgtagagacaatgtctcactnnnnnnnnnnnnnnnnnnnnnnnnnnnnnnnnnnnnnnnnnnnnnnnnnnnnnnnnnnnnnnnnnnnnnnnnnnnnnnnnnnnnnnnnnnnnnnnnnnnnnnnnnnnnnnnnnnnnnnnnnnnnnnnnnnnnnnnnnnnnnnnnnnnnnnnnnnnnnnnnnnnnnnnnnnnnnnnnnnnnnnnnnnnnnnnnnnnnnnncaaaaaaaaaaaaaaaaaaagtcatttaccacagaaagaagggctgtagaaaaatgcaaaatggggaaagctcagacatttagcattttttggcacctataaatttttcttattttatccttacattagcacagaggtagatactcctaaacccatttttacaattgaagaagaggaagcctggaaaagttaagtagccttcccaaagtaaccaaagtagggaaatattatgcctatacttgaactcagatcagtctgactcccaggttaaaccctcttcaaccgtgattcctgctgtcatagattctctgccacgattttctgcccatggttcactattagagcaatgattctgaattatatcagatccaatgctctcttttgtaaccccaaaatgaaattcacagttagtgtagtctatatacaagaacttgttttttttggagactggagtgtcactctgttgcccagcctggagtccagtggtgtgatcttggctaactgtaatctccacctccctacctcaagcaattcttctgcctcggcctcttcagtagctgggattacaggcatgtgccaccacgcctggctaatttttgtattttagtagagatggggtgtgagccatcgcgcctggccaagaatattttcttaagaaggaatgtaacagctgggcacagtggtacacannnnnnnnnnnnnnnnnnnnnnnnnnnnnnnnnnnnnnnnnnnnnnnnnnnnnnnnnnnnnnnnnnnnnnnnnnnnnnnnnnnnnnnnnnnnnnnnnnnnnnnnnnnnnnnnnnnnnnnnnnnnnnnnnnnnnnnnnnnnnnnnnnnnnnnnnnnnnnnnnnnnnnnnnnnnnnnnnnnnnnnnnnnnnnnnnnnnnnnnnnnnnnnnnnnnnnnnnnnnnnnnnnnnnnnnnnnnnnnnnnnnnnnnnnnnnnnntcaaaacaaaacaatttggtgagatattcaaaagtcatgtgggacatgggaaaattctttgtattatgtgactgtccccaggactaagggatactcatctcttgcatcgtacaaatgacagttacgtgatttttccccacagttccatcattttaacaatcaaaaatttccacagattaccataaggccccctagagggcagtaccactcccatgaagaaccaaccactgctctagagaaaactcaatgtctctgctcataattgctctgtcccataagtgaggtagttggattatgccagctctgacatggggcggttgagcctcatcaagttatcatttgacttaggtgaaatgctgtacacactgaaccagcctaagtccaataaaaaggtgtatttcagttgtaaaacttttttttttcttttttgtttttaagagacaagtctttttttttttttttttttgnnnnnnnnnnnnnnnnnnnnnnnnnnnnnnnnnnnnnnnnnnnnnnnnnnnnnnnnnnnnnnnnnnnnnnnnnnnnnnnnnnnnnnnnnnnnnnnnnnnnnnnnnnnnnnnnnnnnnnnnnnnnngacaagtcttgctatgtcacccaggctggagagcactggcacagtcaaggcttactacagcctcagcatctnnnnnnnnnnnnnnnnnnnnnnnnnnnnnnnnnnnnnnnnnnnnnnnnnnnnnnnnnnnnnnnnnnnnnnnnnnnnnnnnnnnnnnnnnnnnnnnnnnnnnnnnnnnnnnnnnnnnnnnnnnnnnnnnnnnnnnnnnnnnnnnnnnnnnnnnnnnnnnnnnnnnnnnnnnnnnnnnnnnnnnnnnnnnnnnnnnntgtgcccagtggggtaaaacatttttctaaatatactataaatgtccattagcagcctggcgtggtggctcacacctgtaatcccagcactttgagaggccgaggtgggcatatcacaaagtcagnnnnnnnnnnnnnnnnnnnnnnnnnnnnnnnnnnnnnnnnnnnnnnnnnnnnnnnnnnnnnnnnnnnnnnnnnnnnnnnnnnnnnnnnnnnnnnnnnnnnnnnnnnnnnnnnnnnnnnnnnnnnnnnnnnnnnnnnnnnnnnnnnnnnnnnnnnnnnnnnnnnnnnnnnnnnnnnnnnnnnnnnnnnnnnnnnatgtagacct

SEQ ID NO: 4693 - DNA, 768 bp, Macaca Fascicularis
  misc_feature (1)...(768): n = A,T,C or G
tactttgaaagtgccagagtagagtgtgcgatacaaacatgtcnnnnnnnnnnnnngaaaagattttgaatcactgtttccagaagtagctaatagcnnnnnnnnnnnnnnnactgtaacacagaaaactaagaatgatatgactgtttggagtgaagaagtagaaattgaaagagaagtgctctnnnnnnnnnnnnnnnnnnnnnntaaggaaatttgctacgctcttcgnnnnnnnnnnnnnnnnnnnnnnnnnnnnnacccatcatctggtttggcattttttggnnnnnnnnnnnnnnnnnnnnnnnnnnnnnnnnnnnnnnnnnnnnnnnnnnnnnnnnnnnnnnnngatgaccttggatgctgtaaagtgattnnncatagtctctggggtacccatgtagttgtaggaagtatcttcactaatgcaacaccagacagccatattatgaagaaattaagtggaaattagcagaaatgtccatttatttgctgtactatttgtatgtgatctttggattgatctataaacactgtcatactaaagtttttaaaatagacttatttctaagtatttatttcagcatttatgaatttacaacattggcaagtgatttgggactttaacnnnnnnnnnnnnnnnnnntcatatcattgaatacacattgagcacatccacattgtatgggatgtggtaattagcttgtaaccagggtatgatctgctattgttatttctccccgtttttggaaaaaggcctcagtt

SEQ ID NO: 4694 - DNA, 665 bp, Macaca Fascicularis
  misc_feature (1)...(665): n = A,T,C or G
catgnnnaaatcgtcctaggccgtcttgcaggtcctgggcagtcccatgggccctaaagcctgtgagcctttcctgctgagtctgagatcccagaagcaggagaggttagaacccgaggagggccacacctgtgctgctggccttagaggagggccgaggagtgtggcggcccctagcacctgggactggggacctccgtcccacccccgcaagaaaatgaattctgccagcagcccccacgatggaggaaaggaaggaccccgccccgccagcagcttgacctctgacctccagaatagtaagcccgaggttttgtgtggtctccccagaaaactctcataagaactctgtgctgattaaacactagaacacgtcttacacgaactggaaattgattctgtgggcgacaagagtctatagtaaacgttattacagattctttgaatgctctactctcacactggactaaagttgggattatatttaatttgtgcgtgagttcagtgcgttgctgttctgggcataggaaatnnnnnnnnnnnnnnnngagcacctggacagagctgtggacggagctgtggaagtgtcaccacggctgtttctgtcatccgtgtgaccgcccctacccctgtaaaatcaagcaagggagagattattttatttt

SEQ ID NO: 4695 - DNA, 589 bp, Macaca Fascicularis
  misc_feature (1)...(589): n = A,T,C or G
gaagcagagaattgctnnnnnnnnnnnnnnnnnnnnnnnnnnnnnnnnnnnnnnnnnnnnnnnnnnnnnnnnngagcaacggagcaagactctgtctcaaaacaaaaaaaaaaaaatcnnnnnnnnnnnnnnnnnnnnnnnnnnnnnnnnnnnnnnnnnnnnncacctatagcttcagcccttttccctggtcttgctaaaaatttggatgaaatatgactgccttgatgttcaaatatcattctcctatgatttgattttctacggtggcagtagcttacactgaagtaagcatactctaacctggtctcctacgaacaaatgtggataaaatgtggatgcagtccattacctaggaaaaaagcaaaatggactccacatagagacaagacccaaagagnnnnnnnnnnnnnnnnnnnnnnntaaccaacaatagggcataagctcagtgaagttacactggccccagtgctctccttagctgctctcatataaatattaaaaagtcttagccgggcacagttgctcacacctgtaatcccagcactttgggaggcccaggcgggcggatcacgaggtcaggagattg

SEQ ID NO: 4696 - DNA, 758 bp, Macaca Fascicularis
  misc_feature (1)...(758): n = A,T,C or G
tcaaaggttcctcactaacagccagcaaagaaatggannnnnnnnnnnnnnagccgaaagtaactgannnnnnnnnncctcaatgattctggatgcatattcttccccagagcctccagatggaagcccacctctgctgacaccttgggttggggcttgtgagannnnnnnnnnngagcccacttgnnnnnnnnnnnnnnnnnnnnnnntaccaccatgaggtaatcaatggtggtggtttnnnnnnnnnnnnnnnnnnnnnnnnnnnnnnnnnnnnnnnnnnctgannnnnnnnnnnnnnnagctttccctcctcctctcaggccagtccatcacctgtgctctggaccccaccatcagccagcagtagggggcagtggctggagcactggccctgcatccagannnnnnnnnnnnnnnnnnnnnnnnnnnnnnnnnnnngttgctccacctctctgtgccnnnnnnnnnnnnnnnnnnnnnnnnnacctcctagactcctcatgagaataagnnnnnnnnnnnnnnnnnnnnnnnnnnnnnnnnnnnnnngcacatctcaactctaaatgaatgttacctgctcctgctgctactggtactgctgtcaccatcatctgatccttggggagcttcctcctttatcccatgtcactcacgtcttgaaactcttcctttctattgtgatcttgccaccagtatttaaaaaacttttaaaattgtaaaatacatgctcataaagagttcacaattctgag

SEQ ID NO: 4697 - DNA, 1867 bp, Macaca Fascicularis
gttagaagaaaaagaccatgaagctataagaatgtgaaatctgacaaagaaaacaggctcccaaaggccttgaacctaccatgttagtttctcattttaattttattttggtatcaagactatattggcttcagtatctatttttctctggtcatttcagactctcatctctctattaaagtgaatattctgtagatcagatgaattatcatcggcattaacgtcaagtacacactactgagagagaatttattctctgtttaccactaattatcttcaccgcatgtctcttccttctgttgttctaagcatctcttctatactctatgctaaaacggatggaattcatggcttatggaaatcaaatcccttttgaagaactcaaaaagactcacaagaccttgatcattttctctgggtttgggagtggagtattatgtgactgggactccacaaaatatgtatattattttcaagatctcttgggggttttgttttattttatcttacttttattattatcattattattttttgtatactgaacttatagactatgagagaaaagtgagcatcaaaaacttaattaatccccttatcaggaaggaatatcctgccatagtaaaattagctctgaagagcttaaatataagttgcataatgttttcttgattacatctgaagtctcctctctttgaagagcaaagacattgtttccgtttctgagagcagttagaggaaacaggtacaatgcatgcatcacagactgcatttgactgagtggagtcttcaaatattttttaatggataaagtcaagctgcaatgtaacatagatatctttttctaaaaacttcaagtgtttgattaaaatagagaaaataatttttaaaataatagataaaaattttaaaaacagccagaaaaagtataacttatactggttagggtttaagctggcatggatttgacaaagataacaaagacagaatcatctatatattcattcattacatgctactatagtttgttggagtctgttaatgccttctagtagttaaaggtttatcagtatttctattataaacctctattttcaggggtttcaatgtgcccttaaaattgtgctggggctgcagcaagtaaataatattaggactcagattcagtctttggaactagcttttttccatttaatttaaattataaaattgcatagggataaatgtacagttttgctaaggtttagcacctttgatcttttctaaatcaggaaaaaaatctatgcatattgaggttcatagatgaaatattctttggcatactttgtagactttgaccacttaaaatactaagtggccaaatgattttaaaaaaaaaaaaattgctccctacacgagtgataaaaacatgtttgtaacttttaagtaaaatagactgatacccaaataccacagactcacactatattatagaatgacataatacctggtaattctccaaaagatagacttcagacccttaatgccatttaaatatagtttttgtggtttaatcttgtgagtagattgtaatgaaatcattacctttgaaacatcaaacacttctttaagcttttttttttaatgccatgaatcaggaaggatccatagtgattcatatacaattttgtctgcagcatccttgaatatttttaacactgtgtaatccgtgagcagcacaaaacttttattctgatgaccagttacacaattcctgtttttattttgtcctgttgtgctcaccttctatgagaaataaatgattattaggccttgctttccctgcaagttaaaaaaaaaaaaaaaaaaaaaaaaaaaaaaaaaaaaa

SEQ ID NO: 4698 - DNA, 655 bp, Macaca Fascicularis
  misc_feature (1)...(655): n = A,T,C or G
gactgtatcacacagcatgtccaggttgccccagcaccacncaggagaagggaaaatgacagcgggaaagtccaagcggaaagaaacctcaatttcagctaattgtggtgacaagatattgcttttgcaaattgtacataaacacatgaccaggtgaatgtatcgccaaggctcctgccaaggcctgggatggaggcctagagaagacgcccgaaagtttatgctgtgtgagcttcacagaagacctgccttccatgtatacccattttacaggtaagaaatttaggaatttgccgcagcttcgaaggaacaccacattccttacaccacgctgaggtataatttgaagagttgcagtatacgcactgtttcacgagaaaaaacagagtttatatttctgtaacaaagcaagagctttaaacatatgttagcaatatttgaccaggccataacccagcttggggcacctgactgctgtctgtgctgtcaagaataaatttttcttacctgttgtataaatatctgaattaatctatatggactcctgaaggaatttcatctcaatttgaagtctcatggattgacactatttttacttactttgtcatagaccagtctatgttgtaaattcataatttatgtaatgtttactttt

SEQ ID NO: 4699 - DNA, 666 bp, Macaca Fascicularis
gcaggaatcgtctgaaacaaaatcaaaggtttgtgtgtgtcaaaagtatattgttgaaggtatactggtgtgtaaaattcacttgtgtggtttttttggtccccaagggtcacgtggtagctcagctcaatgccagtgaatcttaatttactaagacacatttaaagacttcagaatctatatctacacactactacttccttcataaaataagtttacttaaagcctctgtacacagttgaatatatattgctggattcaattttcattagagctttcaaggatagtaaatctttcattcttagactgtacttgttaccacatacagagaaggtggcttagtccctgtctgcagctatgtgagattcagtcttgattttcaaaattcaatactatttttaagtgagtttatttctactctgtctcattcacagaagaagtgggacagacattttgatattcacaatctctcacttagacaaataatccagatcctacctcattatatagctctgtttcttttgaagaactttatccaaataagttacaataatattttacattcatcagtaaaagaaacaaaactaacaagcttggtaaccaccttgtatttacaaaaggatcatgaagatttttttatacgaacatttgcatagatagttgcat

SEQ ID NO: 4700 - DNA, 740 bp, Macaca Fascicularis
  misc_feature (1)...(740): n = A,T,C or G
ggccccaggcgccannnnnctgattctgcagatnntcccccaggagtggnnnctggccaaggctggcttgtctgcttcccccgaggccaggcccctagtcttgggggttagggtgnnnnnnnnnnnnnnnnngaagtccggctgcaccccgaaagaagcttggacacacaaacttcaagtctctgttactggaaatgcccaggccaagactagcctgacacgtgcccagagcgagaccttcagtggggtttaaggctcaagctgtaccctgctgcacacagacnnnnnnnnnnnnnnnnnnnnnnnnnctgtgttacctgcacccaagtcatccattggaggggtgggggagaggggctgtgtgaaggaccnnnnnnnnnnnnnngaaggggaagatggctagggcaaaatagtcaatggcactgggtcctggagatgctgccctgaagcctgcagtatgctgaacttgcgctctcagcgtctgtccactttcacctaagctgcgtttccactggtttgctgctggatctactcctgactgaatccttccaatgtgcccggggccagggtgggagaagtcttcagctctagtgatgggaatgatcagcacagggcagggaaactggcccagggcctgcagtctttgcttctcagactggttggggatccatctgcagggtcctacacccacnnnacctgctgcttgtaaacatgagaacaggaaagtcccgaaaaatctg

SEQ ID NO: 4701 - DNA, 719 bp, Macaca Fascicularis
  misc_feature (1)...(719): n = A,T,C or G
atgttgtccaggctgnnnnnnnnnnnnnnnnnnnnnnnnnnnnnnnnnnnnnnnnnnnnnnnnnnnnnnnnnnnnnnnnnnnnnnnnnnnnnnnncgcgcttggcagactttatttcttaaagattgccatgttactcagcatcttggagaactcacaaataaatgtccctgagtttcaagacaagccagccattaaaatcttttggggggatccagagaagatgagttaaattggaatacatttgaaaaaactgatttagttggatttatggatcacagtcatgaaaacataaagataccaacttgttttgtgaatttaatctttattccttacttttttgcccccactgtttgtaattcctactttatgatgaaatccttgtgacttgttatgggaattaactggggaaaatgttttccttgttctccacttcctttaagtttgtttttagatacactgcattgcaagtatgtgtgatacagtaaaatgttgctaattgtatctgtgctgataacatgccatttgctttagttctgtttcctaccccctcccccaactattcctagccagtggtagcacacttgttacttccaaatatatgtgtgtgtgtttgtgtgtgtgtgtgcctgtatcaacagtgtgnttcctaaaattaaagaatgacatatatttggcctcatttacatgctaaatatgggagcatataaattaatacag

SEQ ID NO: 4702 - DNA, 663 bp, Macaca Fascicularis
  misc_feature (1)...(663): n = A,T,C or G
gaagcggccnnncagaangagccccagnnnctcgnnnnnnncacccatccctcccacactcactcctgacagctttcccgcactgcagcctcctgctcctctgattctagtgggaacaggccccagctcagcctccggcagggaggtcgcctcccaatttcagcttgccctgacctctgctcgcaaccnnnnnnnnnnnnnnnctcttgctccagccctgcggcttccccagaagcctgggctgagggtggagatgccgcctacacatgaccctggccctccacctgcctccgggccacgaaatgggaattcnnnnnnnnnnnnnnnnnnnnnnnnnnnnnnnnnnnnnccgcctcccttggatggggtcaagaggccaggcctggcacattttggnnnnnnnnnnnnnnnnnntctcacccacacccacgcaccccccacacactatgctctctcaagaatgtaatttattggggcccccccagctgctttcctcacctgcccctgccctaccttacacccccagcttgacttctttccagtccacgtgtgtatataatgatatctatatttttgcccaggtctgggtattgcttctgcccagaccctgacatccctttccactgtgtgtgtgaccatgctgggggaggggactctgctgga

SEQ ID NO: 4703 - DNA, 1338 bp, Macaca Fascicularis
tactggaatattgtcctagtggccgaacgggagccaacatggcagcggctttcgggcgatgctgcagggtcctgagaagtatttctcgttttcattggagatcacagcatacaaaagccgatcgacagcgtgaaccaggattaggatttagttttgagttcactgaacagcagaaagaatttcaagctactgctcgtaaatttgccagagaggaaatcatcccagtggctgcagaatatgataaaactggtgaatatccggtccccctaattagaagagcctgggaacttggtttaatgaatccgcacattccacagaattgtggaggtcttggactgggaacttttgatgcttgtttaataagtgaagaattggcttatggatgtacaggggttcagactgctattgaaggaaattctttggggcaaatgcctattattattgctggaaatgaacaacaaaagaagaagtatttggggagaatgactgaggagccgttgatgtgtgcttattgtgtaacagaacctggagcaggctctgatgtagctggtataaagaccaaagcagaaaagaaaggagatgagtatattattaatggtcagaagatgtggataaccaatggaggaaaagctagttggtattttttattggcacgttctgatccagatcctaaagctcctgctaataaagcctttactggattcattgtagaagcagataccccaggaattcagattgggagaaaggaattaaacatgggccagcgatgttcagatactagaggaattgtcttcgaagatgtgaaagtgcttaaagaaaatgttttaattggtgacggagctggtttcaaaattgcaatgggagcttttgataaaaccagacctacagtatcttctggtgctgttggattagcacaaagagctttggatgaagctaccaagtatgccctggaaaggaaaacttttggaaagttacttatagagcaccaagcgatatcatttatgctggctgaaatggcaatgaaagttgaactagctagaatgagttaccagagagcagcttgggaggttgattctggtcgtcgaaatacctattatgcttctattgcaaaggcatttgctggagatattgcaaatcagttagctactgatgctgtgcagatatttggaggcaatggatttaatacagaatatcctgtagaaaaactaatgagggatgccaagatctatcagatttatgaaggtacttcacaaattcaaagacttattatagcccgtgaacacattggcaagtataaaagttaaaaaaattactgtagaaacattgaataactagaac

SEQ ID NO: 4704 - DNA, 1133 bp, Macaca Fascicularis
  misc_feature (1)...(1133): n = A,T,C or G
gactgagcnnnnnnnnnnnnnnnnnnnntggagcaaaaaggaaaaaaaaaagaaaggacattgagttttaacagaagggaaaaggaaagaagaaaagattnnngcagaatttctcaaaaatcannnnnnnnnnnnnnnnagtatttatattgagagaaacaaattttagtccttccaactgtgctaaaacttggatatttgtgaaaactcaccaccatacaagcatcagaagagctctcttgttgttagcacttactgtttgcaagaacagaatgcatccttttatccttttatgaaaaatgacaagtgaaggcaaaaggggaaggttatttgatctggaagatgagtgttctgatgtggtggcttttgcaaaaatctttattggtgttgaaaactggaaaaaaataactcatccagaattcatactgtcttgacaagaactatggttctctgtttttagatatcgtggaaaatgtttttgggcatttttctctgattttatttcttctcccccgcccctttttctaaaaaacaaacaaaaaaacacacaaaacaaaaacagaacaaaagaagagaagagagaaggaaattttattaattaaagatgctgtgtgataaaatcccagcccagattgctcagctgtttgtnnnnnnnnnnnnnnnnnnnnnnnagccagttctgttccttctgactagcccctcttcctccaggggagaacttccaaatgttaattttttctttttgaaaatataaataattactattttgtactgtgtggtatctctggtcttttgtttcactcacctgccttgtctcttgggtctgagtcccttgcttaagggattttgaagtcctagttttcagcttgcagagattatgtttgaaatgtctaatgagccgtagggatttgttgagactccgtaatttcaagttttctttgtgagctatcagcatctgccagtctcttgtcctccctgagtatctcacagtccatatcctgatgagggatcaggcccctacctgtgccaaggcaagtcatggtagtgggcttttctgcaccctgtatgttttaagacctaatccccacctcccttctcctaattaaacacaaaaagatccaggggacataaat

SEQ ID NO: 4705 - DNA, 713 bp, Macaca Fascicularis
  misc_feature (1)...(713): n = A,T,C or G
ccatgtgtgtctgnnnnnnnnnnnnnnnnnnnnnnnnnnnnnnnnnntcttcaggagagtatnnaaggcccacctnnnnnnnnnnnnnnnnnnnnnnnnnnnnnnnncatgacatagagtgaggcaaggaagaagacgaaatggaaggcagaatagttgtaggaannnnnnnnnnnttggactgaaggagctggaggggtctnnnnnnnngctggcctagcagcaccacccctttgccnnnnnnnnnnnnnnnnnnnnnnnnnnnnnnnnnnnnnnnnnnacctcttctcctttcccccagctacctttgttannnnnnnnnnnnnnnnnnnnnnnnnnnnnnnnnnnnnnnnnnnnnnnnnnnnnnnnnnnnnnnnnnnnnnnnnnnnnnncctccactatttcagggcagcagaaacacagtgagggnnnnnnnnnnnnnnnnnnnnnnnnnnnnnnnnnnnntaaaagatgtgagggtgttaatctaggaaacttccctcgtgaaaagattggtctggtattaaaaagtggaggcacacctgnnnnnnnnnnnnnnnnnnnnnnnnnnnnnnnnnnnncggactttggtaagatgtttaatcttttgtgcctcgatttctccatttgtaaaatggagcaaatacctacctcacagggttgttgtgagggttaaattaaatgagattatgtaaaagtatctagcacagtgc

SEQ ID NO: 4706 - DNA, 751 bp, Macaca Fascicularis
  misc_feature (1)...(751): n = A,T,C or G
gacagacatgcatgtgcagagggacnntagnncatctnnattgtgaactggctcccagggaccgagcaggtggtggactcaccctgtccgccttcttgtgctgtgtggacacagcannnnnnnnnnnnnnnnnnnnnnnnnnnnnnnnnnnnnnnnnnnnnnggcgaccgnnnnnnnccttggactctcctggaatgagagaggttgagatgtggcacaaaggactcgccctaaaggcctgtgaaagtgccaggttgaaggattaccgggtgcccagattcccacnntcacatttcctggcagcctcctggctgaagtagagccctgtctccagttcattcttctgactcgtaaggattcgtatagtatgatcctgggtctttgggagaaaagacaagcaagtgctgaaagagaagcaaagaaaccttctccagaggacaggagggaacttcaccccctccactcacctctagctccctccttagggcttcctgatgttggtggcttgccgccttttcctataggaagaggaagacagagctcttaccagggggaggcagaggtggcacagcaagagatgcccccagaacggcaccactgccccaggacaggcccacccatggggccaggttatcagggaccctgtggggatggggtggaatgtggggggtgagccttcatccccaggctgggagtgggccaggcgagactggggcctctacatctgagtgccccccaaacccagcagtca

SEQ ID NO: 4707 - DNA, 688 bp, Macaca Fascicularis
  misc_feature (1)...(688): n = A,T,C or G
agtgaaatgtatcatttctctgcagtggctccctagctgctcagagtaaaatctaaagtttttacaatggcttgaaaggctctccgtaaccttgtcccctcccacttacctccctgtctcctctcctctctctgacgctcagcccctgtgtattttagctattgaaggaatatgtggacacactgctaatgtattgtctttnnnnnnnnnnnnnnnnnnnnnnnnnnnnnnnnnnnnnnnnnnnnnnnnnnnnnnnnnnnnnncgtcatatttgtgagtccccctccaagtgggtaaatgtactaggtggagtatatgtcctccctcacgtggtatgctcttgatacagagccaaccaggtagtaccgttggtcctgctttgtcggtgagggaatgtagacccaaaaatgaagaaagttgtccagagttacatgctgggaagtggtggagctagaattcaaacccnnnnnnnnnnnnttgtctgcacctcagaagacacccctcttcctgannnnnnnnnnnnnnnnnnnnnnnnnnnnnnnnntcctcccctctttcaggtctttgctgaattagaaccttctcagtaaggcaannnnnnnnnnnnnnnccccgtttaacattgtccactctcccaagaccctcctctcagtcactcatttcaggtgtctagcacatcatgccctgt

SEQ ID NO: 4708 - DNA, 687 bp, Macaca Fascicularis
agaacattactgggccccaactgtggcatcatcctctcagcaatcttcttgtcacccgcctggcaggcagaagaagctgcagtcccacgtgggcctgcctggggggtgggggctgcctggctgttgggtggcagtgccagcacaggcagggcttaagttggggatgtttgactgtgccacctcctgcaactgctgtttctcctgtccctcctgtgcagggttagcagcagcagcaatgtggccatctccatcccccaaagcgcacttgctctctcaatatgtcctagttttctttagccttttctggttcagttcccttgtcctgatctcatcctctctggtctcccaataactcacccttgggatgtgtttagtacgtgggaggtgcctttgagaactgcttgactccatggtctcctagaacaaaaccgccctgactttgcagggggagcacttatgctgagctgagaaagcagagaagtggcctgggagccagctgggggtgcagagcatttgggccagtcctgtgccccgcttcaaattcctcaagcaggattgttctgttctagaaagctgttgcacagcattcgcaatgagatctttagttggcggattttctggaacatttgtttttcaacttgtcccgacatttttttctgtttctattctgagagagagatgatcaag

SEQ ID NO: 4709 - DNA, 691 bp, Macaca Fascicularis
cacgataaatctgcatctggcagtcagagtaggcatgatcatgaggtcttagcagcaccagctcaactgtagatggagggcggcccctcaacacaaggcacaggaagtggggaaggggacagcttcaggagtagttcaggaggctcaaacggtgggtacttgcaaaggccttgcccaatgaccccccaccccagggggagaaggggtaagaagactgtctccacaaaaggctcagcacgacttccctcactctgccctaacccacagcctcatgcccaggatggtagggcacatctccccagggtcagccttgggaattgggcagtgcctggagatctgaccaggctatgcttctccagcagagacatcagtgaagccagcactacattctccacctgggagtccccaggcattcctggggaatccagttcttgggaggctggggtcatggggatgctctctaatggggagatggagacagtggtgtcctgaagggacccttcccccaatccctcccctttacccagatggaggtggtcctcctgcagatgcctcagcccctctggagccggccagcaagtgtgtgagcctgaggttgtcctcccgatatctgaactaagttaccgcttctgtgtgctagatgtagggttaatatcagttgtgataaaaacaactaccttgtctctgttgc

SEQ ID NO: 4710 - DNA, 687 bp, Macaca Fascicularis
  misc_feature (1)...(687): n = A,T,C or G
tagagttcannngnntcttgtaccctaccactacaggatggnnnnnnnnnnnnnnnttacataaacacacatactgtgaccannnnagctgaagacaaggggacaaacgaagacagttctgaaaggttaaaaaaaaaacaaaaaaaaaccaaaaaacgagcgtattagataccaagttatgcttgaattgctttgctctttagaatgtgtgtttttccctggtatnnnnnnnnnnnnnnnnnnnnnncaaccctaataaaattactaagggtttctgataggttttctgtgatatcgtaaagtatttatttggtctttgaccctgtttcctggcatactgctgctaaaatccttaatgtctccagagtgatgcctttttgtatctgatgagttgactgctggctggcagcccctactggaaagaccaaggcatgattagagttgggactttcagtcctcccccaaactcttgggagaagggctgaaggttaagttgatcaccagtgaccagtggtaatcataccttcataatgaaacctccataaaactccaaaagaacagattttggagcacttccaggtaactgagcatgtggcggtccctagagggtgctatacctgaagagggtatagaagctccctgtcccttcccacatgccttgctctatccatttcttcatctctatcc

SEQ ID NO: 4711 - DNA, 2626 bp, Macaca Fascicularis
gagaaagctcagccaggcggctgctccgcgtcctcccaggatccaaaggagacctatagtgaccctcaggagctcgtagtgaccacgtgaaggtacctgcggggctcattgtgcccattgctctttcactgcaactggtagttgtgggttgaatcactggacaatgccacatactttgtggatggtgtgggtcttgggagtcatcatcagcctctccaaggaagaatcctccaatcaggcttctctgtcttgtgaccacaatggtatttgcaagggcagctcaggatctttaaactccattccctcagggctcacagaagctgtaaaaagccttgacctgtccaacaacaggatcacctacattagcaacagtgacctacagaggtatgtgaacctccaagctctggtgctgacatccaatggaattaacacaatagaggaagattctttttcttccctgggcagacttgaacatttagacttatcctataattacttatctaatttatcgtcctcctggttcaagcccctttcttctttaaaattcttaaacttactgggaaatccttacaaaaccctcggggaaacatctcttttttctcatctcacaaaattgcgaatcctgagagtaggaaatatggacaccttcactaagattcaaagaaaagattttgctggacttaccttccttgaggaacttgagattgatgcttcagatctacagagctatgagccaaaaagtttgaagtcaattcagaatgtaagtcatctgatccttcatatgaagcagcatattttactgctggagatttttgtagatcttacaagttccgtggaatgtttggaactgcgagatactgatttggacactttccatttttcagaactatccactggtgaaacaaattcattgattaaaaagtttacatttagaaatgtgaaaatcaccgatgaaagtttgtttcaagtcatgaaacttttgagtcagatttctggattgttagaattagagtttgatgactgtacccttaatggagttggtgattttagaggatctgataatgacagagttatagatccaggtaaagtggaaacagtaacaatccggaggctgcatattccacagttttactcatttaatgatctgagcactttatatccactcacagaaagagttaaaagaatcacagtagaaaacagtaaagtttttctggttccttgtttactttcacgacatttaaaatcattagaatacttggatctaagtgaaaatttgatggtggaagaatacttgaaaaattcagcctgtgaggatgcctggccctctctacaaactttaattctaaggcaaaatcacttggcatcattgggaaaaaccggagagactttgcttactctgaaaaacttgactaaccttgatatcagtaagaatacttttcattatatgcctgaaacttgtcaatggccagaaaagatgaaatatttgaacttatccagcacacgaatacacagtgtaacaggctgcattcccaagacactggaaattttagatattagcaacaacaatctcaatttattttctttgaatttgccgcaactcaaagaactttatatttccagaaataagttgatgactctaccagatgcctccctcttacccatgttactagtgttgaaaatcagtaggaatacaataacgacattttctaaggagcaacttgactcttttcacacattgaagactttggaagctggtggcaataacttcatttgctcctgtgaattcctgtccttcactcaggagcagcaagcactggccaaagtcctggttgattggccagcaaattacctgtgtgactctccatcccatgtgcgtggccagcgggttcaggatgtccgcctctcagtgtcggaatgtcacagggcagcactggtgtctggcatgtgctgtgctctgttcctgctgatcctgctcatgggggtcctgtgccaccgtttccacggcctgtggtacatgaaaatgatgtgggcctggctccaggccaaaaggaagcccaggaaagctcccaacagggacatctgctatgatgcgtttgtttcttacagtgagcgggatgcctactgggtggagaaccttatggtccaggagctggagaacttcaatccccccttcaagttgtgtcttcataagcgggacttcattcctggcaagtggatcattgacaatatcattgactccattgaaaagagccacaaaactgtctttgtgctttctgaaaactttgtgaagagtgagtggtgcaagtatgaactggacttctcccatttccgtctttttgatgagaacaatgatgctgccattcttgttcttctggagcccattgagaaaaaagccattccccagcgcttctgcaagctgcggaagataatgaacaccaagacctacctggagtggcccatggatgaggctcggcaggaagggttttgggtaaatctgagagctgcgataaagtcttaggttcccacatttaaagccagtctttgtctagttgggatctttatatcactagttgtagataagttcattcagacataattatataaaagctacatggatgtaccgtca

SEQ ID NO: 4712 - DNA, 840 bp, Macaca Fascicularis
  misc_feature (1)...(840): n = A,T,C or G
cggactttgnctgcgggtggagccnnngagctgagttctgcagagacccactctgaccccattaaaatgacccctgattcatcaaaagtgaagcacagaattaccctatgaccctattccacactcctgtattgcatcctagatacctactcaaaatnnnnnnnnnnnnnnnnnnnnnnnnnnnnnnnnnnnnnnnnnnnnntcatggcagccctattcacagtggccaaacaatgaaaacaaccccaaggtgtatattaccagatgaaaggataaacaaaatgtggtccatccatacaatggaatattatacagccatgaaaaggaatgaagcagtgatccctactacactgtggatgaaccttgaatacatgatactgaatgaaagacatcagatgcaaaaggtcacacagtgtgcggtccttttatatgaaatttccagaacaggccaatctgaagagatgtataacagattggtggctttcagcagctgtggggaggtggcactgaggagcgactgctaatcaggatggggtttcctcctgggatggtgaaaatgttccggacctagatagtgactaaggtagcacgacattgtgagtgcactaaatgctgttgaattggacactttagaatggttggaatggtgatttttatgtgaattctacctaaaaatgctattatagctcatatattcttttttccatctggattattcacacaggaatatgttgtgagcatctttccatgacattaaatcatcttaggaaacattatttggtgttcttcaaaatgtgtatgttaagtattcaaatcactcttaaatgtttaaaatatgta

SEQ ID NO: 4713 - DNA, 547 bp, Macaca Fascicularis
cccaggggggcgggagatgggagggaagggtgagagggagccggaagttatttatggggaacccatgcatggccccgagttaaggggatggagaggggcgggctgcccccccgagggcccctcttcagcatcccccgcttccagttcacgtagagagacccccttccagggtgggtctggggaggggacagctgttcaccccagcaccctttgcacccacccttagggagtccccaacactcccccactcctttgatgggaatatgtactgtgaagagtaggggtggggagggggtctgctggtgccctgccccccagcactgccctacccctccactccgagctggggggagtctctgtctgctatgggagacgggggggtagcaccacctccctgacaccttcccctgacctgaccagggggaggatccaccccaacctctgccctgcctgccccaggggcaccccaacatccaggccaccccctcatggtgctacagaccctgccctggggcccacacactcctgccaggaagccctacatcag

SEQ ID NO: 4714 - DNA, 152 bp, Macaca Fascicularis
tttataaaatgtcataaaacatcgggcccatacgcccccaaaggaaaattataattctccacaaattgcgcacatctgtatatctcactagatgtctcagacacaacccctttcatacactgttggggcttttctctcttctcctggggggg

SEQ ID NO: 4715 - DNA, 512 bp, Macaca Fascicularis
  misc_feature (1)...(512): n = A,T,C or G
ctccagctacgggccacgtcgattttcacacgactctggactgctggggtcactgtccctgcttccccaccgagagaagtagccgagaccccgaccaggcctgcgctcccttggcactcagcatctcccagccaagacagcaccagtggctcagaaataaggtcccgggacagatgtgcnnnnnnnnnnnnnnnnnnnnnnnnnnnnnnnnnnnnnnnnnnnnnnnnnnnnnnnnnnnnnnnnnnagggctgggaacaggcaccgtgcgtgtccgtggaggatgagagcgcgactttgggaccggccctaccccacagcctcacggagggaacgggtccaggcggggtgctttctgtgaagcctnnnnnnnnnnnnnnnnnnnnnnnnaaccccaccactaggccggacgcggtggctcaggcctgtctgtaatnnnnnnnnnnnnnnngaccgaggcagtggatgacctgaggtcaggaggctgaggcaggatcacgaggtcaggagtttg

SEQ ID NO: 4716 - DNA, 158 bp, Macaca Fascicularis
tgtaagagggtgcacttcaacagcattatcatagcaatgtggaacagatgtaataggataaaagaggaatcactgccttttaggaaaaggagttaatgttatttattctgcgtatgtgagtatgtggtggttgtaaggttgagaataaagactaaaat

SEQ ID NO: 4717 - DNA, 3271 bp, Macaca Fascicularis
attatggagaggctaggccctggagctatagcaggaaacagaaggaatgaaacctcttgctctcatgaagcttacactctaccaggagaaggagcaaacataacatgcagtgcctcagtaagttatatacttgttagaagatggcgagtactgagggggaaataagcgaataatatgagggagactgcagtgctggggtgggggttgcaatgatgacttggatgatgtgggagcccaatgtcctataaagagaggttgtggcacaacagggaggtgtgagtgctggagcagcaatagccacaaacactgaactctgagtctggttttactgctcgtccactgtatgtgacttaatttctttgagcctcattttcttcatgtgtaaaatgggtataatgaaacatcacagatcagtttccaaagttgatggataataaatcctttagtatttactgaatgtgtcacagagaaaatgctgagtgaacagttggaggttctcttagtagcagcagggtggcatttgaagggactgattctgccctgggctgtgaggctggccagctgatgtgagactcctcagggtcccctgggttgagagaggacagcaggacacagcaggttgaccagtgctctcagcccagctcacctgggagcaacacaagggccatgtcctcatttcctgtcttttgtctcccaccaatgctgcaaaatgtaccaatacctggacactgtgagtacatttctctgttgttgatgtgaccacagagggaaagcagaattaggaagacatcattgccatgagatagactttcttatgtatgatcttttttttaagaaaatcattttataaagaagtagagtgtattagggtgttctcacactgctaataaagacataccagctactgggtaatttataaaggaaagaggtttaattgactaacagttttacatggctgggaaggcctcacaatcatggctgaaggtgaatgaggagcaaagacacgtcttacgtggtggcaggcaagagaacttgggcaggggaactcccatttataaaaccatcagctctcatgagacttattcactaccatgagaacagtatgcggggagaccactccctgattcagttactctacctggtcccacccttgacacatggggattattacaactcaaggtgagatttgggtggcgacacagccaaattgggttaagatacacacacacacacacacacacacacacacgagtaagtgtgtacatatacattatgcatattgtaacctcattaatcaacattaactattctctattagaaggcttataatttattaagttcatatcaaacaaaatggaataatgatagctactattaatgagaaagtgtcacagagaaagttccagagtccatattttatacacagtccatctgactgtaggagacattatggaagagtccaggggacttcatgtcatggatgaggatggagaacagcaggaggagctaactggctgcaagttttgaatatgggagagaggagaaatgggagacacaggtgggagggagtgaaggagtttcccactctacaggtgaagaattccgggggtgagaggagagttcagacctcaagagaaaggttggtttaaaagtaaacctacgatttttccaaagccgtggaataagatgggtgacaggtacagagaagagaggggagcagcatccacatcacaggagaagttccagctatgtgtagtgtctgtgatgtcagaaacgagagaatttaaaaatggtgagaataaggacagatgtcaagaagtcctaggtctgaggagagggtgctcaggcttggcttaaattcaagttgttataacagagtggacatctatccagtcaagatgaggatttcatcatgcattacttttatatttattaaaaataagccatcacttagagattgcattaaattatttagcaaaggatgttcttgattttctttcacagggagctagatgattcactgaagaaatgcatgtgcgcactcagcttttatgattatgctctaaaatgtttaattacagaagcctttcaagtattttttccctaagctactttaaaaaaaaatcttttcattttgcgtttcagagttgaaacatgcatttttgcagatgaatgattaacgggacctattttatcctgaacattttaagtctaggccttttgcacgcacaagctacatggaaacagcattctccatccctgattcagccgaatgcagcgcgcccttccagagtcccccaaacaccatcatattgctttataggaggaaacacagtgacagatccactaatgaggatttaaaaagccagtgatccttcatggtgagaaatttcttagagataggaaaaatcctaggaagaagcagatgtttttcaaaatgtcaacaacagaatttgtgatacaaaagaaatcaataaatgctgacatacaaccatgtcggataagccagaaaaagagcagtgtggcccaggagttgagctgaagaggcaggcacatggagggttatgagaggctgagccgaggagcccactggagctagaacagccctttgaggtagaagatgctgctgtctccacattacaggtgagaaaactaagtcacaggaagtcagcgcaggcggggaacggagctgcagaaattgaacatggttttgtacctttggagaatgtgatctcagccggaggctacagtcagggtgtagagggtaggacatttttggaaatatgttcttaggaagaaaggaattttgaatgcctgaaaaaagaaatcaagtgactgaaggacacaaacttcttgacttcgggggttttccaaggtttggaattgaggcgttcagcaatgtctgatcaactgcccactgaaagcagtgtggcaggactggtgcatgggagacaggggatggaattacagcagcgggtattgtcacagcctacttcctgatggctgaaatccctaaagtggggtataacaagtatcaataagtgccttccagtgaagatgcttagctgagtgatactgcatgttgtactgatgacatttaattatttttagtggtttttaaccctaaaaaccatcagtcaatgtatcagtctgtatcagtcaatgtagaagttaatggacatgtacacacattttcttgacttgataaaggatgactagaatgataacgtgctggcaaaccacctgtcagaggaaaaaaaaaaaaaaaaaa

SEQ ID NO: 4718 - DNA, 1852 bp, Macaca Fascicularis
  misc_feature (1)...(1852): n = A,T,C or G
agagcagtgaggctttccagtacaaattataccccatctaaagatgactataataatgatggtggctgattattatgttccaagaacttttctaagtgttttacaaataatcttatttttaatacttaactataattcggtatggcaagtgtgataattacccccattttataaataaagaaactgaggtatagagaaattttaaaaccgtccaagataacttgggtaataacttgtgaaaatgggaatccaacagtccaatcagtctcaatctagagggccactctatcacgcctttctcaggttaaggggaagaagacagtcattatttggattgtacatatttggctaaacacaaagattataaatgagataacaattcattgcactgtggcataaagacaaataggatatttcctttataatctaagattatgcatatctactagattattttccgctctgcattgactgacttatagctagtctcatagtcgttttccacatacaattctctataactgacctgattgaaaagagtagtttttttttctttttttttaatctgtagagcaattcatactacccgcattttaaattcagaaaatatttattgagcttaaaatctttcataatgaataataaccttgaggggtttagaagattatgcttattaagcacatatcctcacaactgtaacctaagggtgggatgtggcctcatcttgtatgatagccaggggagaaacctctctcttttaaatttagcgtaacatgattttactctttaaaaacaaaaacatcttataccgactatacccttaaggaatttactgaatcaaatcagagtttcaatattaaatttaaaatgagagcaaaggagatcataagaatcagaagtaagaaggtgaaacattttatgaggattacagttgaaaaatccatggaagtcaaaacaagaagattaaaaaagtgtcattttagatggtcagcaacgactccagagaaaattacactcctataatcaatgatgattttttgaggctccaaatagactgtagttacaaaaaaaaagaacaaagtgtcattctatgtgtctgatagaggtgagttgccactttcaaacatatattcatcagatcagagcacactttctaacctgtgtattatattccaggatgagatgcttcttgctctagaaaaaaattaaagaagagaaactagataagaaactctcaaggagaagtatgtaatacacatatatgaaattaaaatgaaaaatgacttgtaatcagacatatatttataaaacttttcaaagcagtctttatgtccatcgtttcattacagctacaacccattgtactcaggtacaatgcagatttaattattcaaacagataatgaaataggactgttaaaagtttaggcaatatactccaaatcataagaatttagatcttctaatttttaggttatttgtacacaacacccattatgagaagttcatcctgttgtttgcacaacaccagtggaaggactataactcnnnnnnnnnnnnnnnnnnnnnnnnnnnnnnnnnnnnnnnnnnnnnnnnnnnnnnnnnnnnnnnnnnnnnnnnnnnnnnnnnnnnnnnnnnnnnnnnnnnnnnnnnnnnnnnnnnnnnnnnnnnnnnnnnnnnnnnnnnnnnnnnnnncagctacctgtaatcccagctacttgggagactgaggcaggtgaatcgcttgaacccaggaggcagaggttgcagtaagctgagatctcaccactgcacttcagcctgggtgacagagcgagactccatctcaaaaaaaaaaaaaaaaaaaaaaaaaa

SEQ ID NO: 4719 - DNA, 663 bp, Macaca Fascicularis
  misc_feature (1)...(663): n = A,T,C or G
gagctcagtttcttcatctgtaaagtgagggtatattatgtactttcatttggttgtagagattaaatgtgaacacttaggtaaagcacacagtatgggctgagtaaatggactgttaaataagatagtatcagttgtttttaagttccttggagctttcctaaacacctcaaaagattttgatttttttctaaagctaatatttttctaattcttgttttaaaatattttacagtaaaatttttggccaggcgtannnnnnnnnnnnnnnnnnnnnnnnnnnnnnnnnnnnnnnnnnnnnnnnnnnnnnnnnnnnnnnnnnnngggagaccagcctgagcaacataatgagacctcgtctcgtcaaaaaactatggaaaatttttgaaaaacaggccaggcacggtggctcacgcctgtaatcccagcactttgggaggccaacatggtcagatcgcttgaccccagtagtttgagaccagccttggcaacgtggcannnnnnnnnnnnnnnnnnnnnnnnnnnnnnnnnnnnnnnnnnnnnnnnnnnnnnnnnnnnnnnnnnnnnnnnnnnnnnnnnnnnnnnnnnnnnnnnnnnnnnnnnnnnnnnnnnnnnnnnnnnnnnnnnnnnnnnnnnnnnnnnnnnnnnnnnnnnnnnnagcaa

SEQ ID NO: 4720 - DNA, 747 bp, Macaca Fascicularis
  misc_feature (1)...(747): n = A,T,C or G
tgtgcgccccagccatnntccctgccggtcctcggtggcccagagtccgagtccnncaggtgctgtgggccctgctgnnnnnnnnnnnnnnnnnnnnnnnnntgtgggcgatcaaggatttcgaagaatgcacctggcaggnnnnnnnnnnnnnnnnnnnnnnngtaggcgagaatggtgcnnnnnnnnnnnnnnnnnnnnnnnnnnnnnnnnnnnnnnnnnnnnnnnnnnnnnnnnnnnnnnnnnnnnnnnnnnncgacccgagggagaaatacctgggcttcccttactnnnnnnnnnnnaactactcctgcgaggaaaagcactctgaggacctggtgcgcatgggccacctgacggggctaaagcnnnnnnnnnnnnnnnnnnnnnnnnnnnnnnnnnnnnnnnnnnnntggaagatagannnnnnnnnnnnnnnnnnnnnggctgcccccnnnnnnnnnnnnnnnnnnnnnnnngcagaggnnnnnnnnnnnnnnnnnnnnnnnnnnnnnnnnnnnnnnnnnnntggnnnnnnnnnnnngcgtgtggacgtcagcagcaatggcctggggaccttcattccagataaaaggttnnnnnnnnnnnnnnnnnnnnnnnngaagagaaaccaggacaatgacatcnnnnnnnnnnnnnnngatgaggaaacagatcctccccctgcgcagctcgcttcacctttgttggttggggtccaggtatagatgctgtaacaaagagacc

SEQ ID NO: 4721 - DNA, 323 bp, Macaca Fascicularis
ttatatatgtacacatcttatgagagctgtgtatatacccacaacacggaggtgttgtccacggggagaggcagagtgggggaggccctatccactcccacatgtctcgtgtggagggaggcactccccacggcccgagggtgggagagggggagtgtcgtggggccccaggggtattcagaaccggggtgtttaaagagtctcttaccccgcccccgtggaacacatatataatataacctggacaccacgaggttctctctctctctcttttatatttaaaattataataataatattggcaacacgtacacatctaacaa

SEQ ID NO: 4722 - DNA, 778 bp, Macaca Fascicularis
  misc_feature (1)...(778): n = A,T,C or G
ctgacctttttactannnnaatacaatgatacattttggaaactatacttaatatgtntnnnctgcacacctagcaataactgtaggggtnnntgctagggttgtttttgtatgtacagcaattttgaacaaattattttaaatgtaatataagagaattcgtttaaggaagtaaagagaatcatttgcttatgttacattttcnnnnnnnnnnnnnnnnnngagtcattcttagggcttccatttcctaatatttatnnatgggtannnnnnnnnnnnnnnncnnnnnnnnnnnnnnnntaatttattttccagctgagccctgacttccggttcccacctacctccatggacttcctaacagagannnnnnnnnnnnnnnnnatgtttttgttaaatcaggttcagttcattgccccggtcagttttatacagtatgagggtcactcgattaaagatctttcctgggnnnnnnnnnnttcgacgttcaggtgattttgaaaaccgctaacatttttaaaaggctagaacatcctttgacttcttgaannnnnnnnnnnnnnncttgggttttattaccacatgcctgagttcttcaaagaatnnnnnnnnnnnnnnnnnnnnnnnnnngtttgccaaacttccttctgatttgagtcacatgttccacttggaaaaaaagggaacagagaacctcctccatggacagtgtatgaatttcactgggaatcttgctgtctccagcctctctgcctttctctcttttaaccttacatac

SEQ ID NO: 4723 - DNA, 726 bp, Macaca Fascicularis
tgtatacatgcaaatgaaatgagggctgaccaagaactctggtgacagagcagagtaaccttcacaagcaacagttgcatttcttaagtaggaaagaataagtagatttttcttattcgccctactcctagcatatatgagaactggcacattgtgctgtgtaacagtacttattaaacttcaccatgcatgaatcacctgaaggaatttcttaaacattttctattttttaaatacctgtagcaaaacatactaatgtacttcctgtggcagttccccagtttctcttctttgcaagcaaagtcatctcgtttttcttcaggttgtgtaccacatgtatgggtatgtgaacaacacgtttttgttcacctgtttttaacatcatgtaattggaatcatgcgttcgtattcatctgtgacttgccttctctctaaaaatagtatttttgaggtttatgcgtgctgctagcgtagctgcagcaactgtggtccatttatttgcactggtatataactttctgttacgaaattattctgtaactttttcatttattttattactgatggacatttgggttgttttcagctttttgcttttaacaattgttctaagttttctgctaagaatgtgggtatacatgtcttctggtatagctgtgtaagcatttcatttgttctcataccttagtaaaactgcagtgtcaaaagtaaaaaaaaaaaaaaaaa

SEQ ID NO: 4724 - DNA, 2038 bp, Macaca Fascicularis
tctggtccttcctcgggctcacaaaatgctgggattacaggcatgagccactatgtcttttcttcttttattagatattagcaaccacagatttcccagggcaagccagaaatcactttatcaaatgaagcaaaccagagagtgagactatattatatatttatcaccataggcagagttttgggaacatggttagtgtccccaaaacagttgataaatgaaggagcattttgagtatggcagaaaatgggccagttagatcattgagataaaaaagagtggccagtggcttttctagtggatggtggaggctgaatcttggagagttggtggtggagaggcatactaagaatgttattgacctataacatctcaatctaggagtgagaaataaagctggcagtgagatcaactagatctatgcctcggaacacattgcagagtgatagagaaaagagtattggatttctggtgggagtgacttcgtgggctggtagtctgtgtagtctgactgatccttgagctcagaatggccccacacttggttaaataatctttattcaccatcttgaaattcataatactttttgaacaaggggtcctgcattttcattttgcactggatcctacaaattatttagccagtcttgtttctcggttttgctggcattttccccatggtgcacatcggtaaatgttcatgtaattatgagagatgatagaatagaaaccctctgtgcacactgaataattatattaaaactctcaactaaaacactatgaccacttgtatcttttacccttagagttcccttcacatcaaaggggaaaaatgaaaaaaagacatgttgtaactttgggaaataaaaggtctgttcctctattattctatcattcttgttttaatgcacttgttgagtatctgatcagacagttgttgagtgtttaatgagtcctagaggctatgctggaccccaaagataaaagcaggaagacttggtacttgtcataggggacaatcaagcaaaactaacagaagtcattattataatagctacaatttgtacagtgcatgccacaggccaagcattgttttaatggctttatatattaccttacttaatcttcacaataaacccatgaaaaagttgctattaatatttccattcttctaaggagaaatatgaggcacagatgggttactgtgcaaggttctgcagttggaaagtagcagaaccaggattcaatgccagatggtttagctccattgactgtgcccttagccactcactataacaaacattagagatgctgtgggaaataagtaaaatttacatacggtagaatgctacccaaggcggggaatggacatctctatcttggatgggagctggagagaaaacactttatcatggcaatgatacttgaaatgactgcagaacaagaggaagtggcccatccactgagcacaggatgtgcagggatgagtgggagagggcttggttaggtagagaacagcttgtgatcagagagtacagtgaaagatgagcctggagctctaggcaggatccagatgtctctggagcttggagtttttctttagatgataggatgtcattgagggatttaagtaaaggcttgacataatcggatgagcactgcagaatgttctttctgacaacagtataaatgatggaatccgaggatgatgaaccacaatagggaataactagaagttcagtacaacttagtgtgtcaggtgaccatgaaagccttacccaagacgattgtgaggtagaaataaagaaattaagggtaagagatatctgtttggcagctttatagggtttgtggagtaactggtcgttgtggggtggcaagactagggaaataatggaaacaaggatgactcttagatgtctcactgtccagtaccttcctccttgacctgatgcccctacttcccctaaccagccttgtctaacatggcttcttcaccagaactcaagaaggcagaatagggaagacagtagtagaa

SEQ ID NO: 4725 - DNA, 279 bp, Macaca Fascicularis
  misc_feature (1)...(279): n = A,T,C or G
ggtnnnnnnnnnnnnnnnnnnnnnnnnngagaagctggctcctgtacccttcttctctctcctgcagtatgagtgannnnnnnnnnnnnnnnnnnnnnnnnnnnnnnnnnnnnncagggacatttcnnnnnnnnnnnnnnnnnnnnnnntctgcaatcaccagnnnnnnnnnnnnnnnnnngggaacacatcccttgctcgggttcagcacctctcctggggctggaagtgccaaagcctggggcaaagctgtgcttcagccacccggggcccaataca

SEQ ID NO: 4726 - DNA, 712 bp, Macaca Fascicularis
  misc_feature (1)...(712): n = A,T,C or G
caagcaagaaaaagttttctttcctccaggcagacacagtccctcaccagggtggaaggtgtggctggtggagtgcaggctgggtttcaggccatactctgctcacttccttggcccagtccttttgtgcaacacacagatgacgtctccatttatggcggtcttacacctgtccaccatgtgctttcaggatgatctatcttctgcagctaagcgtcattcagaatatgaagggatattccagacaagattcacgggacatggtctatcatgcaagtcccattctggactttaaggctcacgacaaagatgttcaaagtcaaacctgctcgaagtcaagacttaaaggaaatgtaggaaaactctctggcctgataaagtccacagaagcctcatcttctgacgaatgatcttcaggcttgaaaggatgccttcctccaaacaggctggcagacattcttgaaatgtcaaaggataggccaggggtggtggctcacacctgtaatcctagcactttgggaggccaaggtgggctgattgcctgagctcagtagctcaagaccagcctggacgatgtnnnnnnnnnnnnnnnnnnnnnnnnnnnnnnnnnnnnnnnnnnnnnnnnnnnnnnnnnnnnnnnnnnnnnnnnnnnnnnnnnnnnnnnnnnnnnnnnnnnnnnnnnnnnnnnnnnnnnnnnnnnnnnnnnnnnnnn

SEQ ID NO: 4727 - DNA, 736 bp, Macaca Fascicularis
  misc_feature (1)...(736): n = A,T,C or G
ctttttggcttcgctgtagccctggtgannnngagccaggaggcttggcgtcctgaagctcctacaggccccaatgccacagagtcggtgcagcccgtggagggacaggatgagggcaacagggctctgtacgggggtatcctggaagcctccttgnnnnnnnnnnnnnnnnnnnnnnnnnnnnnnnngctggccttccaggaacagctgcannnnnnnnnnnnnnnnnnnnnnnnnnnnnnnnnnnnnnnnnnnnnnnnnnnnatcctgctgctcaacatgctcatcgccctcatgagcgagannnnnnnnnnnnnnnnnnnnnnnnnnnnnngcatctgnnnnnnnnnnaaagccatctctgtcctggagatggagaatggctattggtggtgcaggaagaagcagcagcgggcaggcgnnnnnnnnnnnnnnngcactaagccagatggcagcgccgatgagcgctggtgcttcagggtggaggaggtgaactgggcttcgtgggannnnnnnnnnnnnnnnnnnnnnnnnnnnnnnnnnnnggcaggcgtccctcgaactctcaagaaccctgtcctggcgtccccacccaaggatgaagatggtgcctctgaggannnnnnnnnnnncctccagcctctccagtccaactgatggcccagatgcagcaggaggccagaggacacagcaggggatatttccagccacatctgctggctctggggtcccagtg

SEQ ID NO: 4728 - DNA, 562 bp, Macaca Fascicularis
  misc_feature (1)...(562): n = A,T,C or G
aagtgctgggattacaggcttgagccactgcgccccggcctaggaatatgttcttaataactcttgactagaatgnnnnnnnnnnnnnnnnnnnnnnnnnnnnnnnnnnnnnnnnnnnnnnnnnnnnnnnnnnnnnnnnnnnngcaggtgaattcctgggtcgttttccnnnnnnnnnnnnnnnnnnnnnttctgactcaaactggtataaagcattattttaggttttctctttgccagtttttaagcagttacaaccatttaatcaagatgtgaggacatctacgaagtatagtaaagaagggttgtcccaggtgtgtgctctcttaagtgagactttgtgatactatactttaaatgcannnnnnnnnnnnnnnnnnggggggggggggttctttctccttaaaactttcacgtctactgtaatattttccaggccatatctttttttttttttttttgaagcagtgtatgtttgacaacagtncaatnngatgtcaatganntctcaatgtgtataatttancctatagnnngccnncncagtttgtgtgagtcatca

SEQ ID NO: 4729 - DNA, 745 bp, Macaca Fascicularis
  misc_feature (1)...(745): n = A,T,C or G
tcagttttttaaaagttaactcttagttttactgttaaattctaaaagagaagggagctgaggccattccctgtaggagtaaagataaaaggataggaaaagattcaaagctctaacagagtcacagctttcccaggtataaaacctaaaaataagaagtacgacaagcaaaggtggaaaatgnnnnnnnnnnnnntagctacccatagagcaagtgatttataaatttgaaatccaaactgttttcttaatatcactttggtctccattgttcccaggacaggaaatatgtcccccataactttcttgcttcaaaaattaaaatccagcatcccaagatcattctgcaagtaattttgcacagacatctcctcaccccagtgcctgtctggagctcacccaaggtcaccaaacaacttggttgtgaaccaactgccttaaccttcagggggagggggattagctagactaggagaccagaagcgaatgggaaagggtgaggacttcacaatgttggctggtcagagcttgattagaagccaagccagtggcagcaaaggaaggcttggcccaggaaaaacctgtgggttgtgctaatttnnnnnnnnnnnnnnnnnnngacagaagcttgtggggtgcatgaaggaactgggacctggttatgttgttattctcggactgtgaattttggtgatgtaaaacagaatattctgtaaacctaacatctgtataaataatgagcgta

SEQ ID NO: 4730 - DNA, 695 bp, Macaca Fascicularis
  misc_feature (1)...(695): n = A,T,C or G
cgcaggcaggatcctgtacctgcacttctgnnnngaggcctggagcgatgccttcttgctggttgtggcctcagcctgggtgctccccttgaggacgtatcgtagagctggaggtgctgcccactgtcatccccaccgggagtgcaaaacttcagnnnnnnnnnnnnnnnnnnnnnnnnnnnngtccctccactgctctgcgtcaccgggccctacttccccactctcccgggccttggcctgcaggttctggagccatcctggcacggagccctgcagaaggaagatgggcctcatgccaannnnnnnnnnnnnnnnnnnnnnnnnnnnnnatggctgtgagaggcccaggggctgcagcccagctctgggggcagagtggagggagctccagggactcccagtccagggggttatacacagagaggagacagggagtcacatttcagaagcacctatgctttcaatactgtatctcaggccagcgctttgggtggctgaggtgggcagatcatgaggtcaggagatcaagacnnnnnnnnnnnnnnngatnnnnnnnnnnnnnnnnnnnnnnnnnnnnnnnnnnnnnnnnnnnnnnnnnnnnnnnnnnnnnnnnnnnnnnnnnnnnnnnnnnnnnnnnnnnnnnnnnnnnnnnnnnnagacagaggttgcagtgagccaaaatcgcaccacta

SEQ ID NO: 4731 - DNA, 1702 bp, Macaca Fascicularis
atttccacatatattgactttgtgccatatataacatccataaattacggaagcaccatgatggagttagaatacaactacaatcaattttctacactgctgaagaatgtaatgtctgcccctaggaaagatttaggaaaaatggcccatattatgaaagtcatgaaaacgattgaacatatgaagattatatgtgctaaaaatgctgaactaactatttccttttttctatgccaaatgctgtataatggaaggaagattttacagctgaagacaaaagaaaaaatgaatattcatgttgtaaaacctggaggaaataacaataaatttggtatttctatgatggtgcccccaatatcagagtgcataaacaaaaacatttcaaattcctctaaaaaacgaccgagcactgtagacaaatgtgaagactctcaggaacaacagaaaaatactactatttccagttgtaaaaaactaaaggtagacatgaaaggtgtcacaaaaatcaacagagaaaatgcaacattcaagcatccaaggactacaggatctcatccccaaagcgaaaacaaaatagtgtcaagttcatctaacaatctgaaaagaaatcatttaacgtcaaaaaaggttgaaatgcaaagatcactacctggctcacttttacccttagagaacagcccttctcaatttcattatggacgatgttcttcaccgttcccagggagaacagcccttctcaatttcattatggatgatgtccttcaccgcccggtattttaccaactcccgttgtagccacccattatacaacccagcagaactggaagaaaacgatgccatcggagtgaggcgggcggcccagaggcatctgcaagcagagctgggaattcctggggagcaggtacacacagcacccagtcacagctgtgtccacgggagtccaggttggcagtgggcagaagctgaacaaagtccagaggcggctgaaagctgagctaggaattcccttggaagaggttcctccagaagaaattaattatttgacacgaattcactacaaagctcagtcggacggtatctggggtgaacatgaaattgattacattttgtttgtgaggaagaatgtcactctgaatccagatcccaatgagattaaaagcttttgttatgtgtccaaggaagaactaaaagaacttctgaaaaaagcagccagtggtgaaattaagataacgccatggtttcaaattattgcagagacttttctctttaaatggtgggataacttaaatcatttgaatcagtttgttgatcatgagaaaatacacagaatgtgaatatgcagttttattttctagcaagttttaggctgaaagccacatataattagttacgtaagaactatgagttgccatggctactgaattggatattggagccttagactgtcacccattatacaacccagcagaactggaagaaaacgatgccatcggagtgaggcgggcggcccagaggcatctgcaagcagagctgggaattcctggggagcaggaatctgttggccacacaccaaagaggaaattgaagtgtccactagaaagaatgtccaggatcctgtgggcatatgtgttaaattcatccattcaagaacatctttaagagaggacggatgttctcctgacaaaaaaaaaaaaaaaaaaaa

SEQ ID NO: 4732 - DNA, 1737 bp, Macaca Fascicularis
gtcaggcggcggcatcgcgcgggagggagcttggttgtgtcggtgggttcccgtgcggcggcggcggccaaggaggaggagacacagttggagcagctccgtgggctgactggggcgaggcctcagcagcgcgagcttgagtgcggccgagcccgcggcgccttccccggctggtggggacgagcgggccccgcggcgtcatcggcggcgaggtgagcggcggccggcgggcgggagctctggagggagccgcgccggcctgacgcgctgtcgccgctggttgcaggagccgccgcgcctcggcctagcatgtcggaagcgggcgaggagcagcccatggagacgacgggcgccaccgagaacggacatgaggccgcccctgaaggcgagtccccggccggggctggcacgggcgccacggcgggggctggaggcgcgaccgcggcgcccccgagcgggaatcagaacggcgccgagggcgaccagatcaacgccagcaagaacgaggaggacgcgggaaaaatgttcgttggtggcctgagctgggatactagcaaaaagatttaaaagactattttactaaatttggagaggtcgttgactgtacaataaaaatggatcccaacactggacggtcaagagggtttgggtttatcctgttcaaagatgcagccagtgtggagaaggtcctagaccagaaggagcacaggctggatggccgtgtcattgaccctaaaaaggccatggctatgaagaaggacccagtgaagaaaatcttcgttgggggtctgaatcctgaagccactgaggaaaagatcagggagtactttggcgagtttggggagattgaggccattgaacttccaatggatccaaagttgaacaaaagacgaggttttgtgtttatcacctttaaagaagaagaacctgtgaagaaggttctggagaaaaagttccatactatcagtggaagcaagtgtgagatcaaggtggcccagcccaaagaagtctatcagcagcagcagtatggctctgggggccgtggaaaccgcaaccgagggaaccgaggcagcggaggtggcggtggaggtggaggtcagggtagtacaaactacggcaagagccagcgacgtggtggccatcagaataactacaagccatactgaggcggcagcaggagcgaccaactgaccgcacacatgctttgtttggatatggagtgaacacaattatgtaccaaatttaacttggcaaactttctatggcctgtcccatgtgcatcttatttaaaatctcccccatggaaatcactctcctatttactatttccagagctctagttgtttaggcagcgtgtggtgtctgagaggccagagcgccattatgggctgatttttattaccaggtcccccagaaccaggcgggaggctctgcttcctgctgccactctgcagcctggacctgtggaccctggttgtaaagagtaaattgtatcttaggaaaccagtgtcacctttttttcaccttttaattttatattatttgtgtcatacatttcctgtaatggaagtgttaattttactgtactttttggtaccttttgggaatctaatgtattgtaaggtattttacacgtgtcctgattttgccacaacctggatattgaagctatccaagcttttgaaataaaatttaaaaacccccaaaaaaaaaaaaaaaaaaaaaaaaaaaaaaaaa

SEQ ID NO: 4733 - DNA, 723 bp, Macaca Fascicularis
  misc_feature (1)...(723): n = A,T,C or G
tggggagcacagaggcggagaggaatcccttgccacacccatggcccagcttnnnnnnnnnnnnnnnnnnnnnnnnnnnnnnnnnnnnnnnnnnnnnnnnnnnnnnnnnnnnnnnnnnnnnnnnngcnnnntggcttgatgagcacagatggtggnnnnnnnnnnnnnnnnnnnnnnnnnnnnnnnnnnnnnnnggactgnnnnnnnnnnnnnnnnnnnnncagggaggatgttgcaatgcatccagcagctcctggctctgcaggcggcacagcccggggccctgcaatcatccggtttctcccattggggtggagtgggggagtggagggagttggccacaacccactgatgtgatgggcggtttgtccaaggatgctgtatatgatnnnnnnnnnnnnnnnnngcccannnnnnnnnnnnnnnnnnnnnnnnnnnnnnnnnnnncttgagggtatccaagttgaaaaagacaaaattnnnnnnnnnnnnnnnnnnnnnnnnnnnnnnnnnnnnnnnnnnnnnnnnnngagggatgggagaaggtgaattcattccttattccaccccgaggtttgctggggtgaggggaagaattgatgctgctttgggaaatgaaggtttttatgtcgggaaggccctcttggttttggagagaaaggcacgttannnnnnnnnnnnnnnctggaacggtgggcagagagccnnnnnnnnnnnntgcag

SEQ ID NO: 4734 - DNA, 740 bp, Macaca Fascicularis
  misc_feature (1)...(740): n = A,T,C or G
atctgatcatttcacaattacactgacagtgcttctcagtttggactagccacagcttaagtgctcagtagccacgtggcctgaggctgttggactggatggcgcagctctagnnnnnnnnnnnnnnnnnnnnnnnnnnnnnnnttaggctgccacccccaattcannnnnnnnnnnnnnnnnnnnnnnaaggcacagctggaaatggagttcatttagcctggatcttaggggccagggagaccccagggacctctggccttgggggattgtgtgtgtgcttgtatgcaataatgtctccatccttgggagttgccagagtgtccagttcccacaaattctcacaacagccccaaggtggttatgacgatcatcttatgagtaaactaaccctcagctggctgagccagctgttgtgtnnnnnnnnnnnnnnnnnnnnnnnnnnnnnnnncagtgtgcagcagggggctgaggccggccctaggtggcgccttcagtcgccaggtcnnnnnnnnnnnnnnnnggtgagggaatgtctgagcgtcaggccacgtgtgggtgctgtctttagaaggaaggtggaggccacccactgggccannnnnnnnnnnnnnnnnnnnnactggaggagacggggtggagnnnnnnnnnnnnnnnnnnnnnnnnnnnnnnaggtggctgtgggagcagctgcccttctttgtccttggctgtggggagtggnnnnnnnnnnnnngttg

SEQ ID NO: 4735 - DNA, 726 bp, Macaca Fascicularis
  misc_feature (1)...(726): n = A,T,C or G
agtagctgggattacaggcatacggcaccacgcccagnnaatttttgtatttttagtagagattggattttgccatgttggccaggctggtctcaaactcctgatctcagatgatgcacccgcctcggtctcccaaagtgctaggattacaggcgtgagccaccgtgcccagccaattcaatatgtgttaagtgtttaggaagcacttcataagtgttagagttatggggatgatgacatcgatcagaactgacaacctgtggttactcaggagccatgtacccaaccttgattctgaaaagagaggtttttcaatcccatgggaaaggcaacagtggatatggtcacccaagagcactagctgtcctcaatttcctatgatacctcctatttctagtcaacacacccaaggtacctgtacatcatatttcctggtataatttagaagctagaattctgcgatctctgacacccagcacctgttactcctgccagctccttgaagaaaggtctcnnnnnnnnnnnnnnnnnnaacaaagtggcatcacannnnnnnnnnnnnnnnnnnnnnnnnnnnnnnnnnnnnannnnnnnnnnnnnnnttggttttgtgggctggcagcagcacttagggatcctnnnnnnnnnnnnnnnnnntctctgtcccatcctccgtagcagctctttcacacttttccattagtctccaaccttatactccccttc

SEQ ID NO: 4736 - DNA, 780 bp, Macaca Fascicularis
  misc_feature (1)...(780): n = A,T,C or G
acagatgacancnnnnnngaaacaaaaaaagtaaaaatgcatatagttgancnncactatcaaatttgtgtggtcaaggttcaactgtaatttcctagcagcattttgtgtgtttgagaatctgttgacactcttcaagtaaatccctaaattacaactttgacatcaaaaagctagacattcttacatttttgcactacaaaacaatacatcaaaactgccatgctgattggttgtgggatcgtgcctgtgaataaccactgcactccaacctgggcaacatagtgccttgtctcttaaaaaatacattctgaagaaacttctacttatgaatatattttatttgtaacaaacttgtaaaaattttagaccaannnnnnnnnnnntggcttacggtgatataaaaaatgtttaagagaatgttccctatacaaggcatatgttattaaacatgaaacttaggattagtttnnnnnnnnnnnnnnnnnnnnnnnnnnnnnnnnnnnnnnntggaggttacattagagaaagaatatagggaagattaagatggcagtagtaaaatgtttccctactttacattttatattggcagtatcctcatttcannnnnnnnnnnnnnnnnnnnnnnnnnnnaagtttctactttgaagatatttggtttatagtagtccatgctatactaatnnnnnnnnnnnnnnnnnnnagatactaatatgaaaaagaatatttgtgtaaaatattttgaagttgtaaatagtgtatatacaagttgttaat

SEQ ID NO: 4737 - DNA, 582 bp, Macaca Fascicularis
acctcttgcagttaagcctgttgtctgttgtagtctgtaagacgcgacatagctgtgtctgtgccagtatgctggaatctcagtgcagtgtccagactgcgtatttcagtttttccacaatgtggatagtacatatgaggattatttaagaaaattaaagacttactttcttttttctggagacggagttttgctcttgttgcccaggctggatggagtgcaatggcacgatctcagctcactgcaacctccgcctcctgggttcaagtgattctccttgaaatttctactagccctggtgaacttctgtgctttaaaaaaaaagaaaaagaaaaagttcagctctaaagcatttgcttacagcaagtggagctgtgttatattcaagttacccaagcaccaaataaaaaaaaaaaaaaaagttccttaaaagtctgggggtctttattgaaaagccagatacagtgcccaaactttgaacaccaagcaggaagatggagattaggtaacatcgaagcctctctgcgaggcgggagcaacagtacagtctcgcaagaattatgccgctcaaggcaagcatca

SEQ ID NO: 4738 - DNA, 735 bp, Macaca Fascicularis
  misc_feature (1)...(735): n = A,T,C or G
aattgtgcagtaaaatanttgaagttgacaggatcagttttggaagatgctggaaggaaaaaggaaagatggatatggaagaaattattcagagaattgaaaatgttgtcctagatgcaaactgcagtagagatgtgaaacagatgctcttgaagcttgtagaactccggtcaagtaactggggtagagtccatgcaacttcaacatatagagaagcaacaccagaaaatgatcctaactactttatgaacgaaccaacattttatacatctgatggtgttcctttcactgcagctgatccagattaccaagagaaatatcaagaattacttgaaagagaggacttttttccagattatgaagaaaatggaacagatttatctggggctggtgatccatacttggatgatattgatgatgagatggacccagagatagaagaagcttatgaaaagttttgtttggaatcagagcgtaagcgaaaacagtaaagttaaatttcagcatatcagttttataaagcagtttaggtatggtgatttagcagaacacaggagagcaagaaaatgtgtaacacctataccaaattaaggatgttgagttatgttactaatgtatgcaactttaattttgtttaacactatctgccaaaataaactttattccctataacttaaaatgtgtatatatataaaatagtttattatgtacagttaattctactgttttggctgc

SEQ ID NO: 4739 - DNA, 235 bp, Macaca Fascicularis
  misc_feature (1)...(235): n = A,T,C or G
ccgcttcnnnnnnnnnnnnnnnnnnnncaacctcggtattccaactttattatatggacttggctcctggttatttgccagagtcacagagactgtacataccagttatggacccataacagtttattttctcaataaagaagatgaaggtgccatgtattgaaagtgtgcatcgaagaacataaatatcagtggattttctctgtgtatatgtgctagtatttatttttgatcc

SEQ ID NO: 4740 - DNA, 2213 bp, Macaca Fascicularis
tttaacctctattttatggtgtgttattatgtttgatacctcatacttcttgcttagagttttgtttaacagttcactggctctgtcccaatatttgtgatgaacacttctttgctatattgtagctcttggagatactaaaagggaattcacagaacattactttagttttatgtgtttgctaggggaagatttcctagctgctgagagcgaggcacagtctttctgtcttcatttctttattagatacaattttctatttttatgtgactctagggcataacaaaacagtgacggtttcaagcattaattttaatgcttcctactagctaaatatcgtcttaaaatgattattagaaaaaaatatgcccccaaaacattttggtactgggaggatatttaaatatagatttttcatagtctgatgttttgaactatggattctgttttatggtggatacctaaggtttagataatagttgctggaaagcttaaagtagctggtgagcttcctgttatgtcactattaaagaattgatggctgatgtaactctccccccgaaatctacaagggtcatgcccaaattaatacaggttaacctttgtagaggtatatatgttggcattatttattgacatttatgctttaagcatgtcttattctatgtaattttaagaaatactctatttaacttgtgaaatacacctaaaagcatactagttagctcttagcctctcacttagggagggtaaagaaacatcactgatgccaatatgaagatctataaaatcctttgtttagaactctgttctcttcgtgcacctcacaacacacttaccatggtacatatttcttaatgccactgagaaaggcaagatagttaacacataattatttatgtgctatagtgtttcttttcctgttttagtgcttttgtagctaaacttgtcagaactgcatcacaagtacattttcagcctcagtgggaggcggaccagcctgtgtttaattttagagcttagaagtgtatgagcattaaaaatacatgtcttagaatctcgtctaatccctcacaaaggatgatggtggtcagcatgccatcttttgaagattaattctaaaattgaggactctggtagggtgttttatttccttcccaatcagccattcatttccaaatgttttgcctttgaaactttttgtgaaaattgcctgtaccaattgcattggttgtgttgctctgatttaaatgccaaaaatactaaatatttgtgtagtgctgttaagtgaggtttttgatatttccatcacttgatggattttgtagtgatattttcatagttgaaacaagtagattgctctgtggtggacagccatctcacagacatgcagacccatttctttcaatattagggttaacacccattttaattttattttgctgaaggtttggaatatataaagtaatggattcacaaaatatatcttaaaacatgttgaaagatttgaaagtggtacatttttacttttaagagcaacaatttttgaaattaatcaacgatgcagtcttttttaaaagtcagttttctcaagtagtatgttgtaatgtaactgatataactagattttgactggtaaactttaagtgcttttacatttgaggttgactttaaaaagccactgagcagtcctcagaggttatggactctcaagcgactaatggaatagtgttctgttgtgaagtctagaactaaagcaccttgtattgtctgcttctaaagtgtcctatagttttaaacttaaagttatggcaattaaagttacatttttcatttgttggtgtacatgtgctacctgttttacggggaatgtttaacatgatcctccaagttggttctatgcataaccattcaccaaatactgctgctgcggttccttgaaggaaatattctgtgctctgctatgatgcattgccatcttgctgcttgacaataggtttataaagaattagaattatgtgttttaatagtacctttgtgtatataacaagatgtaaaattaaagatgaggaatgtatgtaaatgatcattcactgtttttgttttaaaactggtcagtactataaagcttctgtggtttgtatgatgttttaactttcactttaaactgcatagaataaattaaaatgaatacaacaaaaaaaaaaaaaaaa

SEQ ID NO: 4741 - DNA, 750 bp, Macaca Fascicularis
  misc_feature (1)...(750): n = A,T,C or G
cccgaggctcagtagaggtttagtatgatgccttccnntnnnnnnctgagttacgaagaaactnnnnnnnnnnnnnnnnnnnntgcttaaaaccctatgttctgctatctcctatagaggagagcagacatttttttcttagtgcatttgctggtaggtcaaggagggatggnnnnnnnnntagtgttcagagtcacagatcctgcatatgtgctcttcagtagaggattttctgtgatcctaaaatgaagggaaagctatgtaatttatcagtacttcttaaagagagagactaaagtcatggcagtattggccaaattaattttaaaactgaacaagtcatgaattttcatataaatcaaagaactttttccttataaaagcttccatttttgaaaagttggatcagttgtaagaccttttatctttagtattgtatgatataattctacattgaaaaataaacacttggcatgaaatgggacttggagtcaagatctggttttctggtccatctttaccaaccattgctgtggatctctttaaaggccctagaacctttgagcctcagttacctcacttgtaaattggcaaaaatacctacctcacagggttgttgtnnnnnnnnnnnnnnnnnntgtatgttgaaagcactttgtgaattgtaaagtgctacacaaatgttagttgttgttgctgctgtatctgagatgtcttaattttctttttcttcagaaatagtctaataaa

SEQ ID NO: 4742 - DNA, 707 bp, Macaca Fascicularis
  misc_feature (1)...(707): n = A,T,C or G
gacacggagctgtggnnnnnnnnnnnnnnnnnnnnnnnnnnnnnnnnnnnnnnnnnnnnnnnnngtnnnnnctggagaggagcagagatacacgtgccatgtgcagcatgaggggctacccgagccccgagccctgagatggggtagaaaaggagggagctactctcaggcttcgtgtagcnnnnnnnnnnnnnnnnnnnnnnnnnnnnnnnnnncttgtaaaggaatgggactggtggctttataagaagaggaaaagagaactgagctagcatgcccagcccacagagaccctccactagagtaatgccaagtggaaatgtgaggtgcagctgccacagagagcccccaccagggaaatgtctagtgtctagtggatccaggctgcaggagagtgcattgtggagcggnnnnnnnnnnnnnnnnnnnncaccaccaggacaccagaactgtggagtcnnnnnnnnnnnnnnnnnnnnnnnnnnnnnnnnnnnnnnnnnnnnnnnnnnnnnnnnnnnngagcagccatgtaggctgcacctagcaaagccataggcacagggctacctgannnnnnnnnnnnnnnnnnnctgctccagtgtgtnnnnnnnnnnnnnnntggagtcaaaagagattattctcttcccacagataccttttctctcctatggccctttaacagcatctgcttcattcccctcaccttc

SEQ ID NO: 4743 - DNA, 503 bp, Macaca Fascicularis
  misc_feature (1)...(503): n = A,T,C or G
cagctgaatggaaaacactgctaccttttcacttgtatcatgnntnnatagctcacatcaaactgcttactaaaattttgaaaatcatttctataaaaagttatttaaattgttttaatctcttcagacattcannnnnnnnnnnnnnnnnnnnncgaagctctgggaatcccggatgagcactatctagataagtgagtcacactgtcttccacccccatannnnnnnnnnnnnnnnnggcgctctccagataagtgagtcgcgctgtcttccacccactgtacgatggtcagggtgaggagccacacagaaaccctggaaagggaacccgtcctccctagttggcccttcgtagtcatcatgaaaggtagggaaatgtgccttctccactaaccagcatccactccgagtccgtcaagacaactttcccagccgggcgcggtggctcacgcctgtaatcccagcactttgggaggccgagacgggcggatcacgaggtcag

SEQ ID NO: 4744 - DNA, 757 bp, Macaca Fascicularis
  misc_feature (1)...(757): n = A,T,C or G
taaaaacgaaagacataaaatnnnnaaaacagatcagaggctcnnnnnnttgtttggcaaggagacaggagaaannnnnnnnnnnnnnnnnnnnnntccctaaatctcatacatttcacttaaggctgttgtgatctgtgacatatgggttatattattgtgtctttgtcaaacaacaaaaacttgaacttagccctttttttgctgcagaaagtgtccttttagtggctttttaaaattgagtggcgttttataataaacttaccaatataaaaacatgatttggttcctgagctattgttggacttgtgctccaatgagtgactaggaaaaaataaattggcaaaaacttagagttttctgctatcttagctggaaatgagctnnnnnnnnnnnnnnnnnnnnnnnnnnnnnnnttgatcagannnnnnnnnnnnnngcccttagcagaaacccactttaatgcattttcttcatatccnnnnnnntccttaaaaatacgtgacaatgtatcaggaagaggagaactgaagagtagannnnnnnnnnnnnnnnnntttatcagtgacatnnnnnnnnnnnnnnnnnnnnnnnnnnnnnnnnnnnnnctgtgtgccgtgtacatatggaccgtgctatgatgtgtctcacatttgatgatattccactttcggaattttagtatttgtatatagaaaatgggtttaataactcaccatggttttgatttgtcttatattcgttatttcttaaaact

SEQ ID NO: 4745 - DNA, 761 bp, Macaca Fascicularis
  misc_feature (1)...(761): n = A,T,C or G
caaatgcggtctatggatataatggcgtattatttggccataaaaagtnnnggtatttgctaccacatggcttttttccagggaaagtattattttttgacaaaacacnnnnnnnnnnnnnnnnnntacaaggcggagatgtgcaacagaaagctaacttgcaaataataaaaagatgggagttcctttgagctaaagtggcagaggaggaagaggttcatccctacccatctgccccctcattattctgaagaaaaacagtagcctgaccctccagatctttcttttctggaggacannnnnnnnnnnnnnnnnnnnnnnnnnnnnnnnnnnnnagctgatggcttgctaannnnnnnnnnnngtcacaaaagggcaactcttgtttaatcccattcatatgaaggcaaattcagagagaaagtgaagtagtggttaccagggtctggggtgagggtggaatttggaactctttttaggtacagagtttcagtttgnnnnnnnnnnnnnnnnnnnnnnnncgggtgcggtggctcgcacctgtaatcccagcactctgggaggccgaggtgggcagatcacttgaggtcgggagctcgagaccagcctggccaacatggcgaaaccctgtctccactaaaaaatacgaaaattagccgggcatggtggcacacacctgcagtcccagccacctggaaggctaaggcacaagaatcgcttgaactggagaggcagaggttgcagcgagccgaaatcacgcc

SEQ ID NO: 4746 - DNA, 695 bp, Macaca Fascicularis
  misc_feature (1)...(695): n = A,T,C or G
attcacttaacaaaagcaagaagnnnagcacatgaaccaggtgtcttaatgcatttcgatagtttcttggggcggggtgtgtgtcttggtgaaggtgggggnntgtattttcaccaagccttttcataatcaagtttgctttgcaaaccttatggccttgcaccccgcagaagagtccttcttaataacaggggaatgccctgtcaggttctctgtaaattattgtgtgtcgggaggttctgttgaggcttagtttgatcttccatggtggacacgtctgttctgtatgtaaaaggcattacaattgtgttctagcggatgggatttgaagcctttccacggtccttatcctgtgagatggctgttgagctctgctcagctgttgtagctgaattcttgttttgcgctgaacattgggcagcctcaccgtgttgccaccgtgcttctggggccctgtgactgccgccggatgccgcgcacacaggcagagtgcctttgcaggtttgtgcaccccttggcgagccagaactgggaaccccgcggggtgaccccaccttctcatggcgggtcggggaggggagtgcctatttttaatcctgtctgtttgttgcacaatggaaatcactgtgatttgtacatatgccctaggaaaattttactgctgtctaatttatgtaataatactgtgattccag

SEQ ID NO: 4747 - DNA, 787 bp, Macaca Fascicularis
  misc_feature (1)...(787): n = A,T,C or G
agtaanntatgcagtgacaagaataaaagctgccnnnnnnnnnnnctatgagctcgcagctggaggcactgctgttggtacaggtttaaatactagaattggctttgcannnnnnnnnnnnnnnnnnnnnnnnnnncnnncnggcttgccttttgtcactgctccaaataaatttgaagctctggctgctnnnnnnnntctggttnnnnnnnnnnnnnnnnnnnnnnnnnnnnnnnnnnnnnnnnnnnnnnnnnnnnnngatattcgttttctgggctctggtcctcggtcaggtctgggagaacnnnnnnnnnnnnnnnnnnnnnnnnnnnnnnnnnnnnnnnnnnnnnnnnnnnnccctactcagtgnnnnnnnnnnnnnnnnnntgcagcccaggtcatggggaaccatgttgctgtcactgtcggaggcannnnnnnnnnnnttgagttgaatgttttcannnnnnnnnnnnnnnnnnnnnnnnnnnnnnnnnnnnnnnnnntgggggatgcttcagtttcctttacagaaaactgcgtggtgggaatccaggccaatacagaaaggatcaacaagctgatgaatgagtctctaatgttggtnnnnnnnntcaatcctcatatagggtannnnnnnnnnnnnnnnnnnnnnnnnnnnnnacacaaaaatggatcaaccttaaaggaaactgctattgnnnnnnnnnnnnnnnnnnnnnnnnnnnnnnnnnaatgggtaaaacctaaggacannngnnnnccaaangtgatttaaataaatttt

SEQ ID NO: 4748 - DNA, 777 bp, Macaca Fascicularis
  misc_feature (1)...(777): n = A,T,C or G
gacatgatgtgagagagagagtagtgagtactagaaaggtgnnnnntacaaagtggngnnngagccaggannnaagcaaagattgagagttgagggctcaggctctgcaatgggtgtcagtgaagcgctccagcaaaagactgaaatcacgcatgctctccttaaaccccaaggaaagggagggaaagtagccaactcccagtgacctgtcattttaggcactctctaggccataagaataatgttagtttgaatttattgaatcttaccgtgcactcagctggcccattgtatgtatactcatctcaatgattacataacttcgcaattcaaacatcagctcagtaaggcctttcctggctgcccatcttacagaactggaggtcattatgctaagtgaaataagtttggcacagaaagacaaatatcccatagtctcactcatgtgggagcttaaaaagttgatctnnnnnnnnnnnnnnnngtaccagagcctgggaaggtggagttgggggaggcagggaagagattggttaatgagtacaaacatataaggaataagttcaagtgtttgatagcacagtagggtgactatagtnnnnnnnnnnnnnnnnnnnnnnnnnnnnnnnnnnnnnnnnnnnnnnnnnncccaacacaaagaaatgataaatgttcgaggtgatagataccctaaacaccctgatttgattattacacattgtatgcatatatcaaactaccacaccccataaatatgtacaaatatgtatcaataca

SEQ ID NO: 4749 - DNA, 1008 bp, Macaca Fascicularis
  misc_feature (1)...(1008): n = A,T,C or G
acagcactgctttcatttaattgggctttagacactccactcgaatgcagaacctcacctctagttgagaccaagaattggcacatttgcatgagctcccggaataagttgctgactttgtatctaagacctgccagggaataccaagagttgtttctacagaagatactgtggcaaccaggaaggaatgaaaaaaaaaaattcttttctttacaacaaattaatgtgaggaagctcctccaatcatctggttatttgaggttcaaaatcaactgcctagggaaaattgcaatgcatgattctcttggagctatcttgtctgccttgaggttcctaaacaatgaattcccattaatgagcagtcttcagtattaaaaccactgtcttgtcacctcattttgcattactgtcttccgtggatgtttcagttataactgtaatgttatttatagaacaacattaatccattaaagctaacctatttttcaatatttatgataatctatgtacatatattgtctgtccatatgtatttgtaaataggttgtatataatgtcaggtttgggtcttgggttcaagtgtatatattcctataagtttcttaactgcattttgatgaattcatattatgtaactataagaattgtcccaaaagtacctgtacagaaaattgaatactgaaaaattgacaaattgtgtacaaacactaaagtgtttaaattgtatttgcaataaactcaacattaaattttttcatgaaatcgtggtgcaaattcagatctcttatttaaaatttaaataaggtataaattttcaaaatgcagtaatcaaaatgtgatctagtgtaatgaaataaagtgtgatctagtgtaatggaagacctttgagaacctgggtgtattaactttgtgtatatagtgtaaatatccctactgtactgttagagaccaacaattctagtatggcttgttggcaaagagtgctacaccgtttcaatganacaatgt

SEQ ID NO: 4750 - DNA, 2497 bp, Macaca Fascicularis
agattcagcagtacagaaagaacttagaaaccagacacctgctccatctacagctcaaacttctgctccctctaagtaccaccgaactcgatccgggggagccagggatgaacgatatcgatcagatatccacacagaagcagttcaggctgcactggcaaagcataaagaacagaagatggctttgcccatgccaaccaaaaggcgatccacatttgttcagtctcctgcagatgcctgcacgcctcctgacacatcttcatccgcatcttctacgctgtcccacggagaggtcaaaggaaccagtgggtctctagctgatgtatttgccaatactcgaatagagaatttctctgctcctcctgatgtcactacaactacctcttcctcctcctcatcttcctcaattcgcccagcaaacattgacctgcccccctcggggatagttaaaggcatgcacaaaggatccaacaggtccagccttatggatacagctgacggtgttcctgtcagtagcagagtatctacaaaaatccagcagcttctgaacactctgaaacgacccaaaaggcctcccttaaaggaattttttgtagatgactctgaagaaattgtggaagtacctcagccagaccctaaccagcccaagccggagggacggcagatgacccctgtgaaaggagagcctttaggagtcatctgtaactggcctcctgctcttgaatctgccctgcagcgctggggtaccactcaagcaaaatgctcctgtctgactgcactggacatgacagggaaaccagtttacactcttacatatggaaagttgtggagcagaagtttaaagttggcctacacacttcttaataaactggggaccaaaaatgaacctgtgttaaaacctggagacagggtagccctggtttaccccaacaatgatccagtcatgtttatggtggctttttatggatgcctcctggcagaagtgattccagtgcctatagaggtacctcttaccagaaaggatgctggaggtcagcagattggcttcttgctaggaagctgtggtattgccttagctcttaccagtgaagtttgtctaaaaggactgccaaaaacccagaatggagaaattgtacagtttaaaggttggccccggctcaaatgggttgtaacagattccaagtacctttcaaagcccccgaaagactggcagccacacatctcacctgctgggacagaaccggcgtacattgaggtaagtcctaagatgtaaaatacgctttcaggcttttcctttggcttcacttgctgcctttcaaaatataaaactaaatttttgcaatgttaatgttagaagatcctcctgctttgtgagatttccatcttttggcttgtaaagtgccttgtagtagatcttctatcttaattattttgatcataaatatacattcaagaaaatgacagcaaaaaaaaatgattcttcatgtaagaaagttacggaagactttagggaagtacagacgtttaggaaatgatgtactggcagagaaatttctctgctgcttatttagagaggttggggataagagaacggagaaatgagaagggaaaatagctctgcttaaaagaacagattagtagatgaaagataaagagcaagaagaaacaaatggctggaaggtttgatattgaggttggtgtaggaatgaagttggcaacatgatcccattgaaggattaagcaaatccaagtgcacaccaggtaccaggctgaatgatttaagtgcattttctcatttagtcctcacaagtaccctatgaggtttggattattattaaacttgctttatagatgaggagactaagacttaaaagaacttcagtagctgaccaaaggccacatgactcaaaaatgacagacgtagactcaacagtcaggtctaactctaaaagccgtagccttcaccactctgcatcctgcctgagacatatgctcaccaattgttaagttaatgaacaggcaaatcaataaatttgtttttcaagatttgggggaaaatcatctaacgttgaacactgtgatgataccaagtagagagaacttaaataattttggctatagaaaagagaggctgggagaatgagttcatgccctttgcagggacatagatgaagctggaagccatcattctcagcaaactaacacaggaacagaaaaccaaacaccgtatgttctcactcataagtgggagttgaacaataggaacacatggacgcagggaagggaacatcacacactgggacttgtcaaggggtggggggcaaagggagggagattgttaggacaaatacctaatgcacgcgggtcttaaaacctagacgacgagttgataggtgcagcaaatcaccatggtacacatacctatgtaacttacctgcacgttctgcacatgtatcccagaacttaaagtaaaattaaaaaaaaaaaaaaaaaaaaa

SEQ ID NO: 4751 - DNA, 720 bp, Macaca Fascicularis
  misc_feature (1)...(720): n = A,T,C or G
agggacagtgggcaagaggancccccaccaccacctcagtggaacacaccatcctcccctcnnnnnnnnnnnnnnnnnnnnnngagactgacccctgaccccctcccaaccctccccaccttggacaggaaggaagtaatgcaccttctcttgctgattatttatttgtttggagagacagaaatgtaaaagtgtatctagaaatatctatatctctatatatttttaactgactctttggaatcccctggggtggggtgaggggtaagtttaggcttcgcggaggggaggagacatggagcctgggaactccttgttctcccctctgctgcctctctccaccccttaaaccggttggtagaaggaatggcatttgtatggggggagggaggctggaatggagactctggattctctcctcttccccattcaagtcccagagggagggaggtggtgaggacgaggaagggaggggcaggacgggccatggaggtgccccgcccccacacctgacaatcacccacactcctggggctcttcctggctcctggggcagggcgagtccaagtgtgaggctgttgatttgttttcaatatttcttttcgtgctgtatggtgatgctttcttagtattctacacaataagaaaagacaaaagtcctcgagattcttatgagttttgtttgaaaactctttcactatatttgttgtaaagaggtta

SEQ ID NO: 4752 - DNA, 710 bp, Macaca Fascicularis
  misc_feature (1)...(710): n = A,T,C or G
agcacgnnnnnnnnnnnnnnaaggtgtccatcatcccccggggcaagggnnncnnnnnngcacagtacctgccctgggagcagcacctctatacccgggagcagctcttcnnnnnnnnnnnnnnnnnnnnnnnnnnncgggtggccgagcagctgtgcttcgggcnnnnnnnnnnnnnnnnnnnggacgacctgaggnnnnnnnnnnnnnnnnnnnnnnnnnnnnnnnnncagtttgggatgagtgagaagctgggccaggtgtnnnnnnnnnnnnnnnnnnnnnnnnnnnncccagtggagaagccgnnnnnnnnnnnnnnnnnnnagctcattgacgaggaggtccggtgcctcatcagcgctgcctacaagcgcaccctggacctgctgacacagtgccgggagcatgtggnnnnnnnnnnnnnnnnnnnnnnnnnnnnnnnnnnnnnnnnnnnnnnnnannnnnnnnnnnnnnnnngccctcggccctttgcggagaagtctacgtatgaggagtttgtagaaggcatgggcagcctggaggaggacacgtccctacccgaggggctgaagggttggaactggggacaggaggaggaggacatggagcagcctgtgcaggggagctnnnnnnnnnnnnnnnnnnnnnnnnnnnnnnnnnctgggtggaattcacgtgactgccacttacctggggcctttgcaaag

SEQ ID NO: 4753 - DNA, 501 bp, Macaca Fascicularis
  misc_feature (1)...(501): n = A,T,C or G
nnnnnnnnnnnnnnnnnnnnnnnnnnnnnnnnnnnnnnnnnnnnnnnnnnnnnnnnnnnnnnnnnnnnnnnnnnnnnnnnnnnnnnnnnnnnnnnnnnnnnnnnnnnnnnnnnnnnnnnnnnnnnnnnnnnnnnnnnnnnnnnnnnnnnnnnnnnncacgcccggcccacccagctaattcttgtatttttagtagagatggagtttcaccatgttggccaggctggtcttgaactcctgacttcaagtgatccgccctcctcggcctcctgaattgctaggattacaggcgtgagccaccgtgcccagtcccatttttgttttataaatttgttttgtttctactccttacgaatttgacagccaaaacgaatacactctaggaaaaggtacagtcctttaaaagattcatgagtgtacctaacctaggcaggtaaatatagtccagttttaacacttccatatatcctggacctgaaacaaagatagaagttattatat

SEQ ID NO: 4754 - DNA, 691 bp, Macaca Fascicularis
  misc_feature (1)...(691): n = A,T,C or G
attgctttcaaattcaggaaagtaccataatgcaggaccccagggggaagcctcatatacagagacagataaattaaatgtatatactgcagacaagccaagaaggtgtgtagattacatatttacagcactggatgttttctgaaaaccatatttatacattttattacatttacaaaaaaggcttccactactgtttacctacaataatgaaaaaaaatttacaccttttttttttcttttttggtactgtacaaactttgtataataaaaatatatctctgtacaaaagattttttttgtttttgttttacttttttttttttcctcacgggatggtgatgggtatatggcgtagatggtgggtgaagggcctcacctgccctgttcctttccaagcctctggaggtggagagaaatgccaggggtgtggagnnnnnnnnnnnnnnnngtgctgggtgccccaccagcaggtgctcctcgagcatctcatggaactttacaaggagacgcaggagagggatgggtgggcgggaagaggcgtccgctgggtggtctgagaggggcataagaagggggaagggagtagtcaaaggagaggagcgtcggggggaagggagtgtaagaaatcaggnnnnnnnnnnnnnnnnnnnnnnnnnnnncannnnnngnnnnnnnngtgtgagtgtgt

SEQ ID NO: 4755 - DNA, 662 bp, Macaca Fascicularis
cggcgcgggcggcggcggcggctcggaggcagccgcctcggggcgggacgggcgccctccggtgtcggtggtggagcgcaatgcgcgcgtcatccagtggctgtacggctgccagcgcgcccgcggaccgccgcgcgagtccgaggtgtgaccgccgcggctccggagccggcttcccaaggagtgccaagcgcggggctggccccgggtacggacaggaataccctgcttctggcgcgctgggtgcctttgcgtaagcccttccctctggaactcagtttcgcgtctgaaccttggggaagtgggacaagttgttgccgaaggcccttccctgcgcccgcggcgaaggcggagggagaggcctcgtggtccttgtggaggccaggtctggggagtcacgattggggtgggagatgagcaaacctgctgaataaagttaaaacgttatttaaatggggagctgaggaaggaggcaaacgggttttcgtggttaagcgcgtgggttttgaagtgtgtgctcccggctgactgtgtgaccctgggcaagcacttgacctccctggatgcagcggcacccctcggttattaaggagggaggagtaggggatacaagtatttcaaaatagttgtaatgcgcatggcaaagtatccagcatatagaa

SEQ ID NO: 4756 - DNA, 2411 bp, Macaca Fascicularis
ctattctgtttacctcttctgaaacagagtagaggtaaacattaaaaacattccttgtacggcttttaataattagtggtaatgggccaggcgcctagtggctccctcccaaagtgctgggattacaggcgtgaaccattgctccctgccaagaattctctttaagctgcagttgaatgtgaccaaacaccaccaccaccaccccctttactgtgtttctgtttgtcctcatgttattgaaagtaagcaagaatggttgacagcaaattggcttactcattctttcccttgtcctttatcatcctttgaggctcctcctcttccttcaggcactagcgctctttcttggaagggcccattcaaaattagtctatacttacatagagccttacatacctatatttgtgttgttaaacttaaaaattatattactttcattttacattagctaacgcctgagaaaataatcatttgcattttctctactgtgacttgacacatcatatcctttggccatttttctttttttcttactcaaaacttctaggagtagcaatcaatgatttaaacaaataatattttaacatttttattagggttttacagcatgcaagtattgtatgctattatttaaagactgtaataaaagattattaattttccaacctccttttgcataatctttgtatattagtgattattagtcttctatatgttacaaattttattttatagcaccagtgccccttcagaaaccccagaagaaacaggctgtctccagagtactactcccttattggggtggttactctttatgctcttttattattccattcacactcctagtctaagaatttcccctccctatagcttttgtatactcagatgttagggtgggagtagcagaaaacagaatcttttgagcataggggaaacatgtactctcacacttgagtcatattcattaggaagtgctaatagactggcagaggtataattacaactactccatagttgatcataggcagctaaggttcaagttaaatcatttaaagttacacatatctagtaagtgatggtgactgtattgcttcctttcagtactgcaccttcaaagatgatgatattaaaagaaaagataaaatgataaatttagacactttaggggaaaatatgtaatttgtattatgattatggatttttacaaggagtaaaaagtgaaaagtcatgaagtattcagtctgaaaatgtaatgggttcttgaatttgaaagtcttggaatttttatcttctcatttctgaattttccagttttaccacaatgaacaagtactgtagatataatgaagtttttattagttttatttttagatatgggttcttgctctattgcccatgctggagtacagtggtgccatcataactcactgcaggagtttgaaagtagcctggccaacataatgagcttccatctccataaaactaaaaagaaagtaaaaaccaaccaaatacacgcttattcttttgcgttgttggagttttcagagtatcagctttttcatactactttctttcagctattagaatacagtgaaattactctgttctggtccttcattaccatatttctccttcttatcaacatgctttgtcagggaaaacagtttataattctaaatgactttggtcagaagagctaccagtgacatataatgctacattaaaccagtttaaagtgtgttttcctttgaatgccctggaatgtacagttgttctgaaatctagtgtgtattgtaggaggtaggtttgtgttggagagtaagcaggataaagaaaaaggtagcagatcaagactaaaataaaggcccaaacaattcagtcctggtatagtcatggaagtgtcaattttaatctgtaatttgagcagtgttataacccatcatattgttggatcagggtggaaatgatgttgtatgtaagttagaaatactttgttacttggattgctgtctcgtagggattgatttcagctctccacaactgcatcaagaatttgaacatagtttttaggatctcaggcgtatattgcagaggcagtgattattgtaaactattctggtttcttaatgacttatcccaatctcatttatcttatgtaccactgctaaaactgtatccattatttaaataattaaaaatcctttcatttaaggctaaagtgtgtgcctatcatttttatagaaagcagtaaaagtgagacagggcccttttggggattaagctgtgagtaatacttaagagtagcaccagccttatttataattgttatgatatgttgcaaagattggctgcaatagcctatcttttggagggggccacagagggagcaaaaaaaaaaaaaaaaaaaaaaa

SEQ ID NO: 4757 - DNA, 1846 bp, Macaca Fascicularis
atctctgcagataggaagagagctgccaagtagggctggaaagagacgctgggcaggtagatcttgccgtaacaaggagaaggaagtcatggatttgacctaaaagccgagaagggaacattcccaagagacttggaggttccatctctgaagcgagctgaaattagcagggatttctcctgcggcttcgccgtggtgtggggaaaagggaagtagttttgatgcaaggggcggagggagtgttggcggtggcgggggtagggggggcggcagctcactgacaggttaaaaccaccccggagaggcccagctctctgaagttcgacatcagaatatacattcgagtaagggtggtcaattatttaattttttgagactctctttccttgtctttatacatgaggactaacagaattgttaagaagatgacagaaaaccacagaggaaaaagctgtagtatagtatagtggacactccataaatattagttcccttggctagattcgtcccttctttttcccaagtgtacagcaacatggattaacatttattttgtgtttctagatctccagcaaatgtatttagaactgttctattaaattttcctagaaaataaagcatctctggcgttgaggctatctaggtaatctacttcacagcatctaagtctagaaattcagaaacgtctgcatgtgcgcctctctctgtaatgtcctgattctttttttttttttttctcatccactttcccatcagtggttcagatattctctctatatttgtgtttgcaaaattctattcctgaatggaattttctcccaggaattcctgaccgaggccatctgctctggaggcagaaagtgaagcgaccgcaggctgatgcagccaggaaggcagaggccgagaggagggagcgtggcatcagaacagagccggccggggtctggcttcctcctccaggatcaagggaaatgtggggagcatggtgcagaatccggggcagctcatcgccctgctcacttgctggggaacagataaaacgcctttctcaccatcctcacaggcaacacagcaatagcagctgtgagtctcctgtctgcccaagaaggtgccccctcatcagcaagctggctctcctcataccagctggcaggggcctctcccacccctgcgctccaagcacacatcgcttccacattcctgtgacacctgccacagtccgcctggcattgcggtgtctgagcacctgtcgttgcatctgtgctgaatcaggcactgtgagagcaagaccaggccccgtggacttgggttcccactggcacctggcaggttgccctgcattgggaagtgctcgttccagcctgaatgtggacttcaggaaagggcagcccaacataagctgctttctttgcacttaggacacctggagaacagcaaaggcagcagggagctctctccggtccctttacctgcctaaagacagagcctccgaaggagcctcaccggggtttctcaccaaccagggaagactgaacataaatcacaggagtggtgtctggaggccacactatgcccagacatagactggtcacaggctgtgccctcttcttccgaggccctgttcatcttccccagaatcatttactctcccccaagtttcctacattccccctccactctcccctgtgaagcaggtatctaaacacctggatctcgctgggcttgggggtgctcacttttccttcctgtgatgcccgtgtgcacataatacatttgcctctcttttctcctgttaaaaaaaaaaaaaaaaaaaaaaaaaaaaaaaaaaaaaaaaaaaaaaaaaaaa

SEQ ID NO: 4758 - DNA, 358 bp, Macaca Fascicularis
gaagtgtgtgggtgtttgtcacagagctcttggaacacgcgggcaggaaagagatattggccagggctctttaaacccccgaaatgatccaaacacgcgcgaatattccccgcgcgccctctcatcagttttcaagaaggggaatatgtggtctccacttgaaccagtgaacttgtaaaacaaagtgcctctcgagggccacgcccagcccactcactgtccaaatatggtggctagagatacagggggtgcccctacctctctgtgtggaggtttcagtatgtcagtgtgttagcggttttcactgaccctcttcttaagaggtcttaataaaccagtgaagtgttaaaaaaacacg

SEQ ID NO: 4759 - DNA, 729 bp, Macaca Fascicularis
  misc_feature (1)...(729): n = A,T,C or G
caaacgcgggatgaaaatctccagctgnnnnnaannnnnnnnnnnnnnnngctgttgatgttgcaaagcagtgcacctccatggacttagtgcccttattaatctccagctgccgctgcagtcctcaactttgtttttcagaggacagagatgtagaacataaacctgttcttgcttgcccaaatgtgtcagatcatgtcaggtttgcttgccagtctcaggaagatgtgcccctgcttcatggggtctactgtcacacaccttttcctcaatccagtccctcccgtctcagtgtcaattatcctgccttgtgatttcaaccttctctcaacctgctctcttgttcctgttaccctgtaaagcatgtcttcctgctaaaaatgaaaacctcccttgccacatatagcagggcttttcagcttactgttaacgtttggcgctacataatttgtgggcagctgtcctgttcattgtgtgatgtttaacaatattcctatcctctatccactagatatcagccccccaccccctgagtcataatacaaaaattacttcagacattgccaaatgccctctgggaagcgaagttgccctatgttgagaggtactcccttgtaaatgctgtatctcacatcaccttcatttagcaccttgcatttaacttgctgtagaccactgaggcttaatcatcccaccatcacaggttttagaaaatcagttgcgtttgga

SEQ ID NO: 4760 - DNA, 568 bp, Macaca Fascicularis
caaaagcgcattttttgaatagggtttaactctcacagaatgcagtgtaactatgtgtttcatatttgaggtgttccccccaaaaaaatttggttcactccttgagagtgtctggctgtaagaaaaaatgggggatatctgtcgtgatgttatctaaagcgcagaatgaccaccccaaacctcctctgggatccttttgatctaacttttgaatgtctcaccaaaaataacatttctgttggcattctgggtcctaaaacccatatccctctcctttttccttctgttgctctcttccttcataccctcttccatgtccgtgtgcacttgtctccctgcaaaatactttttgcagagatgtttctcatgtgttctttctttccttgtctggaagagcaaaaaaatatcaagatcatgatctgctgtattatccttgctatcctcttatcttccaccattgagagcatatttgcctgaaaagtgagagccatctgtggagacggtcgcgccgcctttctcttacttgaaacctttgcgtcgtgggggcactctatgcgccttactctgg

SEQ ID NO: 4761 - DNA, 170 bp, Macaca Fascicularis
gaattttcttttcataatttgttacgattgaatcctgagggtatgttccttggtaaatcgtgttaattatgtccactcttataatgcattcaacaattttacaaaacagataattgtttattatattctgaaaaccatgatattaatattttatttccttttttaaagag

SEQ ID NO: 4762 - DNA, 772 bp, Macaca Fascicularis
  misc_feature (1)...(772): n = A,T,C or G
gacagtatgggtgcgtacagtgnnnagtgtgattcgtgcacggcccgtgttccaggagcatgtcctcccaaggagacacccagacccntccagcacgagcnngntacgttgctgtggcagaggcagcatttcagctgtgaggagggtcgttggattcatgggttttatctgtaaaaatggttgtcttgacttcttatcctcatatgggtgagtgataaaattggttggcgtttcatgacatatggacttcttttgaaatagcaagtcaaatgtagtgaccgaattgtggaagagatttctgtaaaacaggaaatgtgtaagttcgtctgaaaactgacggttatgtaagttgctgaggcactcggatggcagcggattctgggttctcgagtgttctgtgcgtcttacgtgccttggaggcctctgcggtctcagtgctggggtggcacacacacctgtgtaatgtgcggtctgggccactgacaagcagttgtgttgtctaagccaaagggggaagctgactgttatttaccaaaaaaaattctgtcattcaaaccaaaatgtctgcggaatcagcagtttgatactctctgtaatcagaacagtgggcagtgcctgggtgaacgtgtctagcagcccctctgcgggatcgctgtaacgggagtggaatgtacatatttatttacttttctaactgctccaacagccaaatgccttttttatgaccattgtattcagttcattaccaaagaaatgtttgcacttgtaatga

SEQ ID NO: 4763 - DNA, 2908 bp, Macaca Fascicularis
gtgcgctgtggacggaggttgtggagagagcagggcggcattggtggctgcggctgaggcttgagccagagatttaaaaatggacaaagatgattttctttccatggactttaaagattgaagaaatggcagtaaacctatggaactgggcacttaccataggaggaggttggcatgtaaatgaagagcggaaaattaaattacattatgttgcttgcaagttgctgagtatgtgtgaagcttcatttgcctcagaacaaggtattcaacgactgattatgatgaatataagaataggaagagaatggttggatgttggaaattttctaatcgctgatgaatgttttcaagctgctgtggccagtctggagcaattatacatcaaattaattcaaaggagctcccctgaggctgacttgatcatggagaagattactgttgagagagaccacttcagagtgctttcttaccaagcagagtctgcagttgctcaaggggattttcaaagagcatctatgtgtgtactgcagtgtaaagatatgttgatgaggctcccccagatgacttcaagtcttcatcatctctgttacaactttggagtaggaacccagaagaataataaatacgaagaaagttctttctggcttagccaaagctatgatattgggaagatggataagaaatctactaggccagaaacgctggctaaagttctacggctactagccaccaattatttggattgggataacaccaaatattatgataaggctcttaatgctgtaaacctagcaaacaaggaacatttaaattctactgggcttttcctaaaaatgaaaatcctcttgaaaggcgaaacatctaatgaagaactccttgaagctgtcatggaaatactacatcttgacatgcccttagacttctgtctgaacattgctaaactgctgatggatcatgaaggagaatctgttgggtttcatttcctgacaattattcatgaacgttttaagtcatcggaaaatactggaaaagttctgctactctatattgacatgcttttacaaaggaaggaagaactgcttgccaaggagaagattgaagaaatcattttagctcaccaaacaggaagacaactgacagcagaattaaagaactggttacacaacattctgtggagaaaagccaccagtagttttgaggtacaaaattacgctgatgctctacaatggtactattattctctgaggttttattcacctgatgaaatggatctggacttcgccaagctgcagaggaacatggcttgctgttacctgaatttgcaacaacttgataaggccaaagaggcagtggcagaagctgaacgacatgatcctagaaacgttttcactcaattttatatattcaagattgcagtaatagagggcaactctgaaagagctttgcaggcaataattactttagagaatgtattaacagatgaagagtccgaagataatgatctagttgcagagagaggttcacctaccatgcttctaagtttagctgcccagtttgctctagagaatggacaacaaattgtggcagaaaaagctttggaatatttagctcaacattcagaagaccaggaacaagttcttacagctataaagtgtttgcttcgtgttgttcttccaaaaattgctgaaatgccggaatctgaagataagaagaaagaaatggatcgacttttgacttgcctgaatagagcctttgtgaaactttctcagccttttggtgaagaagacttaagtttggagtcaagagttaatgaagctcagtggtttcgaaaaatagcttggaacttggctgtgcaatgtgacaaagatccagtgataatgagagagtttttcatactttcttataagatgtcccagttttgtccttctgatcaagtaattctgattgcacggaaaacatgtttacttatggcagctgcagttgatctagagcaaggcagaaaagcttcaacagcttttgaacagactatgttcctgagtcgtgcacttgaggagatccagacatgcaatgatatccagaatttcctgaaacaaacagggaccttctcaaatgattcatgtgagaaattgcttctgctgtacgagtttgaagttagagccaaattgaatgatccattactggaaagcttcctggaatcagtgtgggagctgcctcatttagaaactaaaacatttgaaacaattgcaataatagcaatggaaaagcctgcacactatcctttcattgctctcaaggccttgaaaaaggctttattgctctacaaaaaggaagaatcaattgatgtatcacaatacagcaaatgtatgcacaacttgattaacctctcagtgccagatggggcgtcgaatgtagagctctgtcccctggaagaagtttggggctattttgaagatgctctgagccacattagccacactaaagactacccagaaatggagattctctggctgatggtcaagtcctggaatactggaatacttatgtttagcaggagcaagtatgtatctactgaaaagtggtgtggcctggccttgcgtttccttgaccaccttacctccttcaaggaaagctatgaaactcagatgaatatgctgtatagtcagcttgtggaagcactgagtaacaacaagggcccagtttttcatgaacatggctactggagcaagtcagattaggcaagctcacggccacatgaagaagatacgttgtcctgagatgctgactgtttaaatttttgccagagtttctcttgagcttttgtttctgtttcctcagaccctgttttcatgttgttgaataaactttctaaaataaaagcatgttgaatttaaaaaaaaaaaaaaaaaaa

SEQ ID NO: 4764 - DNA, 763 bp, Macaca Fascicularis
  misc_feature (1)...(763): n = A,T,C or G
gagcagtgaaaggagagaccagtattgtgacatgataatttnnnnnnnacagctcattcaatcattttatagtctatggcaatatccaagagattgccaagagtagaggacagaatannncatctgacagaatctgattggtttactgtttttctaatcatatgtgatcacactgggaagcagaattatgctttattaaaataaacctgcttctgcctcattttcctaagctatgagaacgattagagaaacagattcatgcttgtatcttgcattcagaaaacaaactgtcctgctaatcaaagctgcatattnnnnnnnnnnnnnnnnnnnnnnnnnnnnnnnaccatactggcaatctgaaactggcaaacacaaaggattgttttcattaggcttaccatgttgctttgcttttttaacacactgagccaaagattcagtataattatgaggcttttgccttatgttgagttcagtgtaagcatggaagctagtgattctgaatgttatatatatccattgcatgttgaactcctttagcattttgttcttaaacaaacttagaatatcaaaagaaaaatgtatgatccgttaagtgagagtgtttatgattattgctagaaagaaggaagacttcatattctcatcgcccatttttcaatcttgttacattgatctgtacattattttaagctacatgtttgtaattgtttaaaacataaagtggaaacattacacaatgtccttaataaatagatcc

SEQ ID NO: 4765 - DNA, 1049 bp, Macaca Fascicularis
  misc_feature (1)...(1049): n = A,T,C or G
atgtacannnnnnnnnnnnnnnnnnnnnnnnnnnnnnnnnnnnnacgccgccggcgaccactgaattctgtgttnnnnnnnnnnnnnnnnnnnnnnnnnnnnnnnnnnnnnnnnnnnnnntcatcgataaccccannnnnnnnnnngacagaggcattnnnnnnnnnnnnnnnnannnnnnnnnnnnnnnnnnnnnnnnnnnnnnnagcagttttannnnnnnnnnnnnnnnnnnnnnnnnnnnnnnnnnnnnnnnnnnnnnnnnnnnnnactctagcctctctgatgaccggctcannnnnnnnnnnnnnnnngccccgcagcagagcctggtgctcctggaggatgtggatgctgctttnnnnnnnnnnnncttggctgtggagaacccagtcaagtaccaaggccnnnnnnnnnnnnnntnnnnnnnnnnnnnnnnnnnnnnnnnnnnnnnnnnnnnnnnnnnnnnnnnnnnnnnnnnnnnnnnnnnnnnnnnnnnnnnnnggctggaccccgccctgatacgccccgggcgannnnnnnnnnnnnnnnnngtgggctactgctcacactggcagctgtcccagatgttccagaggttctatccagggcaggcaccttccttagctgaggactttgcagaacgtgtccttcaagctacaacccagatcagtcctgcccaggtgcagggctacttcatgctgtatannnnnnnnnnnnnnngggcaattcannnnnnnnnnnnnnnnnnnnnnnnnnnnnnnnnnnnncagctcagctctcctcctttagttcaataaacatctgccacactactctgctctcatctccnnnnnnnnnnnnnnnnnnnnnngagtaagacaggggctgcaatcacaggtgtagaggactacatgctcacaaacaagacgttccaataagtcctgctcttgcaaacgaagcagggtggtggggnnnnnnnnnnnnnnnnnnnncttgaaaatccagaaattcagggaaaggtcagaaaaacaacaatgtgtcttgtgactggcaacatccacaaacga

SEQ ID NO: 4766 - DNA, 719 bp, Macaca Fascicularis
  misc_feature (1)...(719): n = A,T,C or G
tacacaagtcagtcagccagcctcacagatctgataaaacagttgtggacctctgcatgacaaaccaaacgtgcacccaccaccgctctcaccgtgcgtccaggagcttggggtccaacggagggtacatcgacttcacaacatcatccaccctgaccagaggcaaaaggtgttcagtacttcactttcttgatctccttttctccttcttttttttttctgnnnnnnnnnnnnnnnnnnnnnnnnnnnnnnnnnnnnnnnnnnnnnnnnnnnnnnnnnnnnnnnnnnnnnnnnnnnnnnnnnnnnnnnnnnnnnnnnnnnnnnnnnnnnnnnnnnnnnnnnnnnnnnnnnnnnnnnnnnnnnnnnnnnnnnnnnnnnnnnnnnnnnnnnnnnnnnnnnnnnnnnnnnnnnnnnnnnnnnnnnnnnnnnctgacctcaggtaatccgcccacctcagccttccatagtgctgggattacaggtgcatgagccaccacacccagccccttccttcctgtctatctttattccaattcttcttttttgatattctagacccggtctttaatggttctttctccaattgcttctgcattctcagacactgaggcacaaagacttcaggttcagtctttgtagagacctattttgttttccagttttgtttcagttccagctggtttttaaaaatacagtcatacatatggaatgatgttcaa

SEQ ID NO: 4767 - DNA, 2843 bp, Macaca Fascicularis
attaatatgagggcttttaggagaatttactcagtgggatcaagaggaatttttttttggaggaagtgtttagctgagatctcaagtaagttaatttgatcaagatgaagaaaagagttttctgggaagaaggagtagcatatacagaggttctaaggtgggagggagcatagtaacaaatattaaacaaaggtcagtgtggcagaattctagagcaagaggttgcatggtaagtgatgatgctagggagttagataggagccaaaccgcagaactttgtgtaggccaagcttttctttatccttagggttaatatttaaacttagactaatgttccttaggtttaacaagaaaaacctactattagttataaaaggtttgtattatagaagttcatttttatttcagtttaaaaccaataatgctttttcccatagaatcatagttacagtgtcagatctcataagaaatccgtttaacagaaatgacactggaaaccagtcaacgtagtgtcataaatataaccaggtagaagtcagaaaagaaaaggaaggagattaaaaattatgtctatatgtattcaaaagagaatgccctaggtatgattgactaagctgtgaataatgaagaaaaaagccttacttcaagtgcattagactgatgtaagagatcctaacaaatgatggtgagggacacattcagctggacagcttagaagatcctcagctggcacctccttatagaacagtgtgataatgtcgagcaaaccaaggtggaaggagagtagaagtatcacattcataatttgttatgaatctagcacatattcgtgtcagttgttagaatataaacatttaaaaatttatatactggtaagaaatgcagagctaccaaatgtcagcaatacagatgccaactttattttgattatgtctagagtgatttcatactattagaagtgattataaattgctcagttgtactaagtattttaggccataatgttagctttgaatatcttagtgtgtatcacttggagtgatactttaaagaggaagttgaagaaatttaattttttaattcttatttttcttttaacttataacactgtcaataaattatcttcatttcatgttgatcttaagttttaagcctttttggacactagtttctgtctgtattaagtaattaacaatctatttaataactgaagattcaagaaatgtccaaaatattaagagcattataaaaaaataattggttaagccacttgtattaagaagaaaatgtcacaaagatgtaataaattgtaagagaaaaggaagatatgtacaagtcttctttaaataaacagcatatcatgtaacagttggttgatgaattctgccaatgcatgaagttgaaaattgatgaatgtacttcatcaggtgatcttgaacttaattttctcgcattctcaggtacagcagaccatacttttatagcagattggcatctaaaaataagaactatagaatttggagcttatttatttgtttacttatatttacaacattctaattgagacagtaccagcattgattcattttccgtgcaatagctagcagactaattttaattaatagaccaacaatgtttggaaagcttattagaatgtttgacagcctgggcaccatggtaaaacctcatctctgcaaaaaatgcaaaaaattagccaggcatggggcaagtgcctgtagtcccaggtccttaggaggccgaggtaggaggatcacttaagcctgagaggtcaaggctgcagggagccgtgatcatgccactgcactccagcctgggtgatacagtaagaccctgtctcaaaacaaaagaatatttgaaaagacagtttactaaatttagctaataattctaagaggtcagtgtacctcttaaatagaaatgaagtttcacttgtgcattttttagggattgatacatttcttctattttacagctttctactgtcatttagcaaagtatattccaaggtcctctagttctgtgataacttagtaggtatgattatctttgcgcctgaaaaaacccaaaaggctgctttatcaaataaggttttaaaaccatgattatgattaatgaatgctggataaagatttttaccgcagtattttttcaaggggtcttaatatgtaattcttctgaacttctaataatggtcactaacatttattgagtacttaactttgcaccactcattgcactaaacattttatagacattatcttattttatcattgtaacaaacattctgaggaacatacttaaggaagtgtttcttcatatttcactgcttgtaaacacctatccaaaaacttacgtgtagaatacaaaagtgagacgaacatcattttcttttgttgcatccttaacggctttgagaaagaaaggtcatgaaaattatttttaaagttaagtgctgagcttatcaatatgtttttacactcttctaattaccgttactcacagatgacgaatgataaacattataccctttttattaataggcgacaacctgtagagctttcagagaccttcctgggtttgaacactggctgcatagactgaatactacaatatagaacctttaatgaactgttaaggttctgaactttagtttcttcatcagtaaaataagaatgcatatctcagagttgtcatgactctgaaggatagagtatgaagtcctagcatgttgtggacatttactaaattttttcattttccttctctcctattactaatagcatctactaccatagtagatgaaaaaaaaaaaaaaaaaaaaa

SEQ ID NO: 4768 - DNA, 723 bp, Macaca Fascicularis
  misc_feature (1)...(723): n = A,T,C or G
cattcccagcattccagtctctctcgggatgaagaggatgaactgtcnnnnnnnnnnnnnnnnnnnnnnnnnaggcccaaagcacagcctgaggaggaagatgaagacgaggtgagcatgaagggacgcccacccccannnnnnnnnnnnnnnnnnnnnnnnnnnnnnnnnnnnnnnnnnnnnnnnnnnnnnnnnnnnnnnnnnnnnnnnnaaaggtttctctgcaacccttccctaagcatgattttgcacagccagccctgggtctaggtgagccacagggtgaggtcaaggtgagcattctgggaacaatagtttgggctcagacagtggnnnnnnnnnnnnnnnnnncccacccccaccagacctggtgaagaggatcataaccatcttcaaaaacactggatattcagcagcaagttggaagaaggactggtagattcccctccagccagtcacctgtaagagtcttgtcctctgccagactttnnnnnnnnnnnnnnnnnnnnnnnnnnnncctgggagccctcctctacctgaatccagtgctcaactgtgccccggcaacaagtcaagtcacctgggttgaggtcttcctggtagaaccaagggagattacaccatttaatcccggtgcagttaacagcctggcctatagtcctgggacatgtatcttcttctctgccttaaatctgatataagaggcnnnatgactattgaaaa

SEQ ID NO: 4769 - DNA, 763 bp, Macaca Fascicularis
  misc_feature (1)...(763): n = A,T,C or G
ttnntatctttttctatggggaagctatagggtgggtaaggaaaaaatgttgaatgcttttactttgctgaaaatattagaactctcttgtgacaggatacagcaaattataattaaatataaattaccagaaccagagctacctctaagtcatacttcctcaagcacaaagctctcaggcatatgagacccactttaatgaagggtctctgatttcttgagcatcagcgagtttcagaagtgactatttttttgtactcttctagtttccttgtaactgtacactttttcccattccacactgtgcttaaatgacaaagactcttctgagaagccaaattctttctaagtattaactagagatattgttgattaaagaaaatctagaannnnnnnnnnnnnnnnnnnnnnnnnnnntaatagtcttttgatgaacaattcttttctgagaaatgtttataagaaatggggtgatactttaaatgcttttcttaagttgaaggcacaacagttaatggctgtattgttgctgttctgttgctgacatgtttttgataaagctttaacattcctgctactaatcttggcggagagtgtttgccaggtttcagtgtgggctgcagctttttgtgctccttctctggtttgtagtgtaatgagttcataagctaaattttcagaaataagtttgtttcagattatgtctcttgtctacttgggagcaacatgtcctttcaatcatgggatgacacagaaaaataaa

SEQ ID NO: 4770 - DNA, 672 bp, Macaca Fascicularis
cagaggagaatgtattccatgtcttgaagctgcctggtcttccatgggaccttctccaatgccctgtaacaaggaagctgcttcagtatgtcctcgacagaaagattttcacttgcttttgagtccacgttgaccacagatgagacctccttctctgacctctcacttggaaaatcccctaccaggtcttcggcagaagctccagtgaattgctccccagtgtgtactctgttatgtgaccagatggttttgacccactgcttggggcaggcagcatatcttctggaccactgaagatatgtttctcacagatgcgactgtctgcggctgttgtcacagttttaatttccaagacttgaacttgctgccatgtccactgaagaagggttcaactttaacactgatgagcaggtgctggaaggccacttcagcaccttcgggcctatctctgtggtggttgtcaaggaaactcagcggtccagggttttggtttcgtcaccatcaccaacccagagcatgcctcagatgccatgagagccatgaacagagagtccctggatggtcaccagatccgcgtggatcatgcagccaaggctggaggccaagatcagccctcagggatcatcatcaggactgccatgagctgagccaccttgttttcctgccacaaac

SEQ ID NO: 4771 - DNA, 703 bp, Macaca Fascicularis
  misc_feature (1)...(703): n = A,T,C or G
annnnnnnnnnnnnnnnnnnnnnnnnnnnnnnnnnnnnnnnnnnnnncaatttagctgggcactgagtagccatatgctttctcagtacaagtgtgtctgccttcaacatgtagggttgatcaagctattacttaattgcaaatatcccttgtatgagattaactaaaaaaattttgctatgtctgatctaaatgtttgcattttgttcaactaaatatttgtagattgcaagttttgtttaaaataactttattgagtttttaagtcctgatctgttctaaggtgcctttctcacctcccattgattcagtgattctgaagttcttaatttgcaagtaaaataagtctactagagaggaggaaattaggcacaaagtgaccaattctcatgcccatttgcaaagcaaaactataaggatgatgaaacctgggtaactaaattaatggatcatttcactaaatcagatnnnnnnnnnnnnnnnnatattaacttgtctccctagaagctgatatttttcgccttaaatgacatggttgtgtttttgtaaaagaaacttaatctaatataattatgtgcatttaagtgagcagttctaagnnnnnnnnnnnnnnnnnnnnnnnnnnnnnnnnnnnnnnnnnnnntcaggaacaccatatccatttcaagctaccattaaagtgtaatttcctttgctctcttct

SEQ ID NO: 4772 - DNA, 668 bp, Macaca Fascicularis
  misc_feature (1)...(668): n = A,T,C or G
agtagctgggattacaggcgcctnnnnnnnnnnnnnnnnnnnnnnnnnnnnnnnnnnnnnnnnnnnnnnnnnnnnnnnnnnnnnnnnnnnnnnnnnnnnnnnnnnnnnnnnnnnnnnnnnnnnnnnnnnnnnnnnnnnnnnnnnnnnnnnnnnnnnagccaccacacccagccccagattttcttttgtacaattatatgagattttttgatcttgcttttcaaacaagtaaatttaaatcctaatttttcaaatttgttgcatgtagcatgcttaaagtttttcacactttttaattaatttatgtatgtttataaagtggaagcagctgttttcagtactaaatagcttattctatcttatgtcaaccctgccagactttgggagagaaagtatttgattagaatagtatgggcgtgcatttatctctgtagggaaaggtggaaaggcttctgggaatccactgtgtgccagagcattgtaggaaattgaaatgtattttcttaatttagcttcataacagctcgtgaaggtgaaaagtattattagccccattttataaagaagttagggaaataaaaattaagtgttttatctgctaaggtcacacaggtagaaaacagtagaatatatcttattgggaggactgcttgagcccaggagttcag

SEQ ID NO: 4773 - DNA, 721 bp, Macaca Fascicularis
  misc_feature (1)...(721): n = A,T,C or G
tttcctgtggggactgctcccgggttgtcacatctcntattctcaagaggcacnnnnnnnnnnnnnnnnnnnnnnnnncaagaccccagtgcagagtgannnnnnnnnnnnnnnnnnnnnnnntttcctccctgctgagnnnnnnnnnnnnnnnngatgggagctacgaagtgaagagtgtcctgggaaaggaggtggggttgttannnnnnnnnnnnnnnnnnnnaaccgcccacccgaccagctgcattggattggaggaaatcgagcttctgagtgcaggaggggcctctgcagaacactannnnnnnnnnnnnnnnnnnnnnnnnnnnnnnnnnnnnnnnnngggtggtggtggtggtggtgatttggggtagttacttgttaactatggacacagtgaatgtagtttacgatcttgaaacatatttttctggggaaatgttaagatatagttttgtgaactgtaaatcaaaatacctttttctacagttttatgttttttctgcaaatttaggaacatatttacttttgttttcacattgaatcttaagctcttcatttggtattcaggcaatatatgagaagaaaaaattttgttcatttgtaattttaacaagttgaacattttaccaggattgagcatgtttttcttacagtatttgttttaacattcccccaaagaaannnnnnnnnnnnnnnnacctttgcaccatactta

SEQ ID NO: 4774 - DNA, 3193 bp, Macaca Fascicularis
gatgttaagttttcctgtagtccagagattccataggccagtgtcagggaacacgggtcagggctgggaaggcattagaacagaagatatattggaggctctgttacgctggtcatccagcccaaccagatatctcttgttatatgctaacctcattttttctttattgtctatagtggcataaaataaattttatgtagccaaaaaacctaacaaaaagcacttttctgtataatgagtagcttattttaagaatgggtactacgtaaatacgggcaagtgaaagttcattttgttcagtgctatgggctggtgcgttgcatttcaacactagcttcttacttttatctaccctgagggtagataacccatattctaaaatgcagtatcattttcatttactgttagtaacattttaagaaatatgtagtttctaaaacttcatatactttatgtggaatatgaacaactttaatataaatagtctagaaaaaaactgttttttttaggaaaaattgccacgaaatcatgagctaagtcaatggttattttaagccacttagttctgagactagtatttcatacagaaaaagctaatactgatatcacatgctaattgcgtataaaacactaggaatgtcaaaatagaacataagaaaatgaatctagtggacccactgcatagtgtaactttgggatgaatttaaaataatatttaagttgcagtcaattttctgttggtctgattttaccaaataaccccctaaataagaagtctgatttatctaaaatagaagttaacgtagcatcccagtattgccattctaaaaccctggcgtgtaaatgggagaaatagaaataagctcaaactcggtagagtaaccatttcttcatgaaccatagcatttaactagaatttggccagctcatgcctgtaatcccagcattttgggaggccaaggcagccaaatcacttgagcccgggagttcaagaccagcctggacaacatggtgaaactccatctcttcaaaaatacatatatttttgtgtgtgtatgtgtgtgcacaaaaattacctaagcgtggtggtgcacgcctgtaatcacagctacctgggaggcagaggttgcagtgagctgagatcgcatcattgcaccccaccctgggtaacagagcgagacgactctatctcaaaaaaaagaatttcactagaatttatatcttcaatgtttgcattagatcgtcaccagcactttctgccttgtgactgtcaggactaatccttacattgtttatcgtatgtcctttacctcagtttatgtccatcaccacaagaaacccagacctccctaatcataccttatgccctggtcttacccgcatatggctcgatacagctgcatctccccaaacctcagaactccttgggccatcattgtcagagacatttgaaccagagcaactccatcttgaataggggctgggtataatgaagctgagagccactgggctgcgttcccaggaagttaggcattcttagtcacaggatgagataagagattggctcaaggtaaggtcacaaagaccttcctggtaaaacagcatgtggtaaggaagccagccaaaacccaccaaaaccaagatgggaatgaaagtacctctggtcgtcctcactgctcattatacactagttataatgcattggcatgctaacagacactcccaccagcaccatgacagtttacaaatgccatggcaacatcaggaagttatcctatatggtctaaaaaggggaggaaccctcagttctgagaaccacccttttcctcgaaaactcatgaataatccaccccttgtttagcgtatgatcaagaaataaccataaaaatagccaaccagcagctcatgctgctgctctgcctatggagtagccattctttcttcataaacctgctttcactttatggactcccccgaattcttctgcaggagatccaagaaccctctcttggagtcttaatcgggacccctttccagtaacctcagcaggatctgtgagtgccagtttccttctgtggggaaaaactaagtgctaagtacacttttttcccccttttctctgtttttaagagaactttctgcccttttgaagtggctacattgtctggggtacataccatggagttcattgtcacaggagaatttaggacagacacacgaggagtttaggaaggggaggtttaataggtagaagagaagggaaagagaaacagcttcctctatagatatctgcactcacaccgtgcatacctccaggctttaaggcatggcccataatgtgtctccgagtggaaaaaactgatggtctccaagtggaaaagaccagttggtggtgaatgtgccagattttctagtccggtttgagaaggtggtttctgattggttcgatcaggtatgacatttggatagtgcatgtggaaggctggtcgcccctctctgatcttgtgcaaataggctttccagttgattgggcccatcttgtctaacacgtggctgttagacagggaagagaagggaagatgaagccaccatcttgaaaatgtctagtcgttagtttctgctggcattcacccatgcaagctcccagcttgtttgtctatgtctgcagctcggctttacagactgctctttgttagaaaatgatttggagctgcttttcgttaaagagaaaagccttaccggggactcccatacccttactatctgcttaagtgatttcttcttaactcctatatcacttttacacagcacaaaatgatgtgtccataaatgagcctttgcaagattaccatttatcaaacaaaaccagtgatgtttagttaactgtttgtaatagtaaatggttagtagaatgtctaattcaataaatgtttcataaatgagtaaatgaatggtttaatttcagtaagctcgattcttgatcaaacgttcccttttaaatctaattttaaaaatctgagtttgatattttttaaaaaggttaatataaatgtagcatacaatacaggaatttcactccaggttatctgccaagagaaatgaaaatatgtccacatgaagacttgcacacaaatgttctaagcgtgattcataatagccaaaaaaaaaaaaaaaaaaaaaaaaaaaaaaaaaa

SEQ ID NO: 4775 - DNA, 745 bp, Macaca Fascicularis
  misc_feature (1)...(745): n = A,T,C or G
acagaggcgggggcagcacgtgccctccacagccaccgctttccacctcagcagcccaggcctcctgacccagccctgcccggagagtgggttcccctcacccgggaagctggaatcctcctgcctgagaggaagcagacagcacagggacacgcctgccacctcggggtcagcctccgagctggtgcagggtgtcgagagnnnnnnnnnnnnnnnnnnnctggtcccagcacgcagcaatcctggtagctctgcagaggagacaggaacccgagaaggagctggggtaggaggcggccgtagtctgcttgccacatagaggtgggcttctcccagccatggtgtcccctctgcctcccctcccctgaccctcctgccttccacgtggagatggtcctnnnnnnnnnnnnnnnncaccgtgggcttggaccccctggactgaggcaggtgtcctagggctgggggtgcagcccgagggaatggagaccacactcctggctcaggtctgccggggccggcggtgggttggggaagaagagggctcaggcccaacaggggtggaagcccctgccactgctactaccccctccaaagctttaaggaagatgaagtgagacccctccccttaggcctggggagccatagggctggcttctctgtgggtgcgtggacgtggagttgggagctgggaatctattttttgtattatgttttgtgctactgtagttttggtgtggcactatgt

SEQ ID NO: 4776 - DNA, 718 bp, Macaca Fascicularis
  misc_feature (1)...(718): n = A,T,C or G
agcacagggcagagggacaccccagggaccnatcagactcatgacacagagaaacgcaggtgggctgccgggccggccgcagaggccacaggcttcccgcctgtgaggagccgccctgtatgtctgagcccctcnnnnnnnnnnnnnnnnnnnnnnnnnnnnnnnnnnnnnnnnnnnnnnnnnnnnnnnnnnnnaaacaaaaatccccaccgaaacacagctaaaaaaataacacattttcccaagattacattaccaaaaacagttgttacgtcattggagggcgtccattaatactgctcggagaagcaccagcctacatggacacacagatggggtcgcgtgtccaccctaaagcattaaagtgctttaactggtaacagaggagtggatgtttgtgcgttggagacactgactgttccgagtgacaggtgtctctgtgccaggatactgcgagttgggcccctgggtacagcaagggctttccagcagcccaggcctggtgggaacgctgggggcatgggggagagtcgctgtttctgaccagagtgagtnnnnnnnnnnnnnnnnnnnnnnnnnnnnnnnntcctcctgcctggcctctctgagcagactcaggaccactgcccgtccccctcagctccaggagtgccggcagcctccctcctacccctgcactgccgggaaaaccatctgccttcaagatttatttgttgat

SEQ ID NO: 4777 - DNA, 728 bp, Macaca Fascicularis
  misc_feature (1)...(728): n = A,T,C or G
acagattaatagtgattcatatagtacacttgtgctgtagcattttgttggactaaggtagcgatgaagctttttatcatttgaagaagtataggtagcaaacaagggagcaggaagcannnnnnnnnnnctactataactcctattatgagagtttaaatccttctannnnnnnnnnnnnnnnnnnnnnnnnnnnnnnnnnnnnnnnnnnnnnnnnnnnnnnnnnnnnnnnnnnnnnnnnnnnnnnnnnnnnnnnnnnnnnnnnnnnnnnnnnnnnnnnnnnnnnnnctatgtgtagacaacaattagtaaggttaagttgctnnnnnnnnnnnnnnnnnnnnnnnnnnnnnnnnncaagagccaatctattttgatagatagtacttctcgtctgtgtttcttgccaggccaaaatagtcaaggctctgtcggttttattagtgattatttctaagacagctggtaaccatatgattcggttgaacatgtaagtgcccagcctgttgtacattttacattatagagggaatataattgtaacgtttgtaacacaaagaaatggtgagtgcttgaggtgatggttaccagatttaccctgatgtgattattatatgtgattatacactgtnnnnnnnnnnnnnnnnnnnnnnngtgattatacattgtctgtatcgaaatatctcacacaccctatactatatacacctactatgtagccacaaaga

SEQ ID NO: 4778 - DNA, 724 bp, Macaca Fascicularis
  misc_feature (1)...(724): n = A,T,C or G
tgacgagatggaaatgcactttataatgtgtttgagcaaacctcgcctctcctacaacggtgtttgcctttccaccgaaataataagagaacacaaagaaacagcaatgagaaggcctctcaagcagagggtcccagtcccagccccaccatctgcgaaccctctcatgaggtgtgtgacttccttgggcttccggatcctcattcgcaaaatgagaataacaccgggtgacnnnnnnnnnnnnnnnnannnnnnnnnnnnnnntaaagatgcgggtgagtgtgtgatctgcctggaggannnnnnnnnnnnnnnnnnnnnngccaggctgccctgcctgtgcatctatcacaaaagctgcatagactcgtggtttgaagtgaacagatcttgtccggaacaccctgcggactgacctgcgggcttgcttgctgacnnnnnnnnnnnnnnnnnngagcccctgctccagggaggaggctcaccggaccctggggcggagctgagcttgggacaccagcgggaacagggcaccccttctgcactgacttccagatcatggttctcccttcctccctgaggacaccaaattggatgagagcaagtttgagagaagnnnnnnnnnnnnnnnatccttcccctcacccctcagcccaggagggaaagggcattttctttttcatctttgaaagnnnnttgtgggtctgtctttaaagtgttacaaaaa

SEQ ID NO: 4779 - DNA, 602 bp, Macaca Fascicularis
ccaagtgggcagccaccacccagcccttcattgggcgtctccccctgagagctgtcaggaccacatctgtcctcaccctgtgggaccgcctgccactccctccctagcccttccagcctgggacacacacacaaacacacacacacgcacacacacacatcttacctctcatgcgtgttttaccttttgatgttcagagtggctcactggctgggagtccttacctcggggagagggggaggttggttccttgggggggccaaaggcagggaatgcctggagggtaacttggggggtcaccatgaccccttctttctccagaaacagctgcttctccccccatcccagggtcccacccccaacccccaaagaggtggcccttgtttacagtgaggactcggccactgtgtctgtttcctgaaatataaactgtagcgaccccagactgtagagatttttatgtgtttggatacatctgctgtgtgggaaaaaaaaacaaaaacaaaactacaaaaaccctaattttgtacatactgtatttttactattgaactgtattctagtggctgttcatgctccaagactttagttaccgagacatg

SEQ ID NO: 4780 - DNA, 2510 bp, Macaca Fascicularis
catacaaattggagttgggcagttcactggccaggcacctgactcttctggataagaagagtctggagccagtccgggagtcgggtgcacactgtaattgaccaacccatgccataccggaagtgctgatgtcactttcctacttcaactgtcccctccccagagtataccttcgggacattggaaaaaagacaccccttaatgtagccccaaggcctctgctctccatgaacctcctgagggcgactgcagcatggcgagcagggagccccgggcttcttgataaaagtgtaaaatgaagctctgtctgaaaggacccccatctgttagatttggaaaacctctaaaggccgtttgcttttcacaatgagtagactcttagggatgtattctaaggaaaggcagaagatatggagaaacaaattcaacaagaatattctttggagcaatagcaagggagggagggatggagagagaagagacgaaaaggcgaacagattaacagggagatgggacagacacaaacaagagaaagagaaacaaagagtgacagaggcagagagagcacctagctcgttttcaacttgacctcctggcagaatctagcaggatcatagaatcctcagcatacccttgtactgtactggggcagcgaagtttcaagccaaagtttcccaaactacaaggtaacaaatactaagactagagaagctgtgcacattcttttccagctcctttttgcagcatcagcagaatggggcaggttgctgcgttcattctaaaaatcaaaactgcaagaggactcagctgcggagatgggggtgggagggcagatgttctcttgctcactgagctcacaccccggagacggccagcgcctaatgctgcctccacaggttccatggaggacacgggagagtctacggccatgtgaagagcagattcacatttgtgtggctccctccggggggagctaagagctgtatcccaggagtcctgctcgctcccgttgatccagatgccctagcctttggcatctctgccagtcttcatgaaagagcctgttgcaccgcagtccagcagggccacaatattcaaaatgaaaattgtaatgatcactcttctgactgcaaaatctcaagtcatagaacttctctcactaaagaagccgggcggggcggggggagctggacagagaagccgccctggctgtggggtgctaaaaattgtgacaccgcctggcaccagcgatgagggactcacgctcgaccccagagggaagaataagaaggggccaccgcgggtctcccccaagcttccagctgtcgggaaatcttgtccaataacccaccttgccatgccacctgctcacctgcattctgtagtagtagtaatgtatcattcacgtcccagcaggccaagtgggcaggaaaatggggccaaaaagtagaaaaccatgaccgtagaaggcaacgtcacgtgactgagctttctgggttgtgcgtccttgtggtgataaacacagtcccgagctgaacaccagaatgaaaatgaaccttcctccgtgctgaagtcggaagagatgtgcttggctatcggcagtgcctgcctgtttgggcggtgattactgcaggtcactcgtgctgtacaggaggagggcagtgaactctggagccaggctggccgggtgtaagtcccagctccgtggccagctctgtgttctgggacaattcgcctatgtcctctgcctgttgatttcctcctctgtaaaatgggggtaatagtcgcatctatctgaaagggctatgtgagaattaaaggaccttgtcaatgtaaggggctgagaacagtatctgttcttggtgagcagaaggatgaccaggaggtgaccagcagaatacccctttcgaagcctcaatactattccgtagtgagcaaagacatagctcctctacggacgaagccattaatagtcgatcctggcaggcagagtgcagattctttctaatcagaaatttgaactctggccaacgactgctgtactgattgagtaaatgttaggatttgttgttaatggtaaagtagtctacaaaaacaaacagtctgaaggagtttgagagggtgtgggctcagctgcaacctctcctcccaaggccgttggtcaacatcatctccagccttgtggaaagacagaagcagtgaagaaaatgtcggacaaacatttggtgtgtttgtacacttctcccagaaatcctaaatgctttgcatgtttcagctaataattcattaaaatggattatgctgaccatttttaacctacttcactgctctcctgtctaaatccatccctttgtgacaaatgttttacacttggctcattttttcaattgtgtttgctgtcttacccccatgtaaatgataaacgtgcatgcttatattgatttgactgagacagctaatgctatatatgtctctgttccttgaatgttgaaaaaaaaaaaaaaaaaaaa

SEQ ID NO: 4781 - DNA, 493 bp, Macaca Fascicularis
  misc_feature (1)...(493): n = A,T,C or G
cccaggcagccnnnagcagggacacctgtggggcatttcagagacccaggtctggccctggcccccacatggagatctgagatcctccgggagcccccagcctggccccctgcagctgggatctggggtaggaaaggtgaggtgtggggatggggcgggaaagcagccaggcagaggcaggggtgttaattacagtacacctttattaatannnnnnnnnnnnnnnnnnnnctgttacttgtagcagtgactatttaaatcagggagaggatggtgtggagggtgcggggaggagaggagaatttttccaaaatctgacagaaagaaaagaaacaaaatggttcgtatgggatggagggtaggggtgggggggaagggtgagtaggaaccaggagggctgcctggggtgggggaataaattaagaaaaggaacgagttaacaacagcaccaggaaagttacttcagtcaaaagacgctttgaaaagaatattc

SEQ ID NO: 4782 - DNA, 1546 bp, Macaca Fascicularis
tttgagttttaaagtaacaattctgatcaccttttgggattacaaatatgatccctgtcttctagaataagggaacaaaactttcactctcatctgccaaccccaaccagtccccattgccagcagcttctacagatacatatcctttgaagaggatccggactccattctgacaaactgagtggcccagatggactgggtccttctctccagttgtggaatacctaaaccagtctgcctagtccaacactacaaaatgtgatttcccaagaactttagggttaccatttctggctacagcacaggcattttgcctcagcagctgtcctcaaatgttcagctcagaaatggaaatctgcctactgtagatagggagtacatggttccaatactctcctgctcaactctgtgcatcccagggagtactagaagcctgctcttgagcagtgctgaccgctggacagatatgatggcaattcagttctcagcagtggagccatcctgggcctgagttgagcttgagtttgatttactattttagattttgtcttgaaatggagaaccttttggaattaaacttcattcaaactagacatttgttccagcatccttggtactagctatttggaataaaatatggaaatactgaactttgtataattctgtaagccttagagaggcctacagattaagggatacttttaagagttacactactggtcatccttcctctccaagacctttatcctacctgctagggtagccgaagctgaaatgcaaatgttaattcgtcctatttccacagtggcccctggcatggataattggatgatgccagctgtcacaaacaagctataaatgaaagtatttcttacagcaagtataaggatatactttacaagagtattaagcatttcagagtcagtagtgctttcgcagtctttaatggtgaggtacaaatctgcttttcaactttcctcaagggatggaatataaggatgacctttacagctgatttacaaaggtaaatttgcagatgggacctgaccatgtttcagcacatatggagaaatgtgtatagaactatagcctgtttttctagtgtaaagagtgttaggacacagtcacacacacggaagttgaattcgtacttagggttcctcatatgcagaatgaattctgttagtctgtaggcttacttgccttacatccggtagcttattttgttttactactactactactactactaataataataataaaaaccctctttgagaaagaatgtgtcagagtgaagtctctcctgattccagcaagattgaacctacgccctgaatcattccccggagagagagagactgttggctgtgtcacagtgaaaacccattatgggaaaagagcagcattcagattgctgactctgaacctgctatttggacctctgggatgaataccttcaaatgtttgtgatattcctcatttttgtcagaatagaaacacattgtgggcttcctgtggcaaaaaaaaaaaaaaaaaaaaaaaa

SEQ ID NO: 4783 - DNA, 2128 bp, Macaca Fascicularis
  misc_feature (1)...(2128): n = A,T,C or G
tttgacacttgtctgcagcatactgctttttttcctgtgtcctgtgggacctagtcatttgtatgttagactcacagaggaattaaagagataaacatgcatgtgctaaatagatttctgtcttgctttgttatcctgtcttaaaataacattataaatttcccaagagttaaattaatactaataactggtaacttgtttttatgtaaacagcatacttgagcccagaaatcttctggactgctttatggatctctgcctgcccttctcattggtcctctgttcatcccttctcttctagagcttctccttctgagctgtagttgccagtccatctttcatgagaccattggaatgatctttctggtcttgtcacttcatggtttaaagtttccccggggcctacacagtgaagtccaaattcagcatggtgtattacaagacccttatgatccagtgttaaccaggggttaggtatcctagccatactgtttatctcttgaatacctctgtgctgtttgacgagtccagcccctacgtgttcatacctcacttatgtgacacccttccttcaggtctcccaatctctgtagcctccctgaactatgcatttgctctgctgcttgatttgtttctgtgactgtcccattcccctcggcacacatgatagcatggaccttgtcttggtcctttttttttttttttggctttaacagaacatagcaaagaacttgacatagatatattctgagtttaccactggagttaccacagaggtctgctaagtgaatacaacacagtggggacccagaacctctagaaagggttgagaattacagtccccagatagctacaatcaggaaataatgtaacctgtttgcctagggtgctacatacaactgagacttccatgggaccttagggtgataaccattaaacctactctttcagtgtttgtttactttgtaaaagcatcacactaaggaggttgtcgtttaatcctcatacctaccctgggttattaacactgttgatgaagaaaggtttacttggctaagatatggagcagtttagtaagtggtagaatagatactccagtcctgtctccaaaatgcgtatttttttgaattaaaaaaatttttagttttcaatatatttcttatttttgactttttattttctgtagagttggagtttcaccatgttgtccagtctggtctctatctcatgggtgcaggccatcccccaatctcgacctcccaaagtgttgggaatactggcatgagccacggtgcctggcctcagaatgcacacccttaaccactatacccttatgtttttagatgtgggatttttgtctaccacatcgtcccccctaagacctagggcttaggtgttgaggtgggaaagatctttaggcttttcttctcaaaattaatcagaaacgatgtgaattttatatctctttctgtggtttcccctataagcaaatctggattagtagacttaaaggtgaataaacaactgtatccctggttcactggttaggaagagtacatagtctttgtgtataggctattttccttggtaaccttgggcaacgtgctccacctctccaagccagtctcctttgtgaaaggtgatacaagataatacattaaatgagagcctaggcaggttacctaccctaccatgacactgtaagtattctttgccttgaggaaaggggaattctggtttgttcccggtcctgtgggtaccctcttttcccctgggcaattttactataaaaatagaccaaggatcggccnnnnnnnnnnnnnnnnnnnnnnnnnnnnnnnnnnnnnnnnnnnnnnnnnnnnnnnnncacgaggtcagnnnnnnnnnnnnnnnnnnnnnnnnnnnnnnnnnnnnnnnnnnnnnnnnnnnnnnnnnnnnnnnnnnnnnnnnnnnnnnnnnnnnnnnnnnnnnnnnnnnnnnnnnnnnnnnnnnnnnnnnnnnnnnnnnnnnnnnnnnnnnnnnnnnnnnnnnnnnnnnnnnnnnnnnnnnnnnnnnnnnnnnnnnnnnnnnnnnnnnnnnnnnnnnnncaaaaaaaaaaaaaaaaaaaaaaaaaaaaaaaaaaaaaaag

SEQ ID NO: 4784 - DNA, 1147 bp, Macaca Fascicularis
  misc_feature (1)...(1147): n = A,T,C or G
ggaagtgcacctcgcctccggtgnnggagaannnnnnnnnnnnnnngtatttcggaagatnntacgaaattgagaagatcccaacaacctttgagaagggacgctgcatccaggccaactactcactaaaggaaaatggaaagatcaaagtgttaaaccaggagttgagagctgatggaactgtgaatcaaattgaaggtgaagcnnnnnnnnnnnnnnnnnnnnnnnntgccaagctggaagttaagttcttctggtttatgccatcggcaccgtactgggtcctggccaccgactatgagaactatgccctcgtgtattcctgtgtcagcatcatcaatctttttcgtgtggattatgcttggatcttggcaagaaaccgtcatctcccttcagaaacagtggactttctaaaaaatatcctgacttctaataacattgatgtcaagaaaatgacggtcacagatcaggagaactgccccgagttctcgtaaccacgctccacagggaggctgtgcccactccacgttacatttcctgctttgctttcccccaccccacccactcctcataaacacaaaccaatcaaccatgacaaaccttcgcaaacaccagaagggagggttgaccacggaagacagtggtgaggagctcaagggagttggcctgaacacatagccataccctaccctgttaccctgctagctgcaagaggactgcaatctgcccagcaatccctgtgccacgaccaacgcgtgcagcaagtccatcggaccctgtgtctccaatccctgcacaccttgcgttcctcctgccccctgcacaccctgtgccccacgcccccgctgtgggccctgcaattccttcgtgcgctagaacctaggaaatgccggaggagcaaggatgcagggcccaggactgcagagctgtgacctggctctggtttaacaaaaggggcctgaaaacatcatttgcatggctgcagtggcccccgtaaggcagccaagaaacttacccaaagcctgcagcctccccaactactctagactgtcctgctcaccctttccttcctgggggtctgttccttcctatgctcacccagagaactctctgatgtccccgtggccctcccttnnncctcctaata

SEQ ID NO: 4785 - DNA, 673 bp, Macaca Fascicularis
aatgagtggaagtggaccattatcactttaaagccctttatttataatacatttcctatgggttttgtttttttagcagactatgaatgttataggcctaatgggcaaacttcagactgaacatgtacactggtttgagcttaatgaaatgacttctggataattatttttatacagctatggatttccccatctttctgtatatatacatgtgtttaggtatatatttacacacctttatcaagcatacccaggagtaaatagttaagaaccatcttcaaatcttttgttataaaatattcgaatttatattctgaaacaaaagatcgtgtgagtgttgcactttagctcatatacactgattttaaaaatatggaaaccatacctcactaataactttaaaatcaaagctgtgcaaagactagggggcctatacttcatatgtatcatgtactatgtaaatattgactatcacacaaatatttgcttggatgcaattctttgttaatctttacaaatgtaagtgttcctttgcatggaaatgaagaaacaaaattcataaatttagctgaaagatactgattcagtttgtatacagtgaatataaaattttcatgaaatgttaagtgacagctaaaatatttttatagtttgttcatattatatgaggttc

SEQ ID NO: 4786 - DNA, 1677 bp, Macaca Fascicularis
cagaagcaatgggaatattaccagagaactcaccaatatcacattcggtttcagaacaagggatgcaaatgtaataatattgcatgcagaaaaagagcctgaatttcttaatattagcattcaagattccagattattctttcaattgcaaagtggcaacagcttttatatgccaagtctgacaagtttgcagtcggtgaatgatggcatgtggcatgaagtgactctttccatgacagacccaatgtcccagacctccaggtggcaaatggaagtggacaaccaaacaccgtttgtgaccagcacaattgctactggaagcctcaactttttgaaggataatacagatatttatgtgggtgatggagctattgacaatataaagggcctgcaagggtgtctaagtacaatagaaatcggaggcatttatctctcttactttgaaaatgttcatagtttcactaataaacctcaggaagagcaatttctcaaaatctctaccaattcagtggtcactgggtgtttgcaattaagtgtctgcaactccaacccctgcttgcatggaggaaactgtgaagacatctatagctcttatcattgctcctgtcccttgggatggtcagggaaacactgtgaactcaacactgatgaatgcttctcaaatccctgtatccatggcaactgctctgacagagttgcagcctaccactgcacatgtgagcctggatacactggtgggaactgtgaagtggatatagacaactgccagagtcaccagtgtgcaaatggagccacctgcattagtgatactaatggctattcttgcctctgttttggaaatttacaggaaaattttgcagacagagcagattaccctcaacagtctgtgggaatgaggagacaaatctcacttgctacaatggaggcaactgcacagagttccaggctgaattaaaatgtatgtgccggccaggttttactggagaacggtgtgaaaaggacattgatgagtgtgcctctgatccgtgtgtcaatggaggactgtgccaggacttactcaacaaattccagtgcctctgtgatgttgcctttgctggcgagcgctgcgaggtggacttggcagatgacttgatctcggacattttcaccgctattggctcagtgaccctcgccttgttactgatcctcttgctggccattgttgcttctgttgtcacctccaacaaaagggcaactcagggaacctacagccccagccgtcaggagaaggagggctcccgagtggaaatgtggaacttgatgccgccccctgcgatggagagactgatttaagagcattctgtcccttcaagatagggatccacacactgtgaatgtgatgactgtacttcaggggtatctgacatacctgacgatgttaatctgcaaccgggattacactggaactacaggaatgattcctttaaccaccttaaagactttcacagtggttccactcgacaccattgttttattatgttatatcacccaatcacgaaaaaagtctgtgccagtaatttcagccttataattagcaaaaacatcttccagagaatgaagtcttctgagcaaagctccagtgtctatcactgaaactctttcctcctttcaaccaaaaaaaaaaaaaaaaaggccaca

SEQ ID NO: 4787 - DNA, 830 bp, Macaca Fascicularis
  misc_feature (1)...(830): n = A,T,C or G
gaagagggcagggagnnngggnntgnntnnnnnnnnnnnnnnnnntgtagcaangcattcctagttaaccagagccttggaatctnnnnnntgctggccaagctttaaaatgaaaagtgtttcaatgctgccataaaaggggggtggtggggaggaagggnnnnnnnnnnnnnnnnnnnnnnnnnncatctaatttaattgtcaaaagattgannnnnnnnnnnnnnnnnnnnncactaagggttaaaggcgggcgaccccccactgactgtcccctgccaccgaagtaggtgacctgccctacaagcaggtgggaccacctgtgctgcgctccagggggcttctgcaggaagcactcacccccaccttccctggcctgagcttttccctgcctttcttcaccacctgagggcatgggcagtccccgagccctggccatggggcgtgcctggtgagtttgcctgcggttcaggcttagcctgtggtcacctgtgtgctgctgcctgcgtgaggtgcgcaggggaggcgcagggatccgcaggagggtggttgggatacaccggatacctctgctctcattgctcgtttccaaatgttctatggacatttctgtgctaaatcatattaaataaaacaggcgggttaaaacccagatgctgtatattaatttgtaattatgtataaagtgaagcagttttaaactgtaaagatttttttcagtgtgttttctggaattttgccacaacatactggctttgtattttatttagctttctttctagttaccagcttcagacccttgtaaagtgcccctcagcccttcaaaaaaa

SEQ ID NO: 4788 - DNA, 737 bp, Macaca Fascicularis
  misc_feature (1)...(737): n = A,T,C or G
gtcagcatgagccaagcnnncccatgnnntnattcaaaaaggggctcccccagcgcaaacccaggacctctcagactgaagccgtgaactcnnnngagaaattccnnnnnnnnnctctcctctctccacacaattcaacttgataactggactttaggaaacttagatttaataacaaaaagaagtttatgcgtattgctttttgtgccattctaaatattgttggtttcttgtctccttatttcctctttaccatttttggaggggaagctattttttttccttgatctttcccagtgatatggattaaatctnnnnnnnnnnnnnnnnnnnnnnnnnnnnnnnnnnnnnnnnnnnnnnnnnnnnnnnnnnnnnnnnnnnnnnnnnnnnnnnnnnnnnnnnaggaggtgaatcagagctagtctnnnnnnnnnnnnnnnnnnnnnnnnnnnnnnnnnnnnnnnnnngttcccttcaannnnnnnnnnnnnnnnnnnnnnnnnnnnnnnnnnnnnnnnnnnnnnnnnnccagagaagggaaagtttaattagtgaaaaggaaagaacactaggaaacatttgagaacctgcctctatcccagaacgtgcctgagatttgacactcaaatcagtgtttagtcttnnnnnnnnnnnnnnnnnnnnnnnnnnnnnnnnnnnnnnntgcctaatgccttgtttcctattaccttagattgcaaaccagtctagggaagtct

SEQ ID NO: 4789 - DNA, 191 bp, Macaca Fascicularis
ttttggtagtgtgttttgaacataagcactggtgtctgaaagatgcagataatatctatgtatttattacacagggggctctgtttgctacagaaaagagtgaaactttcaaatgtttagcacacttgccagtgaaatattctcgccagagcagaggttataactttggctctaattacttttaataatgg

SEQ ID NO: 4790 - DNA, 744 bp, Macaca Fascicularis
  misc_feature (1)...(744): n = A,T,C or G
agtctagctcctttttgaatccttctcctactccagggncttcatgggcnnnnnnnnnnnnnnnnnnnnnnnnnnnnnnnnnnnnnnnnnnnnnnnnnnnngtctttggtgtttgcatactgaatttgaattgagtttaaaagcaaactgttggatatgaggaagaaagggatatggccttagccctttttccaatatttggaatacgaaagcatattgtgctttgtgtaaaaaatannnnnnnnnnnnnnnnnnnnnnnnnnnnnnnnnnnnnnnaaagtattccttaagtagcttnnnnnnnnnnnnnnnntgannnnnnnnnnnnnnnnnnnnnnnnnnnnnncatgtaagtcagaagtttcacatatcccttgtatcaaacattttatagggaannnnnnnnnnnnnnnnntgctttnnnnnnnnnnnnnnnnnnnnncagagttatttaatatnnnnnnnnnnnnnnnnnnnnnnnnnncttttatttcttctaattgccttataaaatgcattgttacggcccggcgtgttggcttatgcctgtgnnnnnnnnnnnnnnngaggccgaggtgggtggatcacaaggtcagnnnnnnnagaacagcctggccgagatggtgaaatgctgtatctactaaagatacaaaaactagccaggtgtggtggcgggtgcctgtggtcccagctactcaggaggctcagggaggtggaggttgcagtgagccgagattgcgccac

SEQ ID NO: 4791 - DNA, 671 bp, Macaca Fascicularis
  misc_feature (1)...(671): n = A,T,C or G
gccagccatcgacttgtgtgttcagttcttgcaatactacttgctgcgtgccttccctttgccaggcacttnnnnnnnnnnnnnnnncttccacatgcttcatctaccagccagtggctaactgccaggtcccttgttccgcaaaggactgttgcaaaccagcttcctgtgacactgtgatttctggccaaccaacctgtgatggacccacttcctataaccagagtggctgcaaatcagcttgctgtgtgactggtttaggcacatcacccagtggtgcctccaattgcttgccaacttcatgccaatccagctgtgagtccagcttctgcaaggcaacactttgttaatggagcactcttcacacctcctctgagggtctgccgctgtctataaatgcatagccatccctgggtgcctgcctcccaccgagtacaaatgctgcctgctttctaactttaccgtgagtctacctccacattctttccaggtgctgaccaggtaactnnnnnnnnnnnnaagagatctttcttaaccaagaatacctttcagcaaccatggactatcacactgctgcttgcatttcctgatgatgtcaattcatttcactttagcaaatcctctcttgtttatctttcttgatgctgcctggtctttcagaagaccctttg

SEQ ID NO: 4792 - DNA, 538 bp, Macaca Fascicularis
  misc_feature (1)...(538): n = A,T,C or G
cacccaccagccccacctactcgcccacctcnnnnnnnnnnncgacttactctcccacttcccctggttactcgcccaccagccccaccnnnnnnnnnnnnnnnnnnnnnnnnnnnnnnnnnnnnnnngatgaggagaactgagggctcgtggggcgcggcagcgggctagggtccagggcagcnnnnnnnnnnnnnnntgcagttcttgcttccctcgtggggtgtcacccccagcccagctcccttgtacataaacgccttgtggcagagctcttggtgaacttctggatcccgtttctgatgcagattcttgtctcgttctccactnnnnnnntcagaacccactggcccagtggtgttctcattcctaccccacccaccccttgcctgtccccaaattgaagatccttccttgcctgtgacttgatgtgggggcgggtaaagggcattttaacttaggggtagttcctgctctgagtggttacagctgatcctcgagaagaacaaagcnnnnnnnnncttttgtctgttatttt

SEQ ID NO: 4793 - DNA, 747 bp, Macaca Fascicularis
  misc_feature (1)...(747): n = A,T,C or G
gccaacttgtctgtgttncnnnnntgggaagatttttaataacaggtttgnntnntttaacagtcattagactcttctgtttttttgttttttcctatctgtcagttttggtaaactgtgagttttaaggaatttggccatttcattcaaactgtcaaactcatcagcatgaaatagtataataactgtttaaaagttataaaacagtatgaaacttggccnnnnnnnnnnnnnnnnnnnnnnnnnnnnnnnnnnnnnnnnnnnnnnnnnnnnnnnnnnnnnnnnnnnnnnnnnnnnnnnnnnnnnnnnnnnnnnnnnnnnnnnnnnnnnnnnnnnnnnnnnnnnnnnnnnnnnnnnnnnnnnnnnnnnnnnnnnnnnnnnnnnnnnnnnnnnnnnnnnnnnnnnnnnnnnnnnnnnnnnnnnnnnnnnnnnnnnnnnnnnnnnnnnnnnnnnnnnnnnnnnnnnnnnnnnnnnnnnnnnnnnnnnnnnnnnnnnnnnnnnnnnnnnnaaaaagcatgaaacttgaaatgctttcttttatttatttattgatttctgatttttgttcttcttcttcttgttattatcctagagcacagcctttggaggtatgatttcttttannnnnnnnnnnnnnnnnnnnnntgaagtcagggattttggtgtgtatggtttgctgattgaacctcatcctctatgtgtaaaatactgtctgatacgtaatagacattcattaaatattcatga

SEQ ID NO: 4794 - DNA, 768 bp, Macaca Fascicularis
  misc_feature (1)...(768): n = A,T,C or G
gcaacttggcaacagtggccagttttcataatgaaacagcnnntagtaatttaatcttcatgcctcataacaaaccaaaaccccatgagatttccacattgcataatttgccttactaacagaatcatatccttaaggatgaccatcattcccccaactaaaacaaatacaaactaatgtatgatattttttnnnnnnnnnnnnnnnnnnnnnnnnnnnnnnnnnnnnnnnttgtgtgtaggtgaataaagacagctaagtgaatgtgtgtaaagtgtagcaaaagcagacagatatttatgtacagtattcatagaatggaaagttaaatatttttgcagtgtgtatttaaaagagaaactcaccataannnnnnnnnnnnnnaatctttgtaaagttaatttaatgtcctttagaagtgggagtctggtggaactgtgttggatttaagataccttttcactctcccgtacgtcgtgagccttgtgggtcacctcactgtggtgcatgtgcaagggcgtgcgcacgcctgtgctttgccgtcctatgttgtaaacagctgttccaaaggcacaaatgagtttagggtagactctgtaaacgcctccttactcactatagtcaannnnnnnnnnnnnnncccaatatagaggtcccannnnnnnnnnnnnnnaatagccagctccatccttagcagctcattcggggaatagtcagagccatagtgctttatgaagtcttttacttgtggaataaactgtaaaaaga

SEQ ID NO: 4795 - DNA, 748 bp, Macaca Fascicularis
  misc_feature (1)...(748): n = A,T,C or G
atccacttccctctggccacatacgnnnntgtcatnnctgctgagaaagcctaccatgaacagcnnnctgtagcagagatcaccaatgcttgctttgagccagccaaccagatggtgaaatgtgaccctcgccatggtaaatacatggcttgctgcctgttgtaccgtggtgatgtggtnnnnnnagatgtcaatgctgccattgccaccatcaagaccaagcgtaccatccagtttgtggattggtgccccactggcttcaaggttggcatcaactaccagcctcccactgtggtgcctggtggagacctggccaaggttcagagagctgtgtgcatgctgagcaacaccacagccattgctgaggcctgggctcgcctggaccacaagtttgacctgatgtatgccaagcgtgcctttgttcactggtatgtgggtgaggggatggaggaaggcgagttttcagaggcnnnnnnnnnnnnnnntgcccttgagaaggattatgaggaggttggtgtggattctgttgaaggagagggtgaggaagaaggagaggaatactaaagttaaaatgtcacaaaggtgctgcttttacagggaagcttattctgttttaaacgttgaaaagttgtggtctgctcagttaatttgtatgtagcagtgtatgctcttatatacaattactgacctatgctctaaaacatgaatgctttgttacagacccaagctgtccatttctgtgatgggt

SEQ ID NO: 4796 - DNA, 2803 bp, Macaca Fascicularis
tagaaagaaattgatattttaagccaatatttcctttttcgatatatgtgccactagatgagaaaaaaaatgtatgattctgcatacatatgtatactttatgagacgtgtatattttacaggtaagtaatgtggccacatgcaatctatccaaattccacagcatcatttagggccactgcaaatgttcaaaaccattatattttattttgagatgagaagaagcagattgtaagacatgtgccttgtaggtaaggaatcaattctcgtttttatctgcttttcaaagttatccttaatgtttcataaataccatgtactacccttgaatttagacgtgcttgcctgtgcgtgcacatgcaaaaaacttcggaagtactggcagcatgagatgaaaagcactgaagatgttagatgcttgcaaatgtcattagtagtatggcgtatttactttttgaaaggctataaactccatgcagcatccatcccgaacaagaaaggcgggcaactccacaggaaagctgctgcggctactgtgtccagtgatgaccaccaatctgaagaggaacatcatcttgcacacgtttggcttcttgggcccagatgggagggatacaattccaaatgaagcagttttgtaactgtttcatccgagatgtggttgagacaactggaggcctttgcccaggcagcaggttctcctcctggctgtgttcacacacatgatggactagcattagagaaaagacattgggccggttcttatttcttctgaaagcagcaccaatgctagtgagtggaagttagaagtaggcagacttgtggccaaagggaaaggaaatctttccaatgattggaacagtttcaaaatggaatgggccgcagggaattggcttgcagaccgtcgtgaggaaactggtaaaaaaaaaaaaaaaggccccccagacagggcagaatgtgtcctgtgaccttcagagcagtttggtttttttctagctcaaagattctagcgtaacaaatagtagataccttagttgtgaaagttccttccgggtttctccaggtgagccaagctgacaggcacaatgccagtctctcagtaaattctccccagcctgtgtactccagaatgcatatgcatattaaacacacattcctagattgaggcttatgtgggtaaatttagagaagaatgttttatattttttttctaaactttgtctagggagtgtgaggacttgtctaattcccgttgattgaaagtaacctaccctggagaagccctcttcttaatcctgatgtgtctgactttgtctttgtgtgcttcattttcagtatgccatgtttctgtccctggtgttcctggctgagctcgtagctggcatttcagggtttgtgtttcgtcatgagatcaaggacaccttcctgaggacttacacggacgctatgcagaattacaatggcaatgatgagaggagccgggcagtggaccatgtgcagcgcagtctgagctgctgtggcgtgcagaactacaccaactggagcaccagcccctacttcctggatcatggcatcccccccagttgctgcatgaacgaaactgattgtaatccccaggatctacacaatctgactgtggccgccactaaagttaaccagaagggttgttatgatctggtaactagtttcatggagactaacatgggaatcatcgctggagtggcgtttggaatcgcattctcccagttaattggcatgctgctggcctgctgtctgtcccggttcatcacggccaatcagtatgagatggtgtaaagagaagtctttcaagaacgacggtaagagacctgttttaaaaaggaactgcagcaatctttgaaagacttccaaagaatgttagagcacagtacataatacacctgccctgctccccctatcccttaccccccacgtgcaactgacactccacccagtctctgctccacctttcagcccatgtcacttgtagtgtccattttgtgaagccttgttgtgccacagagtgtagccaggtccccttgcagctagtcctagtgaacctcaccccgaggccctgcatgggccagcccctccatctgtacttggtccaactgcaactcatcatcggtgactggttatcacaccatcgctggcccctttgggccctgcatgtagtgtgggaggctcctgttagctcctcactgtggtaaatgccacacacctttaagtagataagcagacgataattatctgttcttttgacttaatctcatttggtttgattttccctctactaaggctttcctaccttcttcaggctgcctaagacatgtaaagaaacacatcgataattgtccatgaggagaaaaaaagcatgtgtcatgcatgaaggaaactgagctttaggtggcctccttgcttgttacatacctgggtatgtgtaggcagtttagtgcatctttgcctctcagttgaaacctgtataatcctgttacaaaggctgtgttgttgcttctcgtgaaggccatgatattttgtttttccccaattaattgctattgtgttactttactacttctctctgtattttttttcttgcattgacattatagacattgaggacctcatcagaacaatttaaaaatgagtgtgaagggggaacaagtcaaaatatttttaaaagatcttcaaaaataatgcctctgtctagcatgccaacaagaatgcattgatattgtgaacatttgtgatatatgtattaataaatagagcaattacaagcagc

SEQ ID NO: 4797 - DNA, 702 bp, Macaca Fascicularis
  misc_feature (1)...(702): n = A,T,C or G
cagaaccagtgctcaggtgcgccccagactcagagtttcatgctatnnnnnnnnnnnnttgaaattcttgatagttatctttgaacttgtgttttagaagtgacgtctgagggggaaatggagcttggaacttcagctcccaagtggctttcccaccttcctgcctcctcaggacagattctcagctgcctgtctgcctgcttcctctgtacccagccnnnnnnnnnnnnnnnnnnnnnnnacgactcccactcggtgaccactattattcnnnnnnnnnnnccaaaaagggcagggagtggctggagtcctgaccctggcctggactctgcaatgcagagatacctacaagtctcatttccccgcctgtaggatggaggtgatgctgaccgcctcttggagctgttgagatgggaaaggagagagattacgtgggaagacagggccaggaatgttgagttgagcgtggcctcaggcccctgtcctgctccttcttgctgcttggggtacagctccattccagcctcactgtggcccccaggcctcctctggccttcctcagccttcctcaggagggcagaatcctcccctggtcaccctccctgcatgtccatttctacctccccaggaggtcaggggagcagaagcccaggtcttcagagtcatttcacaagatttcaccagaataaaagtcctactcat

SEQ ID NO: 4798 - DNA, 550 bp, Macaca Fascicularis
gtcgacagaatggaaatctgcaggggcctcggcagtcacctaatctgtctcctcctcttcctgttccattcagagaccgtcggccggccctctgggagaaaacccagcaagatgcaagccttcagaatctgggatgttaaccagaagaccttctacctgaggaacaaccaactagtggctggatacttgcaaggaccaaatgtcaatttagaagaaaagatagatgtggtacccattgagcctcatgctctgttcttgggaatccatggagggaagatgtgcctgtcctgtgtcaagtctggtgatgagaccagactccagctggaggcagttaacatcactgacctgagcaagaacagaaaacaggacaagcgcttcgccttcgtccgctcagacagcggccccaccaccagtttcgagtctgccgcctgccccggctggttcctctgcacagcaatggaagcagaccagcccgtcagtctcaccaatatgcctgacaagggtgtcatggtcaccaaattctacttccaggaggatgagtagtagatct

SEQ ID NO: 4799 - DNA, 544 bp, Macaca Fascicularis
  misc_feature (1)...(544): n = A,T,C or G
gaaggctgagtttcatttgatannnnnnnnnnnnnnnnnnnnnnnnnnnatacttttcattccaagcaagagaactaaagaagtagcaagtatggatgcttcagagttttaaaaaaatgtgtttcagtttcagccactaccatgataagcacagttgagactgcagcactaaattccaaatatgtctttttaatttgacgtgaaagatactaaaaaagtatatttgtatatttaaatcctggctcatcttgtgacatagatttactgaataagaacaaagacccaattttaaacaaaaacctaggccnnnnnnnnnnnnnnnnnnnnnnnnnnnnnnnnnnnnnnnnnnnnnnnnnnnnnnnnnnnnnnnnnnnnnnnnnnnnnnnnnnnnnnnnnnnnnnnnnnnnnnnnnnnnnnnnnnnnnnnnnnnnnnnnnnnnnnnnnnnnnnnnnnnnnnnnnnnnnnannnnnnnnnnnnnnnnnnntgagacaggggaatcacttgaacccgggggacagagttcgcnnnnnnnnnnnntgcacc

SEQ ID NO: 4800 - DNA, 775 bp, Macaca Fascicularis
  misc_feature (1)...(775): n = A,T,C or G
gnnnnnnnnnnnnnnnnnnnnnnnnnnnnnnnnnnnnnnnnnnnnnnnnnnnnnnnnnnnnnnnnnnnnnnnnnnnnnnnnnnnnnnnnnnnnnnnnnnnnnnnnnnnnnnnnnnnnnnnnnnnnnnnnnnnnnnnnnnnnnnnnnnnnnnnnnnnnnnnnnnnnnnnnnnnnnnnnnnnnnnnnnnnnnnnnnnnnnnnnnnnnnnnnnnnnnnnnnnnnnnnnnnnnnnnnnnnnnnnnnnnnnnnnnnnnnnnnnnnnnnnnnnnnncacgcctggccaccctgccactgtttaatgtttttttagtagagatggggtctcgctatgttgcccaggctggtctccaactcatgggctcaactgatcctcctatcttggcctcccaaagtgctgggattacaggtgtgagccactgtgcctggcctgattacatttttaaaatgagatttcccctctcctacagtgagattccacataaaaatccagatttctgctttccctagaaaaatgaacctggcaacatccccatggcacaggatgcctgctctccagtcgccacaggccacgccactcccaaatgcctgcccttcattctggtctcctttctgaccctttttaggcccctgcttttgccctagattagcagtcagctagctggctataaagggtcagatggcagctatttttgagttttatgggccaggtggtctgtgtggcagctgctcttgcctgcagccacagaaaaggcagtgcacaaaggaatgggtgtggc

SEQ ID NO: 4801 - DNA, 1648 bp, Macaca Fascicularis
  misc_feature (1)...(1648): n = A,T,C or G
agtcctctctggatgcgggacagctgtcgactagcagtgacacaaccagccatcaagtggagaatccttgcgactgcagtctgtgtgcaggtggagcccgggagaatgacagtctaatttcggacatccaatggctttttctgattttcctaaataatcgtgctcgctaagtatacagttgtctggattagcctgcctgccatgcagtcctcatcaactctggctggaaatcagggtgccaggcaagccgcctttagctctggcttctttctgcgtgatgctatgcagctaggatgggtcacgctgacaacaaagaaggaagcagaaagcatcactttctcttctcttgtgatgttagcggaacataactcttcttcgcagtgatgccctcctcnnnnnnnnnnnnnnnnnnnnnnnnnnnnnnnnnnnnnnnnnnnnnnnnnnnnntttaattcatctaatcgaagagcctagcaaacatcatcatggacgtggtttttaatgatttggaaaaagcaaaaaaaagacagcctgtggagacagcgattcgaaacagcggcacatttaggttattgccaatttgaaatacttggtttgtgaagctgagccctaagggacaagctcggtaactgaggaagagatcgtagataaagaaataaaaatgacaagcgtaatggaggctctgcgaagggactgtcagagcatcagttcatggatggcaatttcgccaggctgagattgaataattcatagattgaaattaccctgctttcacctttccatttaaaccggcatgatctgaatctctaataaattttcaagataaagtaaaatgccaatttgaatctgaagagcttttaaaaccagctgctgcatccctgcatctttcggtatctttcacaattatcctatgagaacagcacttcatcacgaagcaccattaccagggaaaattactgtgattacaatagcaacaatagaataccatcaaatgatctctaatttacctaatttgctaagactgactgtgtggttttgatatccattgtatgtcaccatgcccggcacccgtgaagctatctcgcgctggaacaaaagtggcatcgtgtgtgtgtgtgtgtgcgtgtgtgtgtgtgtgtgcacgcacatcctgctaccttaactgtgaaagcctggcaaagaatattctcctaggttaccatatttctttcctttggttcacatttttgcttttttccaatgcctctaccccaaacgtgtttggggaaatggagagcctgtcatggatgactgttttttgatacagaagagcattgatttgttaatttatatacccactttactttaatgtctacaagcatgtgtttactaaaagggaggtaggatgctgttctgggagagtagttttaaaatgcagccgagatgtagcatatgtgtttgtttcttccttgaaacgcctgtctgtctctttcaggttagaaatcctttccgggaactttagtcctggtgtgatgtgtcagaagcctctcagattgcaaagaagctcgggagagacaatcagtaataactctatacagcttttattaaaagcatgcatgttcagttcagtgattaaatgaagcttcggtacaaaaaaaaaaaaaaaaaa

SEQ ID NO: 4802 - DNA, 751 bp, Macaca Fascicularis
  misc_feature (1)...(751): n = A,T,C or G
gtagtttgtatcattttttaaatcntacaatttcggagctttacaaccattattgcctagtgttccaacagtaatagaccattccacttaagtaacaaaccaagactctcaagacacagaaatagaacttgtagtgatccagaataaagtaggtttttctttttttttgtcattaatttataaaagatacagtcatatacttaggtttttttaaaataataggtcttgatactatgaattcatagtattgtgtttggcagttcaacttagtaatatccaaagcatgtaattcatcttttgaagtgtttagaaacggcctttaaaaaaaaaaactaacaaaaaaaaacaaaaaacactttatctggatggctaaacttcctttttgggctcttgtgctattgggcttattttgaattaatttttttttaatgaacttcatattttcctgtcctgaggacagtccttaatttcaaaatataagcaaaagaaacatttcttggaaaaatattgaatccggactttgtgcatggtggttgcatccccgtgatcctgactacttgggaggctgaggtgagagaatcgcttaagcccaggagtttgagaccagcctggagaacagcaagacttcatctcctttaaaaaacaaaagaaaaatattgaaaccatttcaaggaaaatattttaatttgtgctcttttgcatttttagttatgtttttaattatatggatatattgctgggaataaaaaaa

SEQ ID NO: 4803 - DNA, 707 bp, Macaca Fascicularis
  misc_feature (1)...(707): n = A,T,C or G
tcctatccttnnnnnnnnnnnnnnnnnnnnnngagccctgctcatgctgcttggagcacaatggctgtccttcgggttggcccttcccaccagacctgcccacggcctgcagccttctctgcttgggtcttttgttgtggcatcatgacccaaccagagacagactgctcaatgatagatttgtnnnnnnnnnnnnnnttttgggtcacccactgagttcctagctagagtctgaggaatgcctccagctctcagctccctggaggaatagagatgtctgtnnnnnnnnnnnnnnnnnncaccccaagccctcttcagtggaagttacccttgtctgtgggcctgtattcctnnnnnnnnnnnnnnnnnnnggtggccattcactcacctagaatctgtcaataccctgttcccaccaaagagagagaggttaatggcaagaacagaactgaggctttgggacctttggtatctttnnnnnnnnnnnnnnnaagagaacactttttaccttagcatcacccttccacattgtccagatgcctgacagtcttccattcctccccattcctttctctgcactgcttaggaaggtcaggttggtccagcaggaaggacagaagaaaacttccagtacccgtggaatcccagggtgctaatgaaagccttcttttgggtacttgttatttagttaggnnncagtcctaaaa

SEQ ID NO: 4804 - DNA, 745 bp, Macaca Fascicularis
gtttgtagggcagatgatggaaatcaagagaaagactagggaacagcagatgaggcactatatgcgcttccaaactcctgaacctgacaaccattatgacttttgcctcataccttgaatcctaaaagtttttgctgaggttaatgtgaacactgctttacaagcttgtatttttgtgatttactttttctgtaagccttttggtgtttccacttaaccagtttctaatggaaattagaattctaattgtatattattttgtctcagccaaaaagttactgtcagcatggcaattcacccattttaggaaaaatactcttttcataatatgaaatgcataaagcagttcaaaaagcagtctgtattccatcatcttcctctttcattccaatccttattttttgtaaatactacttttcctcctccggctacctggactcaaaatctcagttgtctttgacagttttttcttgtccctgaccaaaaaagaatgatcatacccataattcaatgtttgatattttaagaatgtatgttccagtgtttttcagagtgagtctaccatctgtataaaaacaccttgggggcaggggcatttaagaatgtgggacctatcgtccagacttacagagtggggctccagaatctccatttttagcaaactctaagtaattctgatgtgtaccaaaatcagtgccactggtgtgtgtgtatgtaactatgtatgtgtgtgtgtatatataat

SEQ ID NO: 4805 - DNA, 160 bp, Macaca Fascicularis
ataattaattttatatacaaatgttacggatattattacatgcttacttgggggcactgctgctgctgattataagcctgagagaaattatcagataaaggtaggtgtgtgaaaccagagaatcacaatttgggttagaaataaggatgttaattaaact

SEQ ID NO: 4806 - DNA, 775 bp, Macaca Fascicularis
  misc_feature (1)...(775): n = A,T,C or G
tgggatcagcagagagaaggtnngcnnnnnnnnnntggcgaggagccaaaagccccaggatcccagaataaaaactccaccccgcccccagggccagagaccagctccagagagcagaggggcattccagccatttggtgatactgggggcttccacttctcatttggtgttggtgcttttccctttggctttttcaccaccgtcttcaatgcccatgagcctttccgccggggtacaggtgtggatctgggacagggtcacccggcctccagctggcaggattccctcttcctgtttctcgccatcttcttctttttttggctgctcagtatttgagctatgtctccttcctgcccacctccagccagaggagaatcagtattgggggtccctgctgacccttccttactcatggatccccttgacctctctatttctgttggctaaggcnnnnnnnnnnnnnnnnccaggaaagcttggggaggaggagtgaagtctgtgcatagatgggagagccttctgctcagaagctcactcagtaacattataattctctgccctggggaaggaggatggattgagagaatgtctttcttctcttctaagtctttgctttccctgatttcttgatttgatcttgaaaggggggcaaagctccctctgactcttcccccactcccatcttattgatttaatttaatttttcactccccagagtctaatatgggttctgactcttaagtgcttcctcccccttactacctcctttaatac

SEQ ID NO: 4807 - DNA, 1783 bp, Macaca Fascicularis
atcagacgatatccccagacaggggcggttagagagagaggaatcacatctccacacagttttagggtgctttttatttttacaaatctttctatgtgtttttcgccttgatccatcctcttcccgccgagatcgtacggcgcctttctctcgattatgaatttgatcaatccatatttggaagaaaacccatacagttttttcaggagctgaaaattgagtcgttatagaaatattaggacatattttcaatcatttcggtgcccaaagggaggcaagagctcagttttatattgagacattacgccggctgaaggcagagaatgcgtttccctgccaggacctgatgcaatccattcaagccaacaagtttggagagaatgttgagttcaatcaattcagaacgtcgagatggagcccaactcactccagtgggtcggctcaccgtgtggcttgcacggaccttacattttctacaaggcttttcaattccaccttgaaggcaaaccaagaattttgtcccttggcgactttttctttgtaagatgtacgccaaaggatccgatttgcatagcggagctccagctgttgtgggaagagaggaccagccggcaacttttatccagctctaaactttatttcctcccagaagacactccccagggcagaaatagcgaccatggcgaggatgaagtcattgctgtttccgaaaaggtgattgtgaagcttgaagacctggtcaagtgggtacattctgatttctccaagtggagatgtggcctccacgctggacccgtgaaaactgaggccttgggaaggaatggacagaaggaagctctgctgaagtacaggcagtcaaccctaaacagtggactcaacttcaaagatgttctcaaggagaaggcagacctgggggaggacgaggaagaaacgaacgtgatagttctcagctacccccagtactgccggtaccgctcgatgctgaaacgcatccaggataagccatcttccattctaacggaccagtttgcattggccctggggggcattgcagtggtcagcaggaaccctcagatcctgtactgtcgggacacctttgaccacccgactctcatagaaaacgagagtatatgcgatgagtttgcgccaaatcttaaaggcagaccacgcaaaaagaaaccatgcccacaaagaagagattcattcagtggtgttaaggattccaacaataattccgatggcaaagccgttgccaaggtgaaatgtgaggccaggtcagccttgaccaagccgaagaataaccataataactgtaaaaaagtctccaatgaagaaaaaccaaaggttgccattggcgaagagtgcagggcagatgaacaagccttcttggtggcactttataaatacatgaaagaaaggaaaacgccgatagaacgaataccctatttaggttttaaacagattaacctttggactatgtttcaagctgctcaaaaactgggaggatatgaaacaataacagcccgccgtcaatggaaacatatttatgatgaattaggcggtaatcctggaagcaccagtgctgccacttgtacccgcagacattatgaaagattaatcctaccatatgaaaggtttattaaaggagaagaagataagcccctgcctccaatcaaacctcggaaacaggagaacagttcacaggaaaatgagaataaagcaaaagtatctggaaccaaacgcatcaaacatgaaatacctaaaagcaaaaaaaaaaaaaaaa

SEQ ID NO: 4808 - DNA, 2019 bp, Macaca Fascicularis
  misc_feature (1)...(2019): n = A,T,C or G
atcctccagtaagaccaaacccagcttctctacagcaccaggaagaaggcaagttgggccattagggcgtggcccaggaaggaaaatcctccaccgtcctgttgacagatgtggtatcaaatgaattgttctctgcttagacacgactttgatatttattggttcaaattgctcggctgactcagtcttgcgtctgcacagcgtctgctgaagtctccactagaaactcaacggaaggtccccaccagaaactgaaagtctcctcaagtggctttgagttgcggtttcaccctccctgcagatccacaggggaggctggggcagatgaaaaataccagacttccaagagttgcacacaaaacattttccatccagctgtttggtattggatactgctgcctctgcttgacgtgagagtgtgtgaagaaagctgcgtttagacaactgaaaaccatgagcttgaaagtagtgggggcaccctcttggagactccagttgctcaccagcttggacaaaccactggattcaaatgatcaggcagaaataatcaccggagagaacacagtggaatggcttcagtcaaaactcactgctgaaggtcttcagggcaactttaagacttgcccctgactgggcatggtggttaacgactgnnnnnnnnnnnnnnnnnnnnnnnnnnnnnnnnnnnnnnnnnnnnnnnnnnnnnnnnnnnnnnnnnnnnnnnnnnnnnnnnnnnnnnnnnnnnnnnnnnnnnnnnnnnnnnnnnnnnnnnnnnnnnnnnnnnnnnnnnnnnnnnnnnnnnnnnnnnnnnnnnnnnnnnnnnnnnnnnnnnnnnnnnnnnnnnnnnnnnnnnnnnnnnnnnnnnnnnnnnnnnnnnnnnnnnnnacaacaagagcaaaactcgatctcaaaaagaaaaaagaaagaaaaaaaaaaagacttgccctggctttttgtgtgatgaactttctatttacagacgtgatatttatctatgactttactcagagtctggctcatagaccagaaggattggtatctcctggagcttgcaggaaatgcaaaatctcaaacccctgtattagggttctccagagaagtagaactaatgggatagagacagggatagggatgacagagatggagatgagatggagatagaaatagagatccattgattcctttgtcaaaaaaaatggctcatgcaattgtgaccatttcaaaatctgcaaggcatgtcagcaagctggagatccagggaagagttgatgttgcagcttgagtacaaaggcggtgtgtctggggccataatgtcttcttcttaggaggacttcagtctgttctcttccggccttcagctgcttggatgaggcccatccgcactatagaagataatagtctgttctactcagagtctactgatttaaatgctaatcttatccccaaaaaataccctcacagaaacatctagcctggcatttgaccaaacagctgggtaccatgcccccccgccaagctgacacacaaaattgaccatcataccctcccacccgcaatcttactgaatgagagagaatctgggctttaacaagatccccagaagaggtataagcgcagggagtctgagaagtaccaccttggaggtttagccagatgtcctagatgagccttctctgaatatgtcagattccttccctggctccctagacacctttcccacttcccaaagttggaagcaacatcgtggagaagcaggcagtgaggcgctcagcttaccacattgtgagatacacagtccgatctgtgtaccatgatttgacccaagggaaaacaaaagacccggaaacataaggacttttttgtgagctctcaaaaacttcctgcaacaagatcaggtccttgatgcaagagccacacttgtttctttttcctctttatcctccacccctgacaaatgcctagcacataaaaaaaaactaataaacaccactgaatccattaaaaaaaaaaaaaaaaaaa

SEQ ID NO: 4809 - DNA, 955 bp, Macaca Fascicularis
  misc_feature (1)...(955): n = A,T,C or G
ccagcttggtgggggtctgggtcaccctttcctcctgtcctgggccccatccttgagggccttcccagccagccagcaggagaggcaagaactgggggaacatgggaacctaggggaggaggggagctctgggcatcctcaggctggcagccaaggcctgccccttgaggcactagaggagnnnnnnnnnnnnnnnnnnnnnnnnnnagagctgcagggagaaggaggaaggtgtctggtgtgagcattgttnnngcaacatttgggaccacacaggtgggcttccttgtttcctgacaaagtcnnnnnnnnnnnnnnnnnnnnnctctctggacgagggaacagaagtggaggaaacaaaagaagcagcagtgcacacactcctggtgctgggtgtnnnnnnnnnnnnnnnnnnnnnnnnnnnnccatggcctgatccaggtcccggaccctgctttcttgggtgtcnnnnnnnnnnnnnnnnnnnnnnnnnnnnaccacctgccccgcctgttgcaaacgtgatgctcctggatggagtggagaaaccggaagactgggacaagcaaaagactgcaaacaacccagaagcccatcctcagaaggctggagaaatgatagaggaatgcgtgggcaccgtggccctgtgctccgtcacgaacacatctcagaaacaacgtggggtgaaaaagcaagacagttcatacagtatnnnnnnnnnnttataaatctcaaaaccaaatacgtatgggattcatacccannnnnnnnnnnnnnnaaggaggnnnnnnnnnnnnnnnnnnnnnnngctcacccatggcgaggggacggggctgcgctcagggaagagcagagatgctggaggttctgaacctcagggtcagtggtggcttcgtgggtttcactttattgtactttctgtgtcacatattttcttgtgtatgtgccaagtatg

SEQ ID NO: 4810 - DNA, 736 bp, Macaca Fascicularis
  misc_feature (1)...(736): n = A,T,C or G
ggcccagcagaccannnnnnnnnnnnnnnnnnnnnnnnnnnnnnnnnnnnnnnnnntagtcggcttcctgttcatcgtctatgtggtcttgctggccaaccgcctctggtgctccaaggccagggctgaggacgaggagaccacgttaagaatggagtccaacccataccaggatgggagtgaagacaagagagagaagaaagcggccaaggagaaagaagagaagaggaagaaggagaaaaaggcagggaaggaaggagagagcaacttgggactggagctggaggaagaagagcccagataccaagagagaccaaagaacacagccatgtgaagattcccggctacctcttccaggcagtcccccagagatacctcttctgccccctacaagcaatgcnnnnnnnnnnnnnnnnnnnnnnnnnnnnnnnnnnggattcagaatacagggttctcaagcgatgaaggcttagaacccaccccacctccctcagtgggggctnnnnnnnnnnnnnnnnnnnnnnnnnnnncctcttcctgaccttggtccctgcctggcgattcttcnnnnnnnnnnnnnnnnnnnnnnnnnnnnnnnnnnnccacaatcctccacaatctcatggctccacctgcttctacccactgcctgatttcttttctttctgcctgatgtctactggccagaacttcccctctcccacgcacccactcccagctgaggattgcttcccga

SEQ ID NO: 4811 - DNA, 622 bp, Macaca Fascicularis
  misc_feature (1)...(622): n = A,T,C or G
agagagaagcaaaggcccctgaagcttctaacagaagccaatgcccctccttggttcaggagaggtgcagcgttaggtgcagcacaacaaatgacttgctcatgtggctaacaaattgtcaggagaaaaactgggttacaatgcaatatatagtatggagtctcatttttgtataaatacaagtatagaatggcataactcaaaatccacaagtcatttggatggattgtaaatgacttttattttcttcatttctcatctattttctattatacatattcattgcttatataaaactacaaaattgcaacctatgaattaagaacttctaggccgggcacannnnnnnnnnnnnnnnnnnnnnnnnnnnnnnnnnnnnnnnnnnnnnnnnncatgaggtcaggaaatggnnnnnnnnnnnnnnnnnnnnnnnnnnnnnnnnnnnnnnnnnnnnnnnnnnnnnnnnnnnnnnnnnnnnnnnnnnnnnnnnnnnnnnnnnnnnnnnnnnnnnnnnnnnnnnnnnnnnnnnnnnnnnnnnnnnnnnnnnnnnnnnnnnnnnnnnnnnnnnnnnnnnnnnnnnnnnnnnnnnnnnnnnnnnnagtgaagagagagactccatctc

SEQ ID NO: 4812 - DNA, 418 bp, Macaca Fascicularis
aatgtgttctgttttatgaccagctttaatcttacttgaggaataatagcaatcctagagattcatgggaaagagcacttaaaaacattttctgaataaagatacctaaaccatatatccagcttggggctgaaatgaacttttgtgaaataaatttgtcttaaataataaatattctataagtaattaattgtataaaacagtgtattcagtttcaaaagtttcagtttgggaggatattcctaaaaaggcatacatagatggtaaaatataaaatatttctgacagaattattcagtattattcaacatttactttacatgtttgttattgtaccacaaagatagtgtcattgttggattaaaatgttggctgtttttgttaatatacttaaaactgtaacgcagtgaataacacc

SEQ ID NO: 4813 - DNA, 750 bp, Macaca Fascicularis
  misc_feature (1)...(750): n = A,T,C or G
tctgnnnnnntgcccnnnnnnaagcagaggtgtgatctcaactcactgcaacctccacctctnnnnnnnnnnnnnnnnnnnnnnnnnnnnnnnnnnnnnnnnnnnnnnnnnnnnnnnnnnnnnnnnnnnnnnnnnnnnnnnnnnnnnnnnnnnnnnnnnnnnnnnnnnnnnnnnnnnnnnnnnnnnnnnnnnnnnnnnnnnnnnnnnnnnnnnnnnnnnnnnnnnnnnnnnnnnnnnnnnnnnnnnnnnnnnnnnnnnnnnnnnnaggtcaagtttttttttttttccttattggaaaagtgaaatannnnnnnnncaggaaagtcagaaaatataaagtagaaaaataccaaaatctctttcataattctctctaccnnnnnnnnnnggtcagtccctctccagaccagaagcagttagttctgacaccaacaaatggtgataagaggttgnnnnnnnnnnnnnagggaagaagccaccacaaaaccaaacagaaaatgacactgcacagcagtctggggacatgtccttgaaggacacagccccaaagatactggcaggnnnnnnnnnnnnnnnnnnntcaacaggcatcatcaggaatcttatttcagaatgccacaaagaatacattttagagaaggttctaagagaaaaagctaaggtgacttttttcggtcgtcgttttttttcanncagtgtcacttctgttgccnnnnnnnnnnnnnnnnngcatcacagctnnnnnctgca

SEQ ID NO: 4814 - DNA, 751 bp, Macaca Fascicularis
  misc_feature (1)...(751): n = A,T,C or G
ctccaatgggcgggaccgagaccagcgatgnnnnnnnnnnnnnnnnnnngggannnnnnnnnnnnnngactgccnnnnactgtgacagtggcnnnnnnnnnnnnnnnnnnnnnnnngtgtgtggtagcaggagaaagtgtgaacattcggtggtcnnnnnnnnnnnnnnnnnnnnnnnnnnnnnnnnnnnnnnnnnnnnnnnnnnnnnnnnnnnnnnnnnnnnnnnnnnnnnnnnnnnnnagggatgagggctcctacacatgcagcgcctaccaggggagtcaggcagtcagccgcagcaccgaggnnnnnnnnnnnnnnnnagcacccaccacccagcccagggaccctgnnnnnnnnnnnnnnnnnnnnncagagctggccaactgtgatttgatcctacaggcccagctctgtggcaacgagtattactccagcttctgctgtgcnnnnnnnnnnnnnnnnnnnnnnnnnnnnnnnnnnnnnnnnnnnnnnnnnnnnnnnnnnnnnnnnnnnnnnnnnnnnnnnnnnnnntagagctgggaagaaaggaagannnnnnnnnnnnttcctctctctggctggcaaagggagttatcttctnnnnnnnnnnnnctctttcaaaaacccacccagtatttagccnnnnnnnnnnnnnnnnnnnnnnnnnnnnnnnnnnnnnnnnnnnnnnnnnnnnnnnnnnnataaccacaggnnggntcaagaagagcnnnnnnnnnnggataagaat

SEQ ID NO: 4815 - DNA, 1760 bp, Macaca Fascicularis
  misc_feature (1)...(1760): n = A,T,C or G
cttttgtaaataaaaattgatctagatatagtcatctccattcatttacacaaagtggatggcagcttttgaactgcaatggttgggatgagtagttgtaagaaatctgactgaacaaagcctaaattattcactatttagccatttgcaaaaaatgtctgtagactctggtctattacctaatagagtataactagagtttttaaatatggttgattaaaaattaaatacttgttgacaaatagatgccgattaagtggagaacagaaaaatgtgagagttcttgtcataaacatatcttaactctcctactaagaatgatgacaataaggacagaaaaacaaagtaatttaagagaaataatggaaagatggaattcaaagatgatgaatcctccattaagtgctattgcaccttatttgggttatgttatctttgttagcctcagttttcttatctgccaagtgaaaataataatttctgctcgacctaacaccctaaggtccaaatgcacattgcacaaactaacgatattcttatgttacgtaacctttattttctttgtataattataactcctaacctaaatttagaattcaagatgcattcattcttcttttctaaaagtttcataaaaaaggtggttgttcttgtagggtgggaattgagcaaagataaagaagtatctttagacagtatttgaggatttagtaaaccttatttgacatgggacaaaatttctggcaggcccaatggagagaaataagggagtgtgtgtgtcagataaaagaaagcagagcttggagaaagaggaactaaggggaggagacagatggccaatgaccttgcaatgagaatattgagtgtagcaaattattagctgttcagtgttcccaacaaaatcagtgacagcagcccccaatatataggcaatccaaggcaaggtcttcaggcactgcaagggcctagaagacctggtagttggcaaacaacaattaagaacatttcatctttaagaggcttctgagggccatgacatgggcactgatctagaatgtagaagcccttagatttaaggccagacatttctatctcatgtcgtcatgagtaagtctcagtttcttcctttgtagatttagaatatcttccttgtgtacttcatgaggcttcaaagaatttaatgaggtaatttgtgtaaacatgttttgaaaactcttcaattataggaccatattattattttattaaatataatagctgaaaaaccacagaaggacatgggcttttagtatatttctagaaaagttgatagattttctgcctgcatagacacagttacacacacacacatgtccagacttatttcatagatccatctatttaggtgatatggaagtagggatatagtaaaatactctctcggcagggcttggtggctcaagcctgtaatcccagcactttgggaggccgagacgggcagatcacgaggtcaggagattgagaccatcctcgctaacacggagaaaccctgtctctactaaacacacacacacacacacacacacacacacacacacacatatnnnnnnnnnnnnnnnnnnnnnnnnnnnnnnnnnnnnnnnnnnnnnnnnnnnnnnnnnnnnnnnnnnnnnnnnnnnnnnnnnnnnnnnnnnnnnnnnnnnnnnnnnnnnnnnnnnnnnnnnnnnnnnnnnnnnnnnnnnnnngtctcaaaaaaaaaaaaaaaaaaaaaaaaaaaaaaa

SEQ ID NO: 4816 - DNA, 2190 bp, Macaca Fascicularis
agttaccagaggagttgtgcctgggcagagggtacccaagagacaccctggtgcccttaacctccaaagcaggcaacattgtgtgtccaggtctgtggaccagagacacaggatgttttgtgactgacagagtgatccaaaatggagaaggatgaccctccacagttggtgactcccacatcagtgaaagccatcatcttgaggattgaggctgcccagctaactcgggctcaagaggatatttctacccagctcttagacattttggacaatgtcaattgtgtcatcaaccgcttccaggaagaattaggatatgatttaaaagaaaacgccaaatctcaccagacagatccaaagggcaagaagagattcatcttgctggacaaaattgcctccttctccaaagatgctaagatgaaggagaagcacctgtatgacattctccgctggctaggtgactggggtgacactctgacctatgagatcggggccaggaagagtgaagaggaagaagcagccctggacgaatggattgaagtgacggagaaaatgttaccactctccctcattgccaccaaaagaggcattgagtcactcactgccctttgctccactctcattgaaggacaaaggaaaaggtcacaagtgtccaaacgcaccttctggcagggctggcagggaagaagcccacaggcatctccatcccatcctcagccactgagcccagaacagatgctccaggaccagcataccatgaacacaaaggcctcagcgaaccaaaggaaggaatgccaggaacctacaaatgaatccgcttagcttgttcaaaaacagtcaagcgagtcactccctggaacccaaataagccagaaggatcaagacagccccagtctccactgcatcccttagctggtgattcccaaccttccgagggacggaaacccacagagaacttggttgaaatgcaggttcccagctggtgcttttaaagaaaccctctgggtgttgctgagtactcctagaactttgagaaacactgtttccctcctgcagtccccaaactctacgtttttaacaaaatagaggttggtttattttaaaattctgtctcattgctgaaacccacgcctcctcaactcagttttagaaccctttgagtgttgtctgtgtactttgggagcaaacatgccgagatagctgtgagtggcacttggcacttagtaggtgtcagtaactcttcatttaatcaaaatatggacagatacatcactgacatgccagtgatttgcatgaaagctcagaaggtgagaacagaaggagataccaaatacagaccagagccaggtgtcataaggtgggaggcaaaggtgagcatgtctctgagtgaggacaaaggtggaagaaatggagacatgaggttcaaatatagatggtgtgggctaaggaggccatctctggcaagcgtctgtcagttcagttgagacactaattcggttagttcaatcagctcatgagcacctacgcaccctccacctgacacacagctacctgcctggtccccactcagtctcccccgccccatccttctccactcaccagcacccttggcctagggaccacacatacaaataggaaattaccctatcctcagagaacccatgtccagcggttctcttcctcaggaatggcacccatccttgcttccagcctaagactgagactccggaaagctgagcaggatgtgggatgtgaacagccggttctgtggatgatgccaggagtaggatttgttttctgaatcacagcttaagatatcgcgaggatgcctggtgtgggaggaaggggagtggtatgatgcaggtcacatgcacagcacagctgggccggccctgggctgtttccagcctctcgggtcccaggcgctttcttttctggaggcctcaccccaatgatacttaacatcttaaaatgccctcacactaaatgtattgctctaaataattggaaagcatttttataaccttgctttagaaattaacttgctatgaataagttatttaatgtgtacttagctgtgagtgacatctcagcaatcagcatgcacagagaagaaatcgaacaagttttataaatgtaatgagactatttcgaatattaaatttgacagtgaatgaaaaaaaaaaaaaaaaa

SEQ ID NO: 4817 - DNA, 729 bp, Macaca Fascicularis
  misc_feature (1)...(729): n = A,T,C or G
aagtggtgcactgtacatnnctaaggtccagaaagaggacannnnnnnnnnnnnnnnnngggtgttgaaaaaggatgggtatgagcaagaatggaagatcaagctgcaggtgcttgaccctgtaccnnnnnnnnnnnnnnnnnnngagaagagagaagatgtggatgacaactgttatctgaaactgtcatgtgtcatanatggcgagtctgtaaactacacctggtatggggaactcccgaaggagatccagaacagtgttcttgaaaccacccttaagccacacaaacactccannnnnnnnnnnnnnnnnnnnnnnnnnnnnnngagcagcnnnnatggnnnnnnnnnnnnnnnnccaccctgtaccgcggcccggtcctttggagtagaatggattgcaagttggttggtggtcacagtgcccatcattcttggcctgttacttatctgagatgagctcttttaactcaagtgaaacttcaagnnnnnnnnnnnnnnnnnnnnnnnnnnnnnnnnnnnnnnnnnnnnnnnnnnnnnnnnnnnnnnnnnnnnnnnnnnnnnnnnnnnnnnnnnnnnnnnnnnnnagttaacnnnnnnnnnnnnnnnnnnnnttaattttatatctctttgtggttttctagtaaacatatagacatagagatacacacatgtttttcccaccaaaaattgtgacaacaccgtgaatgttttattatttttaaaaaa

SEQ ID NO: 4818 - DNA, 661 bp, Macaca Fascicularis
  misc_feature (1)...(661): n = A,T,C or G
tcacgtggctgtgcaacgggcagccggccactgagggtgtcgctgagagcctcttcctgcccagaacagactacagcttccacaagttccattacttgacctttgtgccctcagccgaggactactatgattgcagggtggagcactggggcttggaccagccgctcctcaaaggcccagagcctctcccatatctcaccctgtacatcatatcatgagaccctggtgcgtggtttttcgtcacccctggaaaagaaaaaccaagtgggaacagcagataacaacacagcaaggccccgctgcccaaatccatatgtcaacaggggcgtgaggtctcaggaggtggccaaaagatagagggaaccccattctcgacatcacggcagcgtccaacacaagggtttgagatatggggttatggacaaggtgggaaggggcaggannnnnnnnnnnnnnnntccccagggtggacagggggactgtcctttcccctctggcctttggccttgggttttttagcgtatttacatgcacgctgagccactctcttccctttccccagcatcactctccaaggaagagccaagattttccacccataatcccttctgctgacccctagttccatatgctcagccaannnngtatcagctctcagggc

SEQ ID NO: 4819 - DNA, 734 bp, Macaca Fascicularis
  misc_feature (1)...(734): n = A,T,C or G
tgtgtgggtgctggctgagctttgggctgggacggcagcctgggaanntgaggctagggacaggggtttgaggtgggggcctctctggaagcacatttggagagaaagacagagagccatgaggagagggctgaggagggcagaagggctaggcagggggcaaattgggcccctcccttccccagcttttctctaagatatacagtgcaatagctccccacccctcagttgacaccagccctgtaaagctggccacaatgtgcagggagaatggggagagggtcttcagtgaggtggctggggcgagagtcggcctggacttccctggggtgctccaggccagagctgtttcatcggggcgagtgtggtgaggggacgtccttggccttgcacacacactacctgggtgagtgggcactgggatggtctgtggggtgggaggtcctacggatgggtccgtagaggtcccacctctctcattcctccttggcccctctccctagcttctcctgttagctccttctgctcctgaccccgcctccttgctcttggcgcccccattgtctctggctacctccttgtcccaccacctccaggccgcatcccaccttccctcttggctactgtaattgtaaatagcgacctttggaaaacgttagcggtgtaacagtccaggaaactgttttttgttgttgttgttgtattgatatgaaatgagattctattttgtcaaa

SEQ ID NO: 4820 - DNA, 387 bp, Macaca Fascicularis
aaggagatataatcatgccggtgcatcccagctttgggtgagagagtgagatccggtctccaaaataaataaatcaatcaaataaagaccaaagtcaaaccacacatcaggatctctcacacccttccaatttagccatctaccagcacttagataaactcatctcccatctcttccaccatgaagtcattctttcaacaagggtaaggtcctcttactcacccttgcatttaagcctttgctatcaccttttcccacaaactggagggccctctctctctctttacccctcttccactacctcccacccataatttttccagaaagccatttcctctctttcttctgattggtcctgccctatcacccaggattatatgctggaaa

SEQ ID NO: 4821 - DNA, 955 bp, Macaca Fascicularis
  misc_feature (1)...(955): n = A,T,C or G
catcctccagtaccttgcttcttactgataatnnnnntggaattcctaacttttcagtgactttttttaaactactatattgattgtcctttaaaaaagaaaagtgcatatttatccaaaatgtgtatttcttatacgcttttctttgttataccatttcctcagcttatctcttttatatttgtaggagaaactccnnnnnnnnnaannnnctgtatgacttacaaacagacaatatgtgagtgcctnttgcagaagagggtgtgtttgaaatcatnnnnnnnnnnnnnnnnnnnnnnnnnnggaaacgctacctctctgtcccttgctgtatgctaatcatcgccagaggtgcttcaccctgagttttgttttgtgtttgttttctgacagtttctgtgttttgtttggcaaggaaaggggagaaaggaatcctcnnnnnnnnnnnnnnnnnnnnnnnnnnnnnnnnnnnnnnnnnacatttttcagtttgcttttgttccaatgtcaatgtgaatgtccacatgaaacctacaaactgtcacgcttcctcattccctctcatctcaggtagaaggttgacacggttgtagggtnnnnnnnnnnnnnnnnnnnnttcagaagacccctgactcatcatttgtgggtggcagtcccttgtaattggtgcatagcagatggtttcnncntttagatcctggtttgataacttcctgtacttgaagtctaaaagcagaaaataaaggaagcaagttttcttccatgattttaaattgtgatcgagttttaaattgatatgagggaacatgtcctaattcttctgtcctgagaagcatgtaatgttaatgttatatcatatgtatatatatatatgcactatgtatatacatatatattaatactggtatttttacttaatctataaaatgtcgttaaaaagttgtttgttttttct

SEQ ID NO: 4822 - DNA, 242 bp, Macaca Fascicularis
ggtgtgtgtgcacatgtgttgtgtgtgagggcagagtgtcttccacagtgcgtggggtgtggggttgggccccatccccggcccgagcacatcatctcgtgggggagaggggctgacatagagggaggagacccgccctgatacatgagatgccccgcgcacgcctctcctccctacagaaacacatctgggggtttggagatcagagtttgtgggtttgctctccctacaccatatctcgt

SEQ ID NO: 4823 - DNA, 778 bp, Macaca Fascicularis
  misc_feature (1)...(778): n = A,T,C or G
annnnnnnnnnnnnnnnnnnnnnnnncaaagagagagggaagaaggagaaannnnnnnaagnnctgcaggaatttgacnnngncttaagaggaaagaagaaaaggaagaagtttatgaaggatgccaaaaaaaagggggagatgacagcagaggaaaggtcnnnnnnnnnnnnnnnnnnnnnnnnnnnnnnnnnnnnnnnnnnnnnnaagaggaatcgcagagccaagcgggcccgagnnnnnnnnnnnnnnnnnnnnnnnnnnnnnccnnnnnnnnnnnnaaagcaggggaagaaatctgtatttgatgaagaactcaccaacacaagcaagaaggccctgannnnnnnnnnnnnnnnnccttnnnnnnnnnnnnnnnnannnnnnnnnnnnnnnnnnnnnngacgaggaggaaactttaaatctnnnnnnnnnnnnnnnnngctgttttggaggggcataggttatggctgtttgggattagaggtaaaaacctttcatggaaaaggagcttctccatcctcattctggtcttcactctctgattttcttacagatacaagaggaggaagtannnnnnnnnnnnnnnnnnnnnnnatgggggcagcccttaaatcccttccctgtgggaagtcatcctggctggtctgtcttttctccgtttgttcaaaaaacaaaaaaaaagtttggtgtggtggtatggtatgtagctattttcnnnnnnnnnnnnnnnaatctcctttcttgctgattagctttcacataatgactatataaa

SEQ ID NO: 4824 - DNA, 649 bp, Macaca Fascicularis
  misc_feature (1)...(649): n = A,T,C or G
ccnnnnnnnnnnnnnnnnnnnnnnnnnnnnnnnnnnnaaattnnnnnnnnnnnnnnnnnnnnnnnnnnnnnnccagcttctggggaggtagaggcaacagaatcaccggaacccaggaggcagaggtgtnnattgtaccaggattgttcctatgcagtccagacagggnnnnnnnnnnnnnncttgtttnngaaaataaaaaaaaaaaaaatacagaaggaaacttcagccttcagccttggggccacagactcaacatgtgtgtgtgatgggttgctctagcccgacataggggatcattttttatgcctcccaggctagctcagtccatggggggctctccaggtgtccctgaaagctgacacccacctttcaccaattcgatatgatacagttcagttttgtcgtttgtgaaatggggatgataatggtgcccgccttgcagggctgtggtaaggattaaaggaggcagtgcaagaaaaggctttggttggtgaagagcccaacctcagaggggagctgctgggatctttatcttgattgggatgtccctgtctccccctccccttgctccttgaacgtgaccaaggaaagtgaaaagcagaaattattcactcggctgcacccttcccctcgatgcctgggagta

SEQ ID NO: 4825 - DNA, 738 bp, Macaca Fascicularis
  misc_feature (1)...(738): n = A,T,C or G
gagtgcagtaannnncttnnnnnnnnnnctgtgaatcnnngatgtatacatttatccaaaactaacctgactttaaggtcattgctatctggtttaggagtcacatgcttgagaattctggaactattatctcaccaccacacactttgtaattttacatcagatgttctaaattattactgttaatattttttaagagatgaggtcacactgtgttgcccaggctggtctagaacccttgaactcaagtgatcctcccaccttggcctcccaaagtgctgggattacaggccaccacacccaaccctaaattattttttggcttactaaagaagttgctttaaacttttgtttcatctgtaggatatggataacaattgttaagagttgtaagaattagaagttagagaccttagaatactaggaagtgggagttagggattttggagctttaccttttaagaacttgtgtcaatatattagacaacataccagtgaggacctcaaatgacagtatttctgtagtgaaatttgggaatgtttatgttaaatagaataaacagcatgtcagtcaaggttgggttttcctgacaaaatctgaaagaatttctctgnnnnnnnnnnnnnnnnnnctggtgtgacttaannnnnnnnnnnnnnntatatagtacatgtttgttaagtcagtaattacaattatttgagcannnnggtactgttcaaggtgctgagaataca

SEQ ID NO: 4826 - DNA, 752 bp, Macaca Fascicularis
  misc_feature (1)...(752): n = A,T,C or G
tgttttgttttttaagatgaaataaagacccagggggagaatgggtgttgtatggggaggcagatgtggggggtccttctccacacccactttctccatttgcaaatatattttggagaacagttaggcaccggcctatgtctgggggtagctctgcaccatcccttcctgctcaccttacactcaactcctcttttcctggagggagtgaccaggaatcttcagaaagcttggnnnnnnnnnnnnnnnnnnnnnnnnnnnnnnncagggttggggggatcgggaagctggattcggatccgagagccctttaacaaccagatcattctttcttagaacgaattcctaaggccactcaccagaatggggttannnnnnnnnnnnnnnnnaggagagtggcggttgagtgggcgaaagacgaggcagggtctactgtgggactcattttccttgccttggctatgccagaggagcnnnnnnnnnnnnnnagtagctgtccagaaagcccacccaagccagcacagccaccctggcggtacaaaggctgggccggctggacttctgtgccccccacattcnnnnnnnnnnnnnataaaaacacacactagttagcattagtgtttgtagtgccactnnnnnnnnnnnnnnnnnnnnnnnnnnnggttggggaaaataaataaaatctactgtggcatcagacaggtattaccgaggtgaagagtggaccaggcttttgtgggcacttatcctgg

SEQ ID NO: 4827 - DNA, 736 bp, Macaca Fascicularis
  misc_feature (1)...(736): n = A,T,C or G
agaagtagatatcagaaaacgggcatgaagaacaggggaactgggtggcatcagactcctaaagaagtgagttaattttccttcccttccattcagattcatgccacggctccatgtcttcagtatgtgtaagaggtgagaagttctttcttcagccaggggtggnnnnnnnnnnnnnnnatcccaatgctttgagaggccaaggtgggaggatcatttgtgcccaggggttcaaatctgcagtgaaccatgattgcaccactgcactccagcctgagtgacagagcaagaccctgaccctatccctaaaaatatatataaaaagtaaaactaaagaacttcttgcctaaacctgaattaccccaatttgctgagtgactttgagaaaaattagactgtttagttcagtctggatgaaaagcttgagattggtttcctcgaganntgagctatagtgacagatgcaaggtgatgttatttgttcnnnnnnnnnnnacaattttaaaaaatgtaattaaacataatggaatgtgttaaactgctgggcactgaaaatgacaaaaaggaggctttattgaacattgccctttttcagttggttcaaagttcagcactgtggttannnnnnnnnnnnnnnggaaacattagtagactttgacaattgctttggtagtttctaaacagagtttttttctctacactatttgcaactggagtgcaatattgtatattctgt

SEQ ID NO: 4828 - DNA, 745 bp, Macaca Fascicularis
  misc_feature (1)...(745): n = A,T,C or G
gaagacaagggcaacttacttggagttagagccccgccatcagacagtacccagcacacattaatgttagcttctttctgagaaaaaatacctcttccaggccctgcaacaaaaaatacatttgctgtgaggattgaaaatgaacaaagttagaaacaaaacagcaaagtcagtgatttagtcaggtgagttctttgttgtaggagcagttgattattctagtgtgttttatgtagtatgtaactacaagatagtacattttttagcagttcaaaaccaaagttgctagcatcattttgctgttgtgccagttaatcataggatcccattaaattannnnnnnnnnnnnnnnnnnnnnnnnnnnnnnnnnnnnnnnnnttccagtaggaaaagaaaagaacaatcttccatttctggacttggccaccatcaccctgttcggacctgtcctgagcttccaaccttgactgctgggctcctggcttagcttcttgggttcctaattcctggtgtttaataactctctccaggatcatgtttttctgattatttttttcagaaataatgttttttaaaagacaaaaacaaagggaaaaatatttaattactgagcagaagtaaatactattggtattttgtacataatctaatttttatatgcatgttcgtgctttttaatttttttaccaaaaatgaagtcatctacctactacttgtaaccagcttgtttcataacatgttattt

SEQ ID NO: 4829 - DNA, 2324 bp, Macaca Fascicularis
attaggaatgattaccattttttttaacaacttaacctctaatagggttacttggatgagccaactcagcttccttcccatggataggaagggactctctgtttattattcaggtttattggcacgaagatacttgttttaagttccttgtgaacccatgatggacagtttacagaatgcttaaacctgtcaaaagaccagtaatttttttggggaaaagccttcccaggcgtctgtactgaaaggagcagcaaacaaggggctaatccgtgagcagtgttctgtaggctctgcgacatctttgttttataggacttcggagccttttatgatctggaactatttgaggggtttcattataggccttggttctctccagaggccaggtgagtttattgtggaatctttgaaaggacaaggcctctgaatgaatcaatcccagggaagcatttggtggtggtggtagtggaggattgccctgtgaacctataaatccgcagtctcttgggcagaggagcaagccccacgaacatgatttgaagcaagcaggccctcttctcttatctcacgtcctcagtctctgttaatgaacatactggatatggagtttaataaattacctactatcatctggccacttagattattatcacaccactgtggactgttcctggggggagaagaatacaccgatttgaaagattcaagggagaaagagttaaggatcacgactgcatgaaagaggaaaatccttcaatatttaatatgtttcttatgatacccacagagtacttttatggttccagctgagcgttcctgaaatgaactgaccgttaataacgcctctttgataggttaccctgatgctgctaatgtgaagccttaagtgtgtttccgggacaacgtgctgcttatttcacctcagccacacatgtgtttgtgtttaggatattgtaaatctttgctaagtagtgtcttccttggtgaatgaagtaattgttgtcttcaagtgtaccatctgcctagcaaaaaattgctacaaactttcttttatgcaatagtccttggtacttctaatatttttagcaagagacaattttctgtactagaatctttcactgccagaaaacacagtgccagtaaggttctacatactactgaccatctgcttaatagacatgtatttcctttgagtaggacattagctttttattataaagctaaaactagtataagcaaaaatataatatctagaagcacagttttagccaggatgtttaaaaattaaagttttgcgaaatttaagggtctttttaacctaggtaagtttatatgccctgacttcattgtagccatattctggtaccttgcattttgaaaagtagaggtttcttaagcaagcaatggatagtaagagacttttcctgaggcacctgtttggaatctggttttgtcagtggcagcttgacatgtgcacccttttgtattaaacactttgaaggtgatgcaggggagcaggaaagccattctaaactcactaccaagtacaattcagtatgttcctgtggctgtttgctgtgactaatataaatttcttgcagtatcagctacacttaattatgttgctgatagacaagcatccatgcttcagctggcactaagtgtttcactgtaggatcagcagcaggttaaagactgaacggtttgtggagacaaatgtcttagaggctgcgccatgtccaggttgggcttgtgacttattagtggcctagccttcctgatggcaccttgaaagtgaacctctagaaatttctacttaaaaggcaaagctttaaaagcagagctagtctattctagttattgatgcaactaaaattctgtatttcttaagatgggacactaacaagatggcacatgatagagcctgcaatctcaactcattgtgatcctaatggtctgggtgattggatggtttgagttgttagggattttgagcttttcattttattgcatatctgggttggatgttagactaaaggaaacccaggaatctttacctgatgttacatttaatatttaatgtaactggtctagcaacattaagggggatttctgaagccaactccggaggccgtgggctgaacattttgcactgcttttatatacttgtattcatatcctcttatcacctcagactcagacacaaggccttttacatggaaattttacaaattactgccatttatgtaaaataatgtcctgtgaccaagttgtttaaatggaaaataaagtgctttctttaaggaaaaaaaaaaaaaaaaaaa

SEQ ID NO: 4830 - DNA, 672 bp, Macaca Fascicularis
attgcaggagatttaatgtataaaatttctagggattaaaagcttaaactcaaaaattcttcatccatatatgttataagaaattatagaattaaaacttaatgtacgtcaattattttcaaatgtccaaattcttttggaaaaaaatatcagttttactttgaaattgctcaacttctgctattcatatggtctgattagtgacataagtagcagctgtttttcaacttcagtttcattcactaccattgtttccaaattatcaatctctgctattaattatgaatttaagaccatattattatcaaaaacctagagaccaatcatatatctgaaaagaaatacccattaaaaattctccctcctgtcattgagaactatgcattgaacattccgaatcattctaagcctctgaagagactgtaatgatccattcatgagctggtatgaaatcagtgggaagcagaacaacaaaagcaactttaaaagcaacaagaaattatgtaccatatatacactgtagcaaatattttatatttgagagtctttacagcttacatttccattccattattacaagtgatgaaaaacaaaaaattgcaagtagtacgcaaattataaatatacagtcttcccacttcactaaccaaattcctactttccagtgtaact

SEQ ID NO: 4831 - DNA, 1798 bp, Macaca Fascicularis
tgcaggaaaagagctcagatattgatgaataagcatagaatttctcaaggcttaatgaaaataaaaaagaatttattatattccaaaggattcactgagtttctaaagtactcatagatgctatttaaactaattaatttccccatcaagtggctatagagcatgaacaaaaatggaatatgataaggtttcagggtattaaattttcttcgtagaatttcaacatctgtttccaaatactgtctaggttgttgtaaagaattcatttaactatcagataacttttactcttttcctttcatatagaaatgggatcttaatgtgacatatatttgtgtttgaaactgagccataatccaaataaacaatgtcctcagttttatccaaataaaaattattttggtatctcttctggggaagataattaatcacaagaaaataatttttcacaggacatttacttaaaagcatgtgtcatacccacttaaatgcttatttatcttcatgatattagaaattcagcctcagtaatttccatccagagctcaaaaggacatttgctaactgaatttagagctctataataagaaagcagcttagttataactaaataaaaaaggatgaaatgcttttctatgttagtgaataataatcatgttaaccattgaaaataaatggaaaatgacttcaactccagaaactggctcctctttgaagctaagtagggagcatagaaataatgtggtcagcaattttggcctcatgtacctttcccacaatgcatttacaatctgtccatctcatttgtcagctattgttgcaactgtgctttcagattttatataaaccaaaatatataatctaagaaacaaatgtgaaaagaattcatcacattaattttatatagaatcaaatgtattttttaaaaaatcacaggggaaatatagcatatgctttcttaatgcaaagatgaggtattttactttaagcagattttcagtcatataaaatttcttattaatggcgtactatggaaaatctaaatagtgcatgcaaaatataaccttttctaaattatgactcagtattgcttgacagattagtcagtcacaacgtgatttgattctgtgctggtttgtgctcaatgtgatttcagaacctgaaactaagtaattaaaatctaccttatctcactaagccagtgggagaggctcattatgatccagaaacaaacttattggcctgtggtcatgcatcagaaagaagagtcaagattgtgtttatgccttcagaaagtttagtcatccgtctttgaagtttcagcaccatgaacagcagtagtctcctgactggtggcagaaagggaccgaaaactcaattagggctgtagttatttttcaaagaataacatttctttattatccagccagtttactgaaggatgagctaaaatgtaggaaaacctatcagattattaggtagatgatattgtagcttgctttaggatcttacaccgatagagacttggtttgtaggaaacagttttacttagtagtcaaaggacctgccctatatcttatccaactctttttcactctacagcaacttctactaattttctgtttgttaaaatgtgtgtgggctgggtgcagtggctcacacctgtaatcccaacatttagggaggcagaggcgggtggatcacaaggtcaggagttcaagaccaacatggccaagatggtgaaaaacccatctctactaaaaactacaaaaaaaaaaaaaaaaaaaaaaaggccaca

SEQ ID NO: 4832 - DNA, 747 bp, Macaca Fascicularis
  misc_feature (1)...(747): n = A,T,C or G
gtccagtgagttgtcacagcttcactctcannnnnnggataatnnnnnnnnnnnnnnnnnnnnnnnnnnnnnnnnnnnnnnnnnnnnnnnnnnnnnnnnnnnnnnnnnnnnnnnnnnnnnnnnnnnnnnnnnnnnnnnnnntgaattctgttctttcatgtggattttaatagggagggtctaaaaggaagcttcagtttgggatttttagagcttcttctaagtacaattgttgaatcaagagataaaaatgatgttataactggaaataaccccgagattaaaaaggagataaattagccccattgggacagtgctattgggaatgtgaattgatatcactttcctggagtctagtttagtatttattttatacagaattcctgaaaatatgtgtgtctcctttgactcaatacttaaaggaatttacacaaaggttataatnnnnnnnnnnnnnnnnnnnttatgctggaaaaacatgaaatattctaattatgaattaattggggatcagtgaaataaactatggtttgatatgctctaaaaaataatgttacagaaaaaagtgtannnnnnnnnnnnnnnnnnnnnnnnnnnnnnnnnnnnncaggttagatgctgatatatacagtataatagaaaaagatcaggaagatatacactgacatttaaatctggatatttatgagtttttttatttcaatctttgtacatgtatgtattttctaaaaattgtattactatctt

SEQ ID NO: 4833 - DNA, 1965 bp, Macaca Fascicularis
actttaagatcacctgctatatgttgggaaatggtttgaagaagaggactaagagtagatgcagggggactagttatgaagttcttggagaggaaagataacactagcttgacctggagtagtagctctggaaatggtgtgatatttggaggtggctgacttttatagcaggtagggggtgtctagtgtgaatcctaggtttctggcacagtaaagtgggttaccatgctatttgttaagctcagaaactggcagggaatcaggttaggtcattctgagtttatcggaaaagagttgttcaatatgctgtcaccaaatactggatgtattggtcttaaactcagtgtggaaaagtctggactagagatacatatttgagcttcatcagcatacaataattatatttgaaaccatagataagatttctgagggagagcaataagaaaagggccttgacttagccttgaataaatccagtatttatagatcagatagaatatgataagctaaacaaggatagctaggtgagtatggtatcacagaagctaaaagaggagtatgtttcaaggagggggaaagagatttaacagtgttggatgctggtgggaaatagccaaggaatttaataacatggagatcattggtgatcttattggcatggtgagcactgctgcatatgagccaaggaggtacaagcagatgagagagcgagtgtacagtgttctctagagggcaggagggctggaatctggaacacagatgaggggagtgaggggagatttgagcattagataaaagaaagggcaatttcatataatgtgtcttttaaaacgttaaaaatgtttgcttacagtcacagagtgtcacaatgacctcaatcatttgtcccctgggaattaatctgtaggtacctggttttgcagaacatattttttgtgattcacatgtctgtatgcagtcttggcacacttgttttccttttgtgattatcattaagacaagtgatgtattcaatcaaataacgttctagattcagttgagcaatgaactttgctctcattctttttaaaggcagcttaactgtacatttgtgttagctctttttcaacacacatatttagccctgggttaaatatcagaaattttcatatttctgggaaacctctgtccagtcatttgaccctaaggggaaatcagttctatctatatatagtagattttaaaaaaaaggaatattgtatattattgaaaatgctagtcattctaaatcaccacttttcacttagtgtagtttcacctgaaaactataagaagagaaacaccttctatctgatttaaaatatgttaatatgctttagggccaggtacagtggctcatgcctgtaaacccaacaggttgggaggctaaggcaggaagatcgcttgaggccacgagtttgagatcagtctgcacaaagtagtgagacctcatctctacaaaaaaattttaaaattacccagacgtggaggcaaatgcctgtaggcccagttacttggaaggctgaggtggggggattgtttgagcccgggggtttgatgctgcagtgagttgtgatcatgtcactgtagtctgggcaacagagtgagatcctgtctctaaaaaaattaagtagatagacagataataaataatacattttaaaaaatgtattttataaccaggcatggtggtgtgtgacagtagtcccagctacttgggaggctaaggtgggaggatcacctgagcctgagaggttgaggctgcagtgagccatggtaatgtcactgcactccagcctgggtgaccctgcctcaaaaataaaataaaataaaggtcaggcatggtggctcacacctgttgaggtggggtgatcccttgaacccagaaattcaagaccagcctgagcaacatagagtccctgtatctaccaaaaaaaaaaaaaaaaa

SEQ ID NO: 4834 - DNA, 775 bp, Macaca Fascicularis
  misc_feature (1)...(775): n = A,T,C or G
aattccccggactgcancnntgatttgctactgtacctggaagagatgtacacccgaccatgggacatcaagtgactgtgtgaatcaaactgcccatcatgacttgttgttatttgactcaaccaaactgtacnnnnnnnnnnnnnnnggagcagtgcactacatatgggactggaaccatgaatgagcaggtgactcagactcctatagtacctgcctctaatccttcagcacttctccctcaacccacataaactgtcatcataaggagttccctctgatcagttaacgaagagaaaaaagtatggatattgtggatatccaaacatctctctggccattggacccctagaaacctgtgacaagtcctggaagtttttcaaggttcatcttgcaccttctagcatgcgtatgttttaccaaagcatgtagaatgctgcctacttctgctcatcagtttcatttaatataatttcattactctaataaatcagtgtgatgttctatggaatagcaagaccatcaaggtcccttcatacaatatagagaacaggagagttgatgtagcctgagacaagacagtaaggacttactgttgttcctcctatttaaatttagtctgtttctgattctccttataattagaattggggtggggggacatttccannnnnnnnnnnnnnnnnnnncaagatgtatattaatttcttccaaagaannataccacacctagaacagcaaccatnnnnnnnnnnnctacctaattaaagtttgc

SEQ ID NO: 4835 - DNA, 701 bp, Macaca Fascicularis
tcccagattttcaggaagcagactccacaacaaatctttaaattagcctttgtctttttttgacacagtctccctgctctctcactcatgtttcctgggctccccagtgaaatgaattatctgcatccaagcctttacctcaaattctactttcagggcaacccaagcagagaaagcctatcccatcaatcactgaataactatagaaaacacttcgttagataaggagtattctaaggtattgatactttagttctggtatgtgtttctgaataatttctctgggaagtgtggaaaagtaagccttcatgttattgaaacgtaaatatgtttattttccttggcaactattgttgagtaaaacctgaccagaatccatggctttttttgtttgttttttgtttttttgtttttttaaaaaagaacctatgtatttttaacttccattttaaaactgaattttctttctccagataagcttaggatgaaacaaacacccccatctcctctctaacccaatcacttagagcatcatttctgaagatatatttgtaaagttttcttggctataaaatattatatacttgatttaattataagatcaaatattcattagtatgttattattaaacacatatattttagaaaattatttttatacatgtacctaaagcatttacttgtaacagttaagataaaag

SEQ ID NO: 4836 - DNA, 698 bp, Macaca Fascicularis
  misc_feature (1)...(698): n = A,T,C or G
gnnnnnnnnnnncaggggccgctccaccccaccgtgcggctggtggcttcgggaggagatacgaaaacctcaagttaggaggttcgcgccacgccttgccttgcctcaaagtnnnnnnnnnnnnnnnagcgtggtccaccctacactcaggtttctcagggcaccgctccatgcctggcgctgagcacgacgtggtggattcacacccgagcccnnnnnnnnnnnnnnnnaacggcgctgggcacaccccgcccctcccccagctcaggcttctggatggaatgtggagatgggttccagccacactcccaaccttagccagtgagactctcctccaaagacagnnnnnnnnnnnnnnnnnggcagggtccaggagccgacctgggtctcacacaggtgtcccagaccagcgtggggatgtccaggtagcggnnnnnnnnnnnnnnnnnnnnnnnnnnnnnnnnnnnnnnnnnnnnnnnnnnnnnnnnnnnnnnnnnnnnnnnnnnnnnnnnnnnnnnnnnnnnnnnnnnnnnnnnnnnnnnnnnnnnnnntgaccctccttgatttgttaaatatttaaggcactgannnnnnnnnnnnngtgttgccaacagnnnnnnnnnnnnnnnnnnnnnnnnnnnnnnnnnnnnnnnnnnnnnnnnnnnnnncatcacaggggagacttttctattccgtca

SEQ ID NO: 4837 - DNA, 703 bp, Macaca Fascicularis
  misc_feature (1)...(703): n = A,T,C or G
gaaangnctgaaaactgacacccgcagcttcgaggttggtgagaaatccacagtgcggggagcagaagcaagtgcagtgagaaagaggagtcaggagggagaagggagaggaggatgggagaacacaggcacgccagcacccccaggaggagcgccccatgagggggtcattttaacataaacgtgtacactgggatgactgaagctgaactcaagaactagtttctcgagatcaccgtttctgatctcattccagatccccgtttctttcttctgttacctcctgcacttggctccagggtgctgtccgtgnnnnnnnnnnnnnnnnnnnnnnnnnnnnnnnnntctcccattgagatgtaatggaaggacatggtcacatccttgtcattctcccacttttctttcatctttctggctccaggatgaaccgttgtccacattctgttctctgagtcaaagaggaggaagacctgtccgtcgaaaccgaactgccaagatccactgctgtgtccttcagctttctgctcacaagacatccggacctgcagggtgaggggttctgcccccatcagagagagatcagctctggtcttgacacatgttgagcccccatcctgtctgccttacaatttcctggtcnnnnnnnnnnnnnnnnnnnnnnnncttgcctctagacctcttaaggggtgataggaccttc

SEQ ID NO: 4838 - DNA, 1014 bp, Macaca Fascicularis
tattttggggaacaggacagggcaatgataaagaaagatgagtggtttttagaatggtgctttgattatggaaaatcgaatataatatccaatggatgatttaagttcttcaaagtctaaaacattttaaacaaaagtacatttcttttatttgagggaagattagtttaaatgatatatcagctgtgtgtgacttcctctaaaacagtaacctaacagcctttaactgctccagaatttactagcttagacaaaaattttcctactgtaagcaatttgtgatttagagtagataagtagatgttatttcataaagtaattatattatctcactacacagccagattggcatgctactacattaatttaggaatcaaatggctatagaagatagtgagacttgaataccactaattaaatgggaataacaggacacattaaaacagcttttactatatgaatgtattattttatagattttgacaactcaaggaaattatattttttccagctcctagggaggatactatgaggaatatcatttatgttgagattgggcaaacaaattccagctttataatgttccctaataacattccttttccttgaagaaaaagcattacaaaaaaataataaaagcactacaagtaatacttttagtttttaggtaatgtcattgtgttatcattagaaatctttagctactattatgttttaatctgtatgcatatctatttaagtatcattccagagaatgtcttgaactatattactaatttccatttattttttcttgctctttaatgaaaggtatagtaacaatgaaagttatgaccctgaattagccaggcatggtggtatgtgcctgtagtccttgctactcagaaaggcgaggtgggaagattgcttgagcccaggaggtaaaggctgaagtaagctataatcacactactgcactccagtttgggcaacagagtgagaccctgtctcaaaaaaaaaaaaaaaaaaaaaaaa

SEQ ID NO: 4839 - DNA, 2025 bp, Macaca Fascicularis
  misc_feature (1)...(2025): n = A,T,C or G
tgtgacgatcatgtgctgccttcctgtggtagagtgttccacttgcccatcgttggaggcgaggagactgtgctactgaggcacgtgtgccggcccccacccagggaaggacaccgtgtacgtcttctaaccctcctcctcttaccccgcctgtaggccccgcaggatcccgatggcgagattacggcgccctggccatcatcatggcaggtatcgcatttggctttcaccagctctacaaggtgagtcacccccagtggctgtgggtgctgtgcctctgccaccctgtggcattcagtgccctttcactggctcccctgcatggaggcactgccgtgctctgccctggagcgtgttggcagcgagaggctgtagtagaagtcggggttcacggctggatccaggccctgccctgctgcggggcttggcaggctctgcccatcttttctccagtactcagcatgtaccacccggatctctacttgcaggggcatcgtgaggtctgtcccttgccagcccgtgttgggcacttagagtagcgcctgcacagggaagccgtgcgagcggttttgagacacagaataacataatggaaaagatcataaatgctgggccagctgctttgctgagccctggctctgcccctcaggagcttggtgatcacaggctctggtctgtaaaatggggataacagtcccaacctcacgaggttgttgtgaagtcccgaagagtcagtctcccttatagagggctcagagccatgcccggcacatggaagagctttatacaccattgttctgccatagcatttaagagcggcggtgggaaccttagtgtcatcagatgtatgggagctgttctttttgctctgttgtgttggcatctatagaaatctaggatttcccaggcttctcaggtcaactctcaggatcccaggctcattgcttgcaacagaactgcaggcatgaggtaaacattgactcccttgtgaaggcccaacttggacatgaagcaaatgagtctagtttctagaaaatgcagggccagggtaggtggccagtccagatcttgggatcctggagagaagcctcttttctttcgaggctgccagctcctccaccccgatcggtgattttttttttttttttgnnnnnnnnnnnnnnnnnnnnnnnnnnnnnnnnnnnnnnnnnnnnnnnnnnnnnnnnnnnnnnnnnnnnnnnnnnnnnnnnnnnnnnnnnnnnnnnnnnnnnnnnnnnnnnnnnnnnnnnnnnnnnnnnnnnnnnnnnnnnnnnnnnnnnnnnnnnnnnnnnnnnnnnnnnnnnnnnnnnntgtgttggctaggccagtctcaaactcatgacctcaggtgatccatccacctcagcctcccagagtgctgagattgcaggctgagccaccgtgcctggccagtgatttttttttttttaaacaacctgaatgagcacccagactcgccataaggcacatgaaacatgttcagccgtggtactctgggattcttcatttttgatgcagtacaaaagctaatgacagttatagcagaatatttttcttaagtgtagcatgtattcctggagctggacatttccatgttagaaattgagaaacaagcgctgggcgcggtggctcacgcctgtgatcccagcactttgggaggctgaggctgaggatcctgagctgatcacgaggtcagnnnnnnnnnnnnnnnnnnnnnnnnnnnnnnnnnnnnnnnnnnnnnnnnnnnnnnnnnnnnnnnnnnnnnnnnnnnnnnnnnnnnnnnnnnnnnnnnnnnnnnnnnnnnnnnnnnnnnnnnnnnnnnnnnnnnnnnnnnnnnnnnnnnnnnnnnnnnnnnnnnnnnnnnnnnnnnnnnnnnnnnnnnnnnnnnnnnnnnnnnnnnnnnncaacccagatgtttgagattagcctggccaacgtggtgaatctctgtttctaccaaagacaaataaagtaaaacaaaacaaaaaaaaaaaaaaaaaaaaaaaa

SEQ ID NO: 4840 - DNA, 716 bp, Macaca Fascicularis
  misc_feature (1)...(716): n = A,T,C or G
tctttattgcaaaagnannntannnaacacaatgnnnctatgcacatgatgtgaccagatcatcttgaaaatattcctctttagtaggaactctttgtttgtaactcttggtgtggtcagaatataatacttccataattacttataattctttccagttactggggctatgcatacaacttttttgatgaaatttatgttattatcctgctcaaagtaccattatggtttccatatggtaattacattggaaagttctgcaataagattctagttctctcttttctttaagcttatggttgaaggttaactttgtttatgcagattaccaaattactgctgtgatgtagtatgataaagtcagcttcttggatacagacatgccnnnnnnnnnnnnnnnnnnnaaatgcaaattgctaaattccaaacagaaccagtgactttgttggtacatatttactaaattgaccactttgattcttgcttgtttgtctcagttatagggagttttgtacaaggtgccnnnnnnnnnnnnnnnnnnnnnnnntttctgttgagagacatctaaagtgtattaacagtgcatgcttttactttgtaaatgtggtgccaaatccctgtttgccatcgtttttactgtagcaatgttaactgtagtaatccttagtcagtatgttctnnnnnnnnnnnnnnnnnntttagggacttttttccac

SEQ ID NO: 4841 - DNA, 649 bp, Macaca Fascicularis
  misc_feature (1)...(649): n = A,T,C or G
annnnnnnnnnnnnnnngatatgggcctcggcccgaagagtatgagttcctcactccannnnnnnnnnnnnnnnnnnnnnnnnnnnnnnnnnnnnnnnnnnnnnnacaagtcttnnntcanagaggatgacaagcannnnnnnnnnnnnnnnnnnnnnnnnnnnnnnnnnnnnnnnnnnnnnnnnnnnnnnnnnnnnnnnnnnnnnnnnnnccctacccttgccannnnnnnnnnnnnnnnnnnnnnnnnnnnnnnnnnnnnnnnnnnnnnnngtccacagnnnnnnnnnnnnnnnatacnnnnnnnnnnnnnnnnnnnnnnnnnnnnnnnnnnnnnnnnnnnnnnnnnnnnnnnnnnnnnnnnnnnnnnnnnnnnnnnnnnnnnnnnnnnnctccnnnnnnnnnnnnnnnnnnnnnnnnnnnnattccacatctccatctcaatgcacaaccatttaatattgccctctcttaccccattcgagnnnnnnnnnnnnnnnnnnnnnnnnnnnnnnnnnnnnnnnnnnnnnnnnnnnnnnnnnnnnnnnnnnnnnnnnnnnnnnnnnnnnnnnnnnnnnnnnnnnnnnnnnnnnnnnnnnnnnnnnnnnnnnnnnnnnnnnnnnnnnnnnnnnnnnnnnntgagagacac

SEQ ID NO: 4842 - DNA, 1820 bp, Macaca Fascicularis
tattaaacacttagctgtgggcctgaaagaaatgtgcagttctgttagaaaaaaggtggagaaggtagtatcactattcctctttcatggatgggcaaacaggttcaggaattttccagaactgaggttttctatcttataattgggtgttctttgtctcacaacgtgcacttcgtccttctgtatggatttctttgctgaggctgactgtgaatttcggctctcacatgctaagtacacattaatttctcttatcctttgttcccacatagtgtacgagtgattttgagagggtcctgtatggcatggtcctcaggtacttggcaaaatgggtccactctctcccaggtagccctggctctaggcccttttccatgtcctggccttccccagcagtccctgggagccctctgctgaccaaaactccacagtgaagcaccacccgaatggtgacctgttaaaggttcccagtttgggacatgttattcctcttctgtagaaactgcatcactttcagatagactctcaggcaaaggcacagaaaattatgattagattaatgttctttcagaggtttcctatctctgaggtcatctgagccagtagttttcaaaatgagttgcgggcttcatatcctcaaatgttgcatttaaattctagttaaaaatagtttcaccactgtatttttccattctaagacagattttttcccatgctttacttactctggagttgcctgcatcttacaattgatccactgcatttcatatgatgagatctcttctgttcttctaaaaaattatcaatagttttgtgatggatattgatttaatagcatctcggaatgtaaaacatccaggttacaatcattaactcttctacaatatttacatgcaagaagacaatatttctttctttttataagccaaattatatctagcagaaactcccatgtgtcgagatgtggaagattccaattcgaggaagttcctcgtcatattctgtacccgacactggaggctgggatggtggcacttcatgctcctcaccttcctgtctcactacttttcctgtgactgccaactgctggccctttactctgaagggggtgagaggaccactgccctggcagtggggaggggatgctcctctcagcacaagaagtgccagaaaggcagccgtcacatgccggaaccttggccacaccaaccacatctggggaactgcatgtgactagggcctagcccattaggaatgctactgttctgggaacatctccccggcatcctcattttgttttcccattggctagtctagattaacttaacccttagatgattctagatttccatagaaaatacctaggtgagagttatccaggcaaattctcttttcctcctttaaacccctaaaggctatattgtgtgtgtgtgtgtgtgtgtgtgtgtgtgtgtgtgtgtatgtgtatgtgttacagaaagacctaatctgcaaaagcacagcttggccttcaggaaatagatgggaaaagggctgctttattatttcctggtgcctccaaagcacacacaaagaggatataagttagtactttctctaataattccatctgtaacattgagcctttaaaagttttaaaaatacatttaaataccatgcccatacaagtgcatcataaaaggtagcattaatgaaacagttaaatgtctcaacctgtcttcttgtaagccatgaaataaatttctcccattatctctatgtatatgtttaccatttgtgcaaatataccactgaatagaaaaaaaaaaaaaaaaaaaaaa

SEQ ID NO: 4843 - DNA, 2068 bp, Macaca Fascicularis
acatccaagatggcgtccctaggagctgggagcgggtgaccggcggcggggaagcggcctgggttggccctcagattgcggggtctgggggcatctcgccaggcaaccccttggcccgcctacaaggccttccccctgccagagcaatggccgctgacaacagcaagcagttttggaagaggagtgctaagctgccggggagcatccagcctgtatatggagcacagcatcctcctcttgaccctcggctcaccaaaaatttcattaaagaacgatcaaaagtcggcacagttcctctgaagaataagaaggcctccagttttcatgagtttgcacggaataccagtgatgcttgggacattggcgatgatgaggaagaggacttttcctcaccttctttccaaactctgaactcaaaagttgctttggcaactgcagcccaagttctagaaaaccacagcaagctgagggtaaaaccagaacggtcccagtcaacgacatcggatgttcctgccaactacaaggtcataaagtccagcagtgatgcccagctgtccagaaactctagtgatacatgcctgaggaacccactccacaaacagcagtcactccctctccggcccatcatccccctcgttgcccggatctcggatcagaacgcctctggggcccccccaatgactgtccgggagaaaacccgcctagaaaaattccgtcagcttctctccagccacaacactgacttagatgaactgaggaagtgtagctggccaggggttcccagggaggttcgacctgtaacctggagactcctgtcgggctatctcccagcaaacactgagaggagaaagttgaccctgcagcggaagcgggaggaatattttggcttcattgaacagtattatgactctcgaaatgaggaacatcaccaggatacctacagacagattcacattgacattccaaggacgaatcctctcattccgttgttccagcaaccacttgtacaggagatctttgaaagaattctatttatttgggccatccgccaccctgccagtgggtatgtccagggaattaatgacctggtcactccattctttgtcgtcttcctctcagaatatgtggaagaggatgtggagaactttgatgtgaccaacttgtcccaagacatgctgcgaagcattgaggctgacagcttttggtgcatgagcaagctgttggatggaatccaggataactacacctttgcacaaccagggatccagaagaaggtgaaggcactggaagagcttgtcagccggattgatgagcaggtacataatcacttcaggaggtacgaggtagaatacctgcagtttgccttccgctggatgaacaacctgcttatgcgggagcttcctcttcgctgcaccatccgcctgtgggacacatatcagtctgaaccagaagggttctcccactttcatctctatgtgtgtgcagccttcttgatcaagtggaggaaagagatcttggatgaggaggactttcagggtctcctcatgctgctgcagaacctacctacaatacactggggcaacgaagagattgggctgcttctcgccgaggcatacagactcaagtacatgtttgccgatgccccgaatcactaccgccgataggtgctgtctcctccggggacccagactgccctcatctctgatggcagtctgatcactgtggccactgtgcgagccgtggaccccggccaggaaccactcctgttgtacaaagctcacacccgccgcccaggtcttaactttctggcgtccaccactccatgtctctggatgtgtcacttggaccactgtcagtattccatgccacgtggatgggcccagttctgggagaggacagaaaaggtggtacagggttgtctgcccctttaaaagaaactggacaaagaaggggaaggctcagggtctcaactcacattgtccctacagggacaggccccaactgaaaactgttgctttttttgtgaacatagtttgatttgatcacaggtcaaaaaaaaaaaaaaaaa

SEQ ID NO: 4844 - DNA, 730 bp, Macaca Fascicularis
  misc_feature (1)...(730): n = A,T,C or G
catacaatagtattgttgcatacatacaactngggacatatacaagaatgtttatnntagcaccatttacaatagcaaaatcttgaaaccataatgcccaccaacaaaatgaataaattatgatatagttacataatgaaatattcagtcaaaattaatgaactacatcaatattcagtactatggatggatgactcccagtaataaaagtgaaaaaagttacatcgtaaaagattacaaatagcataccatttttgtaatttttttaaacacgaaaaagtgtttcaggattgtaagtacaagaagaggatgaacatgggatttcaaatgatggttatttggggtgaatgaaaatgtaccaatttcattgcagaaatattaatgcatttgattattaatatatgtattaatgtatttgaatatgtattagacacccactgagcatgtaatgtattatacgtattgcctaccaaactctaaaatattactaatttcaaagtacatctggatacagtggtttcagttaagagcttgtgaatctgtagaggcctggaatgaaaggcagcaatggagatatattttgaagataaaatggaggagacttgcagataaacttgatttgggggtgaagaagagggaagaatcgaggatgactactagattagcagggctaaaggtagtgtcctttcttgaaatggggaatgggaatgtggactacatagatctggaa

SEQ ID NO: 4845 - DNA, 439 bp, Macaca Fascicularis
cctggtggctagacaggttctctcctttccagtcggaggcctctgctgcaaacatgctccgccacatcctcggtctggccaagaagcatccgagcttgatccccctctttgtatttcttggaactggagctactggagcaacactgtatctcttgcgtctggccttgttcagtccagatgtttgttgggacagaaataacccagagccctggaacaaactgggtcccaatgatcaatacaagttctactcagtgaatgtggattacgacaaactgaagaaggaacgtccagatttctaaatgaaatgtttcactataacgctgctttagaatgaaggtcttccagaagccacatccgcacaattttccacttaaccaggaaatatttctcctctaaatgcatgaaatcatgttggagatctctattgtaatctctatgg

SEQ ID NO: 4846 - DNA, 2585 bp, Macaca Fascicularis
  misc_feature (1)...(2585): n = A,T,C or G
aaatcagttcaagtatatttcacttgaattgcaagataatttttaaaataagttcatcttacactcattttcaaaaaaatgtcttgactttctttaggtagatgacaaggtgaatttccatttcattctgtttaacaacgtggatggccacctctatgaactgggtatgtttcactccgtttttggaactcaatgtagtttcatgcattctttcagactgaatctcttgatatagtgttgtgtgactttatggcacttggcatatcattgtttataaagccacagtaataaagtattctcatgagggcacttaaccccttattatccccagagcaacttcctgaggcaactgacctaatcagtggctttaatacctaatcattggctttagtcagaaaccattgaagagcgtagatcagatcagtgccaggtgaaggtatatatgatcagactttcttttcccatctcctcctatagcataccctagtatcatcctttctgggcaaagaataaatctgaaaaaggatcagtgcctgaatatgaccttacttgtctaaaaagaatctggatatgttggaataatttctattagctagtttatggcatcaagaaagacgacctaccttgtaagattcattccttttgaatgaattaatggagaaagacttgtaactgtgttgtctcaagccgagataccacctacaggcttacaaaggcaagggaatagtgaaggcaatctagtcattggaggacagatgaaatctcaggtgtctcctcttcttgcctccatctttcctataccccagacactgcatctgacttttgctctgtggccctttcctagagttggggcacaggcccctccattagggtagctgatttgagcttgtacgatcttgtagactagaattgcctgggatggatgcctagggacacttgaacctcatttgcagcctgttgcttcataaccaggcttccttttgtgggtttggcagtggtttttggaagaatctaaaacttccatctgggctaggtaagcatggtagccagaaaacatgcagagaaaatcgacgtgtctggcttcttttgttacagatggacgaatgccttttccggtgaaccatggcgccagttcagagggcaccctgctgcaggtcatctttggaatgcatctcttcctaatgggccccacaattctttggccaaattttctattttaaagtgctaacactcttccaggacagccagcatcaattgcctgggttaatagcagtctttagggctgcaagatcatcttagtaattctgtctaccttattttattgtgagtggttttaaacagggcttcagagacaccctgagtaatctgtttcatgtgctgtctttagtccacagttagaattagcctgaaagctgttgctttgcttcctggtgggattaaggtgaccattgtcctctcgtcagattacatcatggttaaagactcacggaacagtagactttcataatccctctaagacgactggatttgggtcagtcttggaggtagtgtattataggttctagttaggtggttaaatttaggagtttttccttcccacatggtctactgttacaagaacaaaagaagcagatttaaaatgcacctgacaaaaactcttaatatccaggatcactttgtaaccatcctggacagaaaagtgattctggacaaaggttggtaggtgactctaggccttttcactaaaaaataagtgtctagagttgaatcagtttactattataaaggaaaaatgcttaattatgatataatacaaaatactgtttttagcttgctgtgctgaagaaaaatacacaaaatgctgttaaaatataactatacttcatttgagtagtagtagtatcaaatctttgaaaaacttgctgtgtgcagaccaggactcagcaagcattttctataaagagccaaacaaaatattttaggctttgtatggcatatggctccgttgcaagtattcagttctgctgttacaactcagcagcctatagaccctctaaatgaatgtatgtagctgttttccaccaccacaggctgggttaggcccacatgctgcagtttactgtacttacgtgctcttctaggtgatgtatgtcttttatagaaatcctttaatgacacaatgaggtaggtattatccccatttcagagctgagaaaactcagagtttaaggcctgaggtcagtgacttacatggcaaactatggttcaaacctatatagtctggccaggcatgnnnnnnnnnnnnnnnnnnnnnnnnnnnnnnnnnnnnnnnnnnnnnnnnnnnnnnnnnnnnnnnnnnnnnnnnnnnnnnnnnnnnnnnnnnnnnnnnnnnnnnnnnnnnnnnnnnnnnnnnnnnnnnnnnnnnnnnnnnnnnnnnnnnnnnnnnnnnnnnnnnnnnnnnnnnnnnnnnnnnnnnnnnnnnnnnnnnnnnnnnnnnnnnnnnnnnnnnnnnnnnnnnnnnnnnnnnnnnnnnnnnnnnnnnnnnnnnnnnnnnnnnnnnnnnnnnnnnnnnaaaaaaaaaaaaa

SEQ ID NO: 4847 - DNA, 751 bp, Macaca Fascicularis
  misc_feature (1)...(751): n = A,T,C or G
cacgctctnnnnnnnnnnnnnnnnnnnttcctccntnnnnaagactgagaacacacattttaacatgttaggaannnnnnnnnnnnnnnaaaatgactgatcccaccaccnnnnnnnnntgtacactccaggctagcagacaaggcccttttcggtgggcctgcttctgtgggttcacagaaaccaaattactgtgggttgcaaagaattagcaggtcatttacaaagcagacatcccttcacccagactgtggttttgcatgctcaggttctcagtctatgagctttggtgcaggatcattttggcttctggaaaaaacatagcttattttaaatttnnnnnnnnnnnnnnnnncannnnnnnnnnnnnnnnnnnnnnnnnnnnnnnnnnnnnncgaggaaggaacagaatgtggtttggggctcagggtggccttcccactgggagggaaggcgggagggaacccttgccctgggttttgacacagcnnnnnnnnnnnnnnnctcctctcatctgcatttctcagaaatgccctccctgcccagtggtgactttccctcgtcactcctatggagttctacccagagcnnnnnnnnnnnnnnnactgtgaagtctactcctctgtaaagacagtttaaagaaagtcagcttctgaaatgtagcaatgctagcccttgccagaatcctgtaagaagtagcnnnnnnnnnnnnnnnnnnggtttatcatgtttgattttncacgaaaaaaaa

SEQ ID NO: 4848 - DNA, 135 bp, Macaca Fascicularis
aagtatgcatagcatcagtgtgttgtcagaggtgattacaacttagtgaactcccattcttggaaatgggatcataataacatggttatttgaaaatagccatctgtagcaaagaatgcaaatataatatattca

SEQ ID NO: 4849 - DNA, 2124 bp, Macaca Fascicularis
ctttatttgtaacccttttttgagttatttgcttttgtgctttctgtcatttgccctctcttattctctctcccactccctttctccttcttttctccttttcttctctccttccctctgtctcatcgcttctctcttcattttaaaatccaagtactcttttctctgagtgtccctttgctatcgcaatgttttcctgtttcatgaatgtagtatcttctctaaaaacaatattctttttttaaaatttttttgtataacttactttttttcctctttgttttagtctctaacttacatgttaaaagtttccttctgatattcgataggcctcagttgtctaaacatgactgaaaggaaggctgatgggaaattctgagagcatacaggggacttgtctgagtttcattttagggtgatggtgagccatttgtctaaggaatctttgaagtcagtatttatagttatttttcactggattcagcagattctccatgtcaagaactgtgaagaacctaagattatactgtatatatcattgaaaattcttctccatcatttctcatgtttctgagcagagagaaacattttatgagcagagacactgaaaaccttctgtttacagactatctttttaaggatacgtgtgcaatgaacagctttggaagttatagacagtgtctctgtctagaacatacagtatatttatttactttccagtataatggacagtgcaaaagttagataggttttttttatagctacccttttaaaagatagaggtttccaaagcttagggttcctcaattgtgaccaaaaacccactgtatgcgtagtatccacttggccggcctccatgtcactctcatgggacttgagggagtgaatacaagggaaactaatatgaacaagaagctcatgctgcttgctatgctgtgcataatcaaaccttttgtctttgacccaagagtcttgtgccttctgccatcatctatgaaagtgtggcaggctagcttgttaggttgcaagtttggtaaaaatctcagattttacagttcttgaaatgccatagaagactcttgtctgtctccttcctagagagtaagagtctagctgacagccttctaggagcccagtagagaacaattttggaatctctgcacttagtattcaatatgcctatgctcatatgttcatgtgctctaggttttgccaggtgatttttaggtcggaggactttgattctcttcagagaataaaattccagacttctactagggtgaaggaggcgacagcgacctagaggcatgtagtaggggaaagaacacaggaatcagttttgttctgtgctgataggttcccttctcaagaaagcattgcctggcttttctgtttaaaattgctatctttttcatccctctttcctttctttatttttctccgtagcacttactacttataactttcaaatgtattatatcatttacttactatatttattctctatcacaccactttgttaggatataagctctatgaggtcggagatttttatctctttcattttactgtgtatcctgaacacctagagaatacctgatacataatgagtattcactaaatatttgttgattggatgagtgaatgaattactaggaagttgcacatctgttgcctgttgcttctggcttgagaataaaattaagatgaagtttattatcggtaagtcactggtatttcttttttaaagcttaaaatattgatgtcagttgaggatataggcaactttcactgaagtcattccacagcagtttagaattactgattttgtatacaacttcttatctgacatgagaattcctttagagcgttcctaaaggcagccttcttttttccgtctgatcatttttagtattgttggtagaaccgatgggtttgctgaagaattggttgtgaggcatggaaaagaagaatgaataaagatcacagatctagtaagtggcagaatcaagactaaaacctagccagtctggctcaaaatctatgttcctaaccactgcactgggctgtttcttgatgagaaaaaaacagcaccccccccccgcaaaaaaaaaaaaaaaaaaa

SEQ ID NO: 4850 - DNA, 214 bp, Macaca Fascicularis
tttttaacatcacctacaagagtggactttaggtccatgctgtccacagcagcagccaccagccatgtgtggctactgagatgtagccaaaccaagtgtgccgtggctctgaaacatcagacatcaagcatggaagaggacaacaactttaaataccttaatttttatattgattatgtgttttaataataatttagatatattgggttcaaaa

SEQ ID NO: 4851 - DNA, 696 bp, Macaca Fascicularis
  misc_feature (1)...(696): n = A,T,C or G
acaatgagccctgcaaagcnnatatcctgtgtcaggagacacaggatacctaccttcaggnagcttattannngactatggataannnnnnnnnnnnngtagtttttagaagatataaaaaaagataaaggtataattaaggggaagtggatggaggacacagaatactaggaaatggttttgtaatgctccatttcgcatatagcaaacctcattcaacatacagacctgctccctcttccctaggtccaaagaccttaaaaaacctggagctagaaagcagtagactggaggcttctacagactgtaggattcaaggtgatatnnnnnnnnnnnnnnnnnnnnnnnnnnnnnnnnnnnnnnnnnnnnnngaccctagattggttgccagggcttgtgtgtgaatcaaccctaggaggaaaaacctaccacgaaaccagaggagcaggcctaacagtactttgagcttctagaagaagtaagcgggaaaggaagagaaagagtagaaagttggtgcatcttctcctccccaagagcctgagtataagaagttggattttaagggtgggggagctgggatggggaaaggtaatataattaaaaccaccacaaaacaacctaannnnnnnnnnnnnnnnnnnnnnnnnnnnnnnnnnnnngatgagacctggcagtgtctctacatacttcctcagg

SEQ ID NO: 4852 - DNA, 4682 bp, Macaca Fascicularis
tgcccgccgccgccctcgccgcccgcatggcgctccggggcttctgcagcgcagatggctccgacccgctctgggactggaatgtcacgtggtataccagcaaccctgacttcaccaagtgctttcagaacacggtcctcgtgtgggtgccttgtttttacctctgggcctgtttccccttctacttcctctatctctcccgacatgaccggggctacattcagatgacacttctcaacaaaaccaaaactgccttgggatttttgctgtggatcgtctgctgggcagacctcttctactctttctgggaaagaagtcggggcatattcctggccccagtgtttctggtcagcccaactctcttgggcatcaccatgctgcttgctacctttttaattcagctggagaggaggaagggagttcagtcctcagggatcatgctcactttctggctggtagccctactgtgtgccctagccatcctgagatcgaaaattatgactgccttaaaagaggacgtccaggtggacctgtttcgtgacatgactttctacgtctacttttccctcgtactcattcagctcgtcttgtcctgtttctcagatcgttcacccctgttctcggaaaccatccacgaccctaatccttgcccggagtccagcgcctccttcctgtccaggatcaccttctggtggatcacagggttgattgtccggggctaccgccagcccctggagggcagtgacctctggtccttaaacaaggaggacacgtcggaacaagtcgtgcctgttttggtaaagaactggaagaaggaatgcgccaagactaggaagcagccagtgaaggtcgtgtactcctccaaggatcctgcccagccgaaagacagttccaaggtggatgcgaatgaggaggtggaggctttgattgtcaagtccccacagaaggagtggaacccctccctgtttaaggtgttatacaagacctttgggccctacttcctcatgagcttcttttttaaggccatccacgatctgatgatgttttccgggccggagatcttaaagttgctcatcaacttcgtgaatgacacaaaggccccagactggcagggctacttctacaccgcgctgctgttcgtcgctgcctgcctgcagaccctggtgctgcaccagtacttccacatctgcttcgtcagcggcatgaggatcaagaccgctgtcattggggctgtctatcggaaggccctggtgatcaccaatgcagccagaaaatcctccacggtcggggagatcgtcaacctcatgtctgtggacgcccagaggttcatggacttggccacatacattaacatgatctggtcagcccccctgcaagtcatccttgctctctacctcctgtggcggaacctgggccctcccatcctggctggagtggccgtgatggtcctcatggtgcccgtcaatgctgtgatggcgatgaagaccaagacgtatcaggtggcccacatgaagagcaaagacaatcggatcaagctgatgaatgaaattctcaatgggatcaaggtgctaaagctttatgcctgggagctggcgttcaaggacaaggtgctggccatcaggcaggaggagctgaaggtgctgaagaagtctgcctacctggcagccgtgggcaccttcacctgggtctgcacacccttcctggtggccctgtgcacatttgccgtctacgtgaccattgacaagaacaacgtcctggatgcccagaaagccttcgtgtctttggccttgttcaacatcctccggtttcccctgaacattctccccatggtcatcagcagcatcgtgcaggcgagtgtctccctcaaacgcctgaggatctttctttcccatgaggaactggaacctgacagcatcgagcgacggcctgtcaaagacggcggggatacgaacagcatcaccgtgaggaacgccacattcacctgggccaggagcgaccctcccacgctgaatggcatcaccttctccatcccggaaggtgccttggtggccgtggtgggccaggtgggctgtggaaagtcgtcgctgctctcagctctcttggcggagatggacaaagtggaggggcacgtggctatcaagggctcggtggcctatgtgccacagcaggcctggattcagaatgattctctccaagaaaacatcctttttggatgtcagctggaggaaccgtattacaggtccgtgatacaggcctgtgccctcctcccagacctggaaatcctgcccagcggggatcggacagagattggcgagaagggcgtgaacctgtctgggggccagaagcaacgcgtgagcctggcccgggccgtgtactgcaacgctgacatttacctcttcgatgatcccctctcagcagtggatgcccacgtgggaaaacatatctttgaaaatgtgattggccccaaggggatgctgaagaacaagacgcggatcttggtcacgcacagcatgagctacttgccgcaggtggacgtcatcatcgtcatgagcggcggcaagatctctgagatgggctcctaccaggagctgctggcccgagacggcgccttcgctgagttcctgcgtacctatgccagtgcagagcaggagcaggacccagaggacaacggggtcacgggcgtcagcggtccagggaaggaagcaaagcaaatggagaatggcatgctggtgacagacagtgcagggaagcaactgcagagacagctcagcagctcctcctcctacagcggggacgtcagcaggcaacacaacagcaccgcagaactgcagaaagatggggccaagaaggaggagacgtggaagctaatggaggctgacaaggcgcagacagggcaggtcaaactttccgtgtactgggactacatgaaggccatcggactcttcatctcctttctgagcatcttccttttcatatgtaaccatgtggccgcgctggcttccaactattggctcagcctctggactgatgaccccatagtcaacgggacccaggagcacacgaaggtccggctgagcgtctatggagccctgggcatttcgcaagggattgccgtgtttggttactccatggctgtgtccatcgggggcatcttggcttcccgctgtctgcacgtggacctgctgcacagcatcctgcggtcacccatgagcttctttgagcggacccccagtgggaacctggtgaaccgcttctccaaggagctggacacggtggactccatgatcccggaggtcatcaagatgttcatgggctccctgttcaacgtcatcggtgcctgcatcgttatcctgctggccacgcccatcgccgcgatcatcatcccgccccttggcctcatctacttctttgtccagaggttctacgtggcctcctcccggcagctgaagcgcctcgagtccgtcagccgctccccagtctattcccatttcaacgagaccttgctgggggtcagcgtcattcgagccttcgaggagcaggagcgcttcattcaccagagtgacctgaaggtggatgagaaccagaaggcctattaccctagcatcgtggccaacaggtggctggccgtgcggttggagtgtgtgggcaactgcatcgttctgtttgctgccctgttcgcggtgatctccaggcacagccttagcgctggcttggtgggcctctcagtgtcttactcgttgcaggtcaccacgtacttgaactggctggttcggatgtcatctgagatggaaaccaacatcgtggccgtggagagactcaaggagtattcagagaccgagaaggaggcaccttggcaaatccaggagacagctccgcccagcaactggccccaggtgggccgagtggaattccggaactactgcctgcggtaccgagaggacctggacttcgttctcaggcacatcaatgtcaccatcaatgggggagaaaaggtcggcatcgtgggacggacgggagctgggaagtcatccctgacgctgggcttatttcggatcaacgagtctgccgaaggagagatcatcatcgatggcatcaacatcgccaggatcggcctgcacgacctccgctttaagatcaccatcatcccccaggaccctgtgttgttttcgggttccctccgcatgaacctggacccgttcagccagtattcggacgaagaagtctggacgtccctggagctggcccacctgaaggggttcgtgtcagcccttcccgacaagctggaccacgagtgtgcagaaggcggggagaacctcagtgttgggcagcgccagcttgtgtgcctggcccgggccctgctgaggaagacgaagatccttgtgttggatgaggccacagcagctgtggacctggaaacggacgacctcatccagtccaccatccggacacagtttgaggactgtaccgttctcaccatcgcccaccggctcaacaccatcatggactacacaagggtgatcgtcttggacaaaggagagatccaggagtacggcgccccgtcggacctcctgcagcagagaggactcttctacaacatggccagagacgccggcctggtgtgagccgcacagctggcctatctggtcagaactgcagggcctacatgcccgcgcccaggcagg

SEQ ID NO: 4853 - DNA, 867 bp, Macaca Fascicularis
  misc_feature (1)...(867): n = A,T,C or G
tgtgttttgggtttctagaagcaaatgaaggttaaagcataaaaagtgaatccaaaacaaaagctctatcaagtgtactcagaaggcatttgctaatggtatttattctagcaactacaacattgttacagaagcacaattttaataggcttatctgctaagatgctttactaagcagctctcacctatacagagttatgaatcatctttggtgctcacggaacctgtagaagtaagagacatcatcatacagagaatgtagttaagttgaagcttggaagagatcacatgaaaaaaatctagctcttgccttatctcttcctaagttaagcataaattagcagtctgcaatagccacccgtaagaccaggcacacatggtgaatggtttccagtggagtttttcttctaaagagacagtaaactggtcgcaactcattccttgagaaacgattcctattaaatacccagaaatagctatcagataaacagccaacgctattacttgctttcatcacatctctgtatcttcggaattggaagaagaatgtgaggctgtactgtgggcccgttcttttgccatgtgcgagtcatgccctgactccaccactgttccttctttagaatctggaggggtgtcaagtggatcagccagggaggaaacaatagggattttcttagcttggaaataatcataggccttctttccacagactagaagtgtgacattcttcccactgctctggatnnnnnnnnnnnnnnnnnnnnnnnnnnnnnnnnnnnnattcaccccattcacttcaatgatgatatcttcatcctctagcccagccaagtcagcagggccgcccttctgtacctctttgat

SEQ ID NO: 4854 - DNA, 113 bp, Macaca Fascicularis
tgcaacagtaatttatattttggacaaatacagcatgggggtcattgtcgtcccatcttttcttcatctttgtgtcaacaacatggcatggcatcccctgcccccaccgccag

SEQ ID NO: 4855 - DNA, 771 bp, Macaca Fascicularis
  misc_feature (1)...(771): n = A,T,C or G
agagtaaacacagtgctgnctcggctgncnnnnaggtgctcaagcacaggtttcaagtctgggttctggtgtccactcaccccacccgcccccaaaatcagacaaatgctactttgtctaacctgctgtggnnnctgannnnnnnnctattnnnnnnnnnnnnnnnnnnnnnnnnnnnnnnnnnnnnnnactaggtcctgttcctctttctccccgactccaccccaactccnnnnnnnnagagagttaatatatttgttttatttatttgctttttgtgttgggatgggttcgtgtccagtcccgggggtctgatatgnnnnnnnnnnnnnnnntgtgttcccagcagccctggcttgggggctcgacgcccttccccctggccccaggccgccatctccccacttctcccctctcctcagttttgccgactgcttttcatctgagtcaccatttactccaagcatgtattccagacttgtcactgactttccttctggagcaggtggctagaaaaagaggctgtgggcaggaaagaaaggctcctgtttctcatttgtgaggccggcctctggcttttctgccatggattctccccctgtcttctcccctcagcaattcctgtaaagggttaaaaatttaactggtttttactactgatgacttgattttaaaaaatacaaagatgctggatgctaacttgatacnnnnnnnnnnnnnnnnnnnnnnnnnnnnnnnnnnnnntatggtagcattttgttgttgtttttt

SEQ ID NO: 4856 - DNA, 2655 bp, Macaca Fascicularis
gaaaataagacaaacattttagctgctatattagaatcatgttaattatagggttgattgcttcagaaggatgtgcttgcttgctttaattgggatccaataatattcatctctgttaaatttgtggtattctattttaaatagggttaatggaacctcaatttcaagaaaaaactatcttttacttttctatttgaatttttggatattgattttttctcatgaaaaggataagaatatgatttttaagtaatgatttcactcacaacagataaacttttaaacaaatatgcttacaaataaatgagtatcataaagggaaatatatcttatcttcatagaatattatttattatacagtttattcagaatgaatggagtatttgatggccatggacatgctccactctggttgaacctgtggggggagccactgttggctgaaagctccccccctgcagcttctgtgaacattaccaccctctgatcttctctgccacaacatcagtgaccatggtggggtattaacataggcccattcttacaagatgcaggattcctgtaatggggctttggctcaaggactctgcatcagcctggctaagattatgttagcttgtgctgaagtctgagactcctatccttcccttcctcctttcccaggtgtcagataagcatggttttctgcagcctctccttgcttactccttctgtcttccctttatctttcacagacatttccccagtaggtctctctcttgcacatggactcctgtctttgtgtctgcttttcagagcatccaaagtgaaacagtgcttgctttttcatatcacctatgaagggctttcagggccataaagatcacattttcaaatatctgccaattaaaaaaactttaaatgcaaacatactcaaaatataatatgatgaatttcatgttttaattatagacatgatttatttctaatggcgaacaagtattattttaattttttttttcgagacagggtctcaatcctgttgcctaggctgcagtacagctgtgtgatcatggctcactgcagcctccacgtcccagggtcaagcgattctcccgcctcagcctcttgagtagctgggattacaggtgcacgccaccatccctggctaattttttgatgttttgttgagatgtggcccaggctggtcttgaacttttgagctcaagcagtcctcccgtctcagcctcccaaaaggctgggattacaggagtgagccactgcccctagataagtattatttgttaaggctatgttatctgggaaatactgttataaacacattttgttttctttgtaatatttttgtgtattaaaaatgtaatgagagttttaaaaatctctgataaaacttgatataattctaagattatagacacagaaataaatttatctgaagttccagggaaatttgaagatgtattaatgtgataacattccaatttgttattatttcattccatctgttaaagaggcataaggaaaattacacaaacaccgttaagaaatatgccccctcaggatgcacgtctacctggtgacctgcaggggacactgtgatagtagttctgaaggaaaaggcctttgatggggactgcagaccttattattatgtaaaaatagttaatagggcctaatctgttataatgtgttaaaagagtctgctttgaaaatccttggtgatttagtaaaaatgacttaaatgatgtatcttgggtaaggatcattggtttttttttttttttttttaaaaatacccttgaacatccacaaatataaaaacaatagaactctggcaaaggagataaagtaactgcagaaatagtggtgctgactcatgctttaagaattattgcagacagggttaagaaactaatttgaattccaacagagtcctccttaagataaaattccaagagcaaagtaaaagtttcagcagtgtcagttcagctaatcctgagaaggcattctgatagagaattccaagaggcattagtctgatctgagcttgtatagatgactctagatataaggttgtttctggtagaaaattaatttctatagcttcagtgaataatttacactagtttaaataatgaataagtgactggtttgggttaaacaaaaaaagcacctgctcacacctgtagtcccagctacttgggaggctgaggcaggagaatctcttgaacccgggaggtggaggtctcagtgagctgagatggtgtcactgcactctagcctgggtgacagcaagactcagtctcaaaaaaaaaaaaaaaaaaaaaattgtgggaatggctggtggcccaggcctgtaatcccagcattttgggaggccgaggcaggtggatcacaaggtcaggagatcaacaccatcctggctaacacggtgaaatactgtctctactaaaaatacaaaaaattagctgggtgtggtggcatgcacctgtagtcccagctacttgggaggctgaggcaggagaatctcttgaacccgggaggtggaggtctcagtgagctgagatggtgtcactgcactctagcctgggtgacagcaagactcagtctcaaaaaaaaaaaaaaaaaaaaaaaaaaaaaaaaaaaaaaaaaaaa

SEQ ID NO: 4857 - DNA, 749 bp, Macaca Fascicularis
  misc_feature (1)...(749): n = A,T,C or G
tccatacccacctcctgcccctggaatccctcctgtgaatcccttggctcctggcatgntnnnnccagcagtgatagtggacaagaagatgcagaagaaaatgaagaaagctcataaaaagatgaacaagcaccacaagcaccacaagcgtggcaagcattcctcctcctcttcctcctcctcttccagcagtgattctgactgaatacaggccctggacccttccctcaagtctcaccagttctgctctcccatcaagcttcagatgccatgttgtactgggggaaagtagcccttgtgctccccaccccctacctccacctgagcctcaccctgctgttgagccctgagtggctaggggaaatgggaagaggattgccatggcctggccatcttgttgctgcttggatagatcatatagctaatgaattaggcaggggagctattttttgaaaatgatgaactaaatgttgaagacaagtttgagatctgtaaaatgtgatttttttacttccgcttataatacttgtgattggggaggtttgcggaaatttaattatgatgaaaaacctctatcttttttgtaatgttgccatacttggggaatttagtggcaaatacattccccagcaggccttttgttggttgcactaactgcaaagttgctgggaagtagagtccctttggtcgatcagctttgaccgccattttggaaccttacctttcctccttagcccaatatgctgtct

SEQ ID NO: 4858 - DNA, 613 bp, Macaca Fascicularis
  misc_feature (1)...(613): n = A,T,C or G
aaccnnnnnnnnnnnnnnngagcatgtgctatgtgtgtatgtgtatcggnnnacanntacatttatacacacaccccccccccccataatcctgtatacttaaattcctaaattgttgtttgggtgttcactatattggaacactttaacttgtgttcttattgatatctttaggaaaagattaaagcagttttctgcatataataatatcagtaacaaattannnnnnnnnnnnnnnnnnnnnnnnnnnnngtagaaaacaggtagttattaaagtggtgaatgtaagcaattttgtaagtttataaagtcatagacatctgtagttacgaaggatgtcagataattttctctagtggtttgaaatattatttaaataggaatgttttcttcaggaccaaatctgtggagaagctatgtacatgtatgtattttttttaacttgaaaagtatgggggtaccggtttcatgttattaataactttggcccacctattctttcttccagaagaagccccagttggaatcagcccctagagcaaggagtcacctgggaagcttattatgtgcagattctgattctgtgtgtctggggaggcacccgagactctgc

SEQ ID NO: 4859 - DNA, 728 bp, Macaca Fascicularis
  misc_feature (1)...(728): n = A,T,C or G
atgatacagatcataaactacagtattggattttttcctccaaggcacaaaatgtataatggagaccaaatagtgatcagatccatagtatcctatgcctctacactttaaaatgtgtatacattttagacaaaaatgcacactccagtattaatattnnnnnnnnnnnntacttggagaagtttagtgagaaaattttagaagaaaactattataaacaatattttgactctattaccttttttgccttacaaattttagaaactatggaaattttttaaagaaaatgctttagttttcttttgttcttcagtgtctactgtgtgcttttgtatatggatcaggactgagcaaagtaatctnnnnnnnnnnnnnnnacctatctctaattcacagacagctcctgatgtaaggatttagaggnnnnnnnnnnnnnnnnnnnnnnnnnnnnnnnnnnnnnnnnnnnnnnnnnggaannnnnnnnnnnnnnnnnnnaaacctggagggannnnnnnnnnnnnnnnnnnnnnnnnnnnnnnnnnnnnnnnnnnnnnnnggttatttagcaatattttggtttatttgagctggaagtgattttttctgtgtatgtatatgtatacacttaaataggttttaattttgaagtgannnnnnnnnnnnnntccattttcccataccaaatcagactttagcctgtttagttttaaggactgaaaatggtagat

SEQ ID NO: 4860 - DNA, 669 bp, Macaca Fascicularis
  misc_feature (1)...(669): n = A,T,C or G
gaagctgcaggccagctgggcccgggccggagcgtgcccggcggggctgcccgggcgggcagggggtgggggctgctcctttcccaagtggtgttgtgaggggcaatgagggcaacaggagatgtggggacgtgttaggagagaaaaaaaaaaaacacaaaaatatatatgggggaaatgaactttttttttttttcattgaaccaagtgcaatgcatcagagagttttcctatctttgtatgttaagagattaagaaaaaaaaattctatttttgttgtnnnnnnnnnnnnnnnnnngggacgctaaaagaaccgggcctgccccgccctgtgcggggataacgaaagctgagtgtttttcccttttttttcgttcgtttttagttttttttttttttttcaagtcgttttcctgcgttgacgaggatgatctggggtttttatttgtttcgtcgttcgttctcagtttcggtgggagggctgaaggaaacgttcacattttagagtttaaaaaaaacacctcgacatttaaaaaataaccaacacaagatcaaaaaggaaaaggacgagagaaaaattatttttaagataattaaacataaaaccctggtgcttcttacattataaagtacgttttaaagaacccacgaaactattatacataagtt

SEQ ID NO: 4861 - DNA, 770 bp, Macaca Fascicularis
  misc_feature (1)...(770): n = A,T,C or G
caccaaacctataatagatcnatttnnnnaataaactgatcatcagcactcatctgtttccttgtggcattaagatcgacggtagcatgaagccttgagaggcgagagtcctaggagcagggatggtaaggaagaattccaaacgcttttggacttacagcggagagaccccagctaagcacttgcagagcaaaaaggagtcctggcagttggaaggcgcagcgcacgagctcatcaaacgctacattgaaagacagccaagcataagatgctctttgcagactcctagaccccccaccccaccccttccagaaacagatgacattcttctaccagggggacatgaggagctaacttaggaaatgggttttaatcatgtgtaaatctcaagatttcagatgagattctgtttggatttagttagggattcaggggaagggcatgaaaagtaacttatgttactaatactctttaattaaacagtgatttaagtttatcttataataaaacacatcaactagcatagcaaataatcatgtattatttaagtactttcttagaaatgatcatttcttcattgtgtgcctcctnnngagtgtttctggtcagtcacctttgctttcaaggtcttccttattcaaactaaggtggcttttaggtcaaggtcannnnnnnnnnnnnnnnnnnnnnnnnnntgataattactatgtgaacagccacaatgaactgttttgccatgaaaaaagctggaaggtgttcatggattttaa

SEQ ID NO: 4862 - DNA, 713 bp, Macaca Fascicularis
  misc_feature (1)...(713): n = A,T,C or G
agtaaaccagcaccagnnngaagatcacttnnncatcgaaaggtggaaagaagaaaaacttgagccagcctggnnnnnnnnnnnnnnnnnnnnnnnaaccagcaagagtgctgttcatacagcaaaaaaaggagggactcatcacactcgagtcaagaaagtgccaccccctccagagtcatgggccatagtcccaggggaaaaccctaccaaactaaagttttttctagtgggcccaacctccaagaccatccttaaacatcagtagactgggagctnnnnnnnnnnnnnnnnnnnnnngccaaccctgcaaagtgactctgaagaagacgacaagccctgctccagtcacacccggaagctgactagtccatgcatggccgaagcatgaggaaactcatcgtgggactcattttccttaaaatttggacnnnnnnnnnnnnnnnnnnnnnnnnnnnnnnnnnnnnngagggctgttcccagtgtatacatcaaatcactgagttggacaaaaggttgttatggtcctattattttacagttattgtaagtgtactggaactctaaaaataagttgtttgtataatattattctatacaaggtacatagcccaggaaatgaccaacctgatatgtgttatgacccatctgagtctcccatgaccacagttctcaaaataagattaagaactaaggacaggtggagctcataa

SEQ ID NO: 4863 - DNA, 2756 bp, Macaca Fascicularis
taaaattgagcccatcaaattgtatactttaaacatgtgccatgctttttatgtatcagttataccttaataaagcagtttttaaaacttgaattcatagaaataaagtgccatggaagagtttttgaaagagtgttattataaatgcttgactacagcattaattatgcttatgtctggagaagcttgatttgatacctcttataagtataagcatgtctggacaaaaattagccatgttgtaatggactgtgtatgtcccaatgttaccgaggtttcttttcaaagttattttttataaattgaaatatgtcttgactatgtggaaagtactacccttatgaaaagtttcttttgtttacattcttacaagttttttcttcttttaaagtgttagtgacaaacagtctgcggtaactgaatcctcagagggtacagtatccttattgaggtgaagtaaattgacatttttcttctttgtctttcaaatctttgattgaagcaattcatgcagacctaatataactaccacataaatggtacaattgaaagaatatctcagggtcctacttagcccaacagatattcaacgactctgagacatcttgcaattccaaactgtagagacttgcttctgagactgggttgtttcacattgtttctacaaaggccttattggaatacacatatagggagttcttgagcttaaaacagatgtttagtaaacacttatctgtcatagaaacaaagatacaatactggggcaggaaggggatggggattacatttctaatgaatgcccccaatgccaatattatcaaagttacttgaaaaactttattcgatctaatagaatcactgtgacagacaatgcaacctgtccagagggcagaaagtctgcatgaatgatttataagatagagcagttgggatcacaagtggaaccgtgggaggaggtggctgacttcatgtggaagaggtgattggacatgaagaattgagaggccaagatggtatatgaattgtccatgagaatactgaaataattcataatagcagcacttaggtgtagagaaagatctgtgaatgatgaagaagtgcttggaaggatggtgaatggctgtgaagaatgatcgaaggtgatatatctcagtggcatgaatcctcaaggctgaagtttctatggaagcaggatcttgaaagtagcattcattaggaaatgaaaactgctgtctctggcatcctgtagtttatggagggtggaagatgaagccaatctctacttgagaaggctaccaaggagagaaacattgtccccaggggaaagctagattttagacaaggcaaagagcaggaagggatggttgaagagattgagaatgacattccagaaaggacaatagaaagtcttgggaaggagggagagaggggaagagagaaaggatagctggtcacatagagtatctatagggataaaagtatagctaaaagaacctacattttaggtggaggtaatacagctgcctaagcttaagtgaactgctttttgaatcttagtttgctccttcataaaattggattaataataccaatttggcagggttttttttaaaaaaatgatgccacatcctgtgtttccaaacagccttacctttcaaaactctttttggaagcagtaatgataatcaagtgataacctgccattatgtaaagcaattttgaaatccgtctttggggaaataaaagccttaagagagaatgaaagctaatactttgtagtttaaggattttttttccttgatgtatctaattggaaggccaaaagggtcttgccttttcttttttttttctttttctttttttttttgcctgcttcttctgagacgtcaaaaaacatcttgatttctgctgagtagatcagatagaggaagatgagagaggcaacagaaatcttaagaggccacaggttaagatggggcactaagcagggagagcaccaaaggaggtaggccaaagtattaatagaagatcctagaacagattaaggcaaatcatttaccttttttccattgctttactaatctttttggaaccaattacaaacttcgtgttttattttagggctcacaagaatcttttcttatctaagttgcaacatggaacccagcaacaagactttaataataagaaagaaagaagaataggaactcttcaaagtacaaaaaagaaaaaagaaagcagaagagccactgaaagcagaatacctgtttcaaagagtcaaccggtaactcctgaaaaacatcgagctagaaaaaaacaggcatggctttgggaagaagacaagaatttgagatctggcgtgaggaaatatggagagggaaactggtctaaaatactactgcattataaattcaacaaccggacaagtgtcatgttaaaagacagatggaggaccatgaagaaactaaaactgatttgctcagacagcgaagactgattgtgtttgtaaaagcttgatgaaaggacagttaagtattttgatcactgcattttgtttgaaacttgtgtcatttatgtattttaaaactttgagggtttgtgctataagagttaaagcatatgctatcattgtattaagaaccttattttgataaaatgtaaatttgttgaaccctaccacatttagtatccccacccccaaatcctgttccaatgaaaaaactaaaacatgatccaaaaaaaaaaaaaaaaaaaaa

SEQ ID NO: 4864 - DNA, 306 bp, Macaca Fascicularis
ttatatatgcgcgtgtgtagctccctttaaaattatcacatgtagccttgcataactaccaccaccctttaaatctggaaccattccattatcacaagactcctttgtgttacccctttctggcgacacccatcccctcccttgtccttggcccctggcacccatttatctgttctctatctctgcaggtatgttacttcaattaacatcacgtaaatggaattgtgtgctacacgtcatttttctttttctttgtttttttctttgagacacagtcttgttctgttgcccaagctggaatgtggt

SEQ ID NO: 4865 - DNA, 782 bp, Macaca Fascicularis
  misc_feature (1)...(782): n = A,T,C or G
aacaaggacattagctttntgtttgttttgttctccctttcccagtgttaatgggggactttgaaaatgtttgggagatagaatgaagtaatgattttgcttttgcaagttttcctttaaattatttctctcttgctctcctccccaccttttttttttttttcctctttttcccttctcttcttaggaaccatcagtggacatgaatgtttctacaatgcatttcttcatatatttcgtttatgcttttgtttcttttttcttctttgtttttcagtgtgggagtaggaagaggagattatagtgactgaagaaagaataggcaaacttttcaaatgaaaatggatatttagtgtattttgtagaagatctnnnnnnnnnnnnnnnnnnnnnnnnnnnnnnnnnnnnnnnnnnnnnnnnnnnnnnnnnnnnnnnnnnnccgagtatagcnnnnnnnnnnnnnnnnnnnnnnntaaagtgccttcgcactttaagtacattacttaaatgttgcttttagctttgataaattgaaaatattttaatgtgttgtatnnnnnnnnnnnnnnnnnnnnnnnnnnnnnnnnnnnnnnnnnntatattaagtcaacgtacagtttgcttgagttatagaaaccagcctgtcatcaaatgattctagttctaggactttgtaggcttaactataaaatatttcctttcctctgggtttaagtgattttatttaagtcaactaaggggatttaacagtggactagaggtaataagccacctcagtcagg

SEQ ID NO: 4866 - DNA, 736 bp, Macaca Fascicularis
  misc_feature (1)...(736): n = A,T,C or G
aagtcattcatcatttaannnnnntttccctttccataatnnnnntnnttctcaatggctgcatctgtgcattatatttacttttcagcagattgactaggatatgtctaggtatgtttttctttgtatagagtttactgaacttcttggatctgtgttgatgtctttcattaatactggttctttcttggccattatctgtttacatttttctctagtctcatactttcttgcttctcctctttggagattctagttacatgtatattagatgatttgatataaacctacagatctcagataatttttcccctgccctgttttctttttgttttcagtttggatactttccatttaaccatctttaagttttttgatgctttccaatgttaacctgttaaacttgttaattgaattctccatttaaaatttttttggttttagttattgatgaatacatagttgcactgaattatttttaatttttttctaatatttttatttctagcatttcattatatttgtataattaccattttctgctgaaatttcctatttcttcatgcatgttttccacattttccactctactttttagcattttaatcagttattttattggttttttttccttgtatcagttattttagagatccaaactaataattcaacatctgggtcttttctagttctgcttctgttgggccctttctctcccttaccgtgaatcttattt

SEQ ID NO: 4867 - DNA, 627 bp, Macaca Fascicularis
  misc_feature (1)...(627): n = A,T,C or G
tctccacacctggcagggccgcgggctgccccagccctgggggtcgtgggcagctgctacacagagccatacacctagctgcacagagccacatacctcgctctccgccccccaccccggcctcccctcccaccccgtcgtctccacttcaggaaaagccgcactttacacccccacctgcctcttcccctccatcnnnnnnnnnnntcctgagcggttggggtgggggcccctcagcaaccccaggcgtgggtttgaggagacaggtgacttacaccccctttgctgtcctcccctggtaccaaggcagggagcctcgagaggagctggccctgccggccgtgcaggggccnnnnnnnnnnnnnnnnnnnnnnncctgcaggtcttccttctgtgggaagcttcccagcaagatggcttggagtcctggtccctcttccccgacccctgtccgtttctgtttctgtttacacgttggcgtggggtcctccgtgggccgcggcgtgccctgccccgggcgtcgtccagcctcctgtgctcgagcccctttctgagttggactcgaccatccctcaccccaccaaggaccacactgtgaagtgataactgccttgaacccccccttgc

SEQ ID NO: 4868 - DNA, 750 bp, Macaca Fascicularis
  misc_feature (1)...(750): n = A,T,C or G
cccgagccttccnnnngaagcannnnnnnnnnnnnnnnnataaacatagccctggtgattctcagcacgtggctgggtctgagcccggcctatannngagctccagctggcagaggtcgagggcctcatgtgtcccaggcatcagtgaccgccccttgtcattgctttttcctgttggctgccttttcctaccaaatttcacttggcaaagagggaacccagctctttccagagggacattgacttctggttgttcaggaatcacttggccctccttggctatcggccattcccaactgatgttggttccaagcctgagcaacagaaacagaggcctaccccagccctggctcttcctactggacccatgtccagttctgagccacccctggggtgtgttagccaggnnnnnnnnnnnnnnnnntgggatggaagtgacatctatgcacctaaggtctcagggtggctctgctctctctgaggcctgtaagaagaannnnnnnnnccaggcgcgnnnnnnnnnnnnnnnnnnnnnnnnnnnnnnnnnnnnnnnnnnnnnnnnnnnnnnnnnnnnnnnnnnnnnnnnnnnnnnnnnnnnnnnnnnnnnnnnnnnnnnnnnnnnnnnnnnnnnnnnnnnnnnnnnnnnnnnnnnnnnnnnnnnnnnnnnnnnnnnnnnnnnnnnnnnnnnnnnnnnnnnnnnnnnnnnnnnnnnnnnnnnnnnnnnnnnnnnnnnnnnnnnnnnnnnntcac

SEQ ID NO: 4869 - DNA, 775 bp, Macaca Fascicularis
  misc_feature (1)...(775): n = A,T,C or G
gcataaaatgaggaggtgcctgtccatgcccccaattcctctctcaggtgccagagcctgagacctcaccatgcccccatcagagatgcaaaaaactaaacacccaactagaaatccttgggacctctctcggctgggatcttagagcctttctgtccccgacccctaccccatgnnnnnnnnnnnnnnnnnnnngggacaacctggggcctcccggaactctgccaccctggggaagttggggggagggcgttggtcccggatcacaaccccgtctgctccccagaatcctttcctaagaatcgttgaggaccnnnnnnnnnnnnnnnnncacgtgttgcttttctctttgccttttttttttttagagaaaaatcaagttgactgtgtcaagtaacaccccacccccttacccccgtccagccatagtggctctctggagacacaggtcacaggcggagggtcccctgatcatccctgaccacacagccaggggtgtttgacccctgtccacccctgtctcgtgctccctcagacccccacaaaccggccaagcagtccggggacgcttcccctccacacaacttctcttagcatgtgattgcagatgtgaaatcaaagcgttgtttgttttttgttttgttttgattccaccccgtcagtccggtgtctgcacagacgccttcatttctctgtaaatatgtgacttggaagcaaatgtctaacacaaacgagaacgtggtcatgaatgcatggtgttgagatgttttgcact

SEQ ID NO: 4870 - DNA, 1958 bp, Macaca Fascicularis
gctcttttgtaagctgaactaatgactgccgcaagaagaagacacagagaactgagtatcctcccaaaggtgaatttcaatttttattatgagtgtgcttgcttatataaaaggcagaatatgcttaagggaaaaaagtgctttaaagttaatattctacaaaccatagtttatgagcataagaaattacatagtttacagcaatctgatgtattagtaataattaatgatgtattatctcttaaacagtgttttgttttatggctaacagtagtacctgtgaatgaggtagaacctgttatttggatttcacaaggatgtgaaaataatgatactgttaaaagtaccaaaaatgtattctatgctttaaaaattctagccagaaaacagtattttccttctcaatacatctattgaaagtgttggataaatgcaggatgttaatatgctataaacctaaagtctgtttttaaaaaatagcatttgaaaatcatgaagggatttttgtcttcttttgtttgtatatatgtttattggtaacaggtgacgttggaagcaatgaacaccacagtgatgcaaggttttaacagatctgagcggtgccccagagacactcggatagtacagctggtattcccagccctctatacagtggttttcttcactggcatcctgctgaacactttggctctgtgggtgttcgttcacatccccagctcctccaccttcatcatctacctcaaaaacactttggtggccgacttgataatgacactcacgcttcctttcaaaatcctctctgactcacacctggcaccctagcagctcagagcttttgtgtgtcgtctctcttcggtgatattttatgagaccatgtatgtgggcatcgtgctgttaggtctcatagcctttgacagattcctcaagatcatcagacctttgagaaatattttcctaaaaaaaacggtttttgcaaaaacggtctcagtcttcatctggtccttttttttcttcatctccctgccaaatatgatcttgagcaacaaggaagcaacaccatcgtctgtgaaaaagtgtgcttccttaaaggggcctctggggctgaaatggcatcaaatagtaaataacatatcccagtttattttctggactgtttttgtcctaatgcttgtgttttatgtggttattgcaaaaaaagtatacgattcttatagaaagtccaaaagtaaggacagaaaaaacaacaaaaagctggaaggcaaagtatttgttgtcgtggctgtcttctttgtgtgttttgctccatttcattttaccagagttccatatacttatagtcaaaccaacaataagactgactgtagactgcaaaatcaactatttattgctaaagaaacaactctctttttggcagcaactaacatttgtatggatcccttaatatacatattcttatgtaaaaaattcacagaaaagctaccatgtatgcgagggagaaagaccatagcatcaagccaagaaaatcaaagcagtcagacagacaatataaccttaggttgacaattgtacataaggttaacctctatttattgatgagacttcagtagataatgtagaaatcaaatttaatgaataagaaaagactggaataaatgctctcttacattatcctagtgtacagaaaagattacataaattttaactccacatacatctattcataagctgaatgaaccattactaagagaatgcaacaggacacaaatggccactagaggtcattatttcaagagcatttcactttaacactttgggaaagattaaggagaatgtacatccctacaaacctcccctccaaacaccttctcacattcttttccacaattcacacaacactactgcttttgtgccccgtaaatgtagatatgtgctgggaaaaaaaaaaaaaaaaaaaaaaa

SEQ ID NO: 4871 - DNA, 782 bp, Macaca Fascicularis
  misc_feature (1)...(782): n = A,T,C or G
aaaagaagcagcantncttagtagagctgacnngggagcattccgttctgaaatnnngaatcatnnctgaannnnnnnnnnnnnnnnctgccctctcctcaagctgtttgggtgccagaactcaaggttcagtggacacatccccctgttagagaccctcatgggctaggacttttcatctaggatagattcaagatctttacctcagaattatgtaaactgtgattgtgttttagaaaaattattatttgctaaaaccatttaagtctttgtatatgtgtaaatgatcacaaaaatgtattttataaaatgttctgtacagtgaagttacacctcaaagtgtactcttggaatggattctttcctgtaaagtcttatctgtgactctgtctcgggaatgttttgtctgttgccatcagctgaactttgttatggagggagcagcctcacacaagcagaaacactcctgtggatggtattgtagcatgtattgtttattttagtcaataaaccctctccttataaatggtgtttagtcttcctattgcatttcatgggcctgggggtttcctagcagaggctattagagctcctttttgtgacattaccaattacatttttgtctacgtttaatactttgtattggaaactttaaatgctgcggatttgtgtagagttctaataccaaagacagaagtaaatgttttccatatactttgtcnnnnnnnnnnnnngcccttgtgtaatatggtgaattnnnnnnnnnnnnnnntttgtattat

SEQ ID NO: 4872 - DNA, 638 bp, Macaca Fascicularis
  misc_feature (1)...(638): n = A,T,C or G
ctagacacatgnnnnncnggcagagaagacacatgttccctggcctagagtgggctgacaatattgctgcctcctctaaattgactcaatcttgagaaacacatactgcagtgacagttgatgatgtannnnnnnnnnnnnnnnnnnnnnnnnnnnnnatccctcatggcattatcannnnnnnnnnnnnnnnnnnngtccctcccctcaaannnnnnnnnnnnnnnnnnnnnnnnnnnnnnnnnnnnnnnnnnnnnnnnnnnnnnnnnnnnnnnnnnnnnnnnnnnnnnnnnnnnnnnnnnnnnnnncacagcaagtaacttctcagaggggaaaagccaagctctagacaaggagtgctattagcccaaggggaagagctaatagatacacaggccataagcacagggctgcacacagagcctttattggcatctgcatgagaggcctagaaattggatattagaaactaggaatcatggctctgagtgccttgcatacaggagatactcactaatactaaatcaaggcacataaacaatactgggtaaatcatacctaccagaataaagagtaacattcagagcttttcttttagctgttattttaaacattactccatatttcaaaagtctgca

SEQ ID NO: 4873 - DNA, 746 bp, Macaca Fascicularis
  misc_feature (1)...(746): n = A,T,C or G
cagtatagagtgactgagcnnnnggaggatgtatggactttgtcctctcttattccaccctcccagccctgaaagttgctaggtacttgtgaggcaatgtactggagaggggagagcatggatcctggggtcaaagggactttgcccccacccttacttggccttctacctgcaggtgaccactggcacattctcctgcttgtcnnnnnnnnnnnnnnntcacctctaatatggggatgatgaaaacagtacctgtcatgcagagttattgggaggattgataatttagatgtttatacatgtaatgtacttagagcagtgtcggcctcttttcacttgatatccagtactatgtaagatagaggatgcatgtcttctatattctgtatttcccatttcttttgcgtgcagtctttgattcgtacaatagaaggaacacgtggaatgtatatttgtacattcatatcaacagagtatttaaaattgctaccaacctcatttaattcggtataagactaacagatgaagtctctcatttgcttgaagatattttacaaaataccaactgctctatatttctttagagaaagattatagttactaatattgatacctctgataatattttattcttaaatcttcagtgatcccttttactatagattcatgacagctaataagtactaactgacttagaggtgtcctttcccatcatatggaatgatgtaaagaaatcagatacaaac

SEQ ID NO: 4874 - DNA, 1017 bp, Macaca Fascicularis
gcagccgtcaagggattctggaccacctgcccttccttctccaccttctacttcctctttgccatttttgtagtgtccaccatctttcactgccaccagcgcctggctctggtgcccgcgccctgggcatactcagcccatgtggtcctggcaccgagacacctcccccgagaggggctgttcactatcaactccaagggccgcctggggaaccagatgggtgagtacgccacactgtatgccctggccaagatgaacgggcggcctgccttcatcccagtccagatgcatagcaccctggcccccatcttcagaatcaccctgccggtgttgcacagcgccacggccagcaggatcccctggcagaactaccacctgaacgactggatggaggagaagtatcgccacatccctggggggtatgtccgcctcacgggctacccctgctcctggaccttctaccaccacctccgccacgagatcctccaggagttcaccctgcatgaccacgtgcgtgaggaggcccagaagttcctgcggggcctgcaggtgaacgtgggcagggcgggcgacctttgtgggggtccatgttcgccggggggactatgtccatgtcatgccgagtgtgtggaagggggtggtggccgaccggggatacctgcagcgggccctggacttgttccgggctcgctgcagcttcccggtctttgtggtcaccagtgatggcatggcctggtgtcgggagagcattgacaactccgttggtgatgtggtgtttgctggcgatggcattgagggctcacctgccaaggactttgcgctgctcacacagtgtaaccacaccatcatgactgtggggacgttcggggtctgggccgcctacctcgcgggtggggataccgtctacctggccaatttcaccctgcccaactcccctttcatcatggtctttaaaccagaggcagccttcctgccagagtgggtggggattgctgctgacctgtcccccttactcaa

SEQ ID NO: 4875 - DNA, 4171 bp, Macaca Fascicularis
ttttatccagtatttttatctcaacttgggtaaaattagattgttgctaataataatctaaaagatagtaaaaaagtcaagttgatcctgataaattagaaaagtgctataagcatgggctgatgtttaataggggtagattcaggcattcttagggaccagaaacctccagtgcattatcgataaggaggattggtcagggacacacagcagaaacttactgctattgaacataaaatggacatgaataggagtgtatttttcttgtggaaaaggacagtgctatgctaaatgtgttagatatgacatgaaaagctaggacgtagttcattttacgtgtttgcttgcttgttattaaaaccttgggtatccagttttggtcattgtgcctcaaaaatgagaagatccattgaacagaaggaacaaagagatgtaaagcaatctatacttctccacctctacttcccactttgaacatttttatttgtttatattcacttacttgagaaaagtctgtgagcatctttattgctttgtagggtggagggtcatactcaggagcttttggtggatcggtggggcaggtccccttcctcttcatcctcacaggcttctggctttgcaggctggtgctggctctgtggaaggctgccacgcaccgatctgggtggtggtacctcttgtggagcatgtgccggatgctgctgagagtggccctgcagttcttggtggtggcgatttgcatataggaggtggtttgcttttgttaggcagtttatcaccttcgtgaccactacaacacctttgctgttggctccacatccacagtcagttttaacaaaaggagttgccggccttcaggttgttggattcggagctgtgtgtcctcctgttcctcttgatggggaaactgcagcagttccccacagcgcagccatttcaggtgcccacttatgactcctctacctgtgatggtcagagatgagaagagccacttttactttttcattgtaaatttttgtttaatttcaggcttgcttgccaaactgtaatctctgtgaggaggtctgtagtgctcaacattgtttctttagagctgaatacatagcctgacacacagtaggttttcaataaaaatttaatttgccagaagtggaaaatgagttttatgaagaaaatttgagagaactgggttcgtttttcaacacaagagatgaccaaagggtaatatgttccttcaggttcatgaaaagcctgcatgaatatgccaagtagttgttttgtaactgtggaagattggctaagaggagatggttggaaagtaaagccagaaaggctttattgatttaggccagggggagaagtgttggagtatctgctctggagaaaatactcttttccggctagttttatgtgtctgaaaagtgggggctagattggatggtctttaccaggtttcttccccttctgattcagggacttcaggaggtttgtggtaacctgagaaagtagcctgaggtattaggatgctggagttctccatagggtgcttggcagaccgcctttatctctccatacattgcgtttttccttatgtgagctgagaataagctggttgcctttcagtgatctgaaattatagatgcatttcttggaatctttatttttttaaaggctaaaattgagtagtaccgctattcctgtttagaggttactgggcttggtaagttggaagggtaacaggagcacgtttgtgatttaaaaaaaaaaacaaaaaactcaccagttaacgtaattgacagcagagaagttacaggcagaacagtggctctttcgtttttcttctacacatggctttttgccgtcagcatcagtgaagagtaagtaattttaatgaacattttgatttggagcagactgatacactggttttctgtcccagcctggctttctgtcatgccctgtgatgtgctggtctctcccagggttcatagtccacatgtagtcctgaaacttggaagcaaccctgagctttgttcactttgggttagtggtggctcatgccatacctaccaagctagtatgtagatatggctgctgcagtctttgttttaatgcaaatagaatcttgagaagatttgaactccttccaatgcttaatgctttgtatgtgtgtgagagagaaaagcagttccttgggcatgctgtgtagaaagtaaaacattcccgagggagagatattaaatttggggctttaataatcttgtttattttttcccaaagaatcagagttggaagagagaccccaggggccaagtaatcaaatagtacagaataaacagccatggcatctttgacacatgctcacccgtcctctgtttgaacactacagtgattggtagacagtttggtctgtggtgaacttttttttccctcctcagcttgcggaaggagctaatgctgcttatttgcagttgttgaacctgtttgcctatgggacatacccagattacatagccaacaagaagagcctgccagaactgagcacagctcagcagaacaagctgaagcatcttaccatcgtgagcttggcatcaagaatgaagtgtatcccctactccgtgttgctgaaagacctggaaatgcggaatcttcgggaactagaagacctcatcattgaggctgtctacactgacatcatccagggcaagctggaccagcgaaaccagctgctggaagtggatttctgcattggccgtgacatccgaaagaaggatatcaataatattgtcaagaccctgcatgaatggtgtgatggctgtgaagcagttctgctgggcatcgagcagcaagttctgagagccaaccagtacaaagagaaccataaccgaactcagcagcaggtagaagcagaggttaccaacatcaagaagacactcaaagccaccgcatcctcctcggctcaggagatggagcagcagctggctgaacgggagtgtccgcctcacgctgagcagaggcagcccaccaagaagatgtccaaagtgaaaggtctggtctccagccgccactagggccggctggggcagctggcactcaccaggcctgggtcaggtggggaggggacaccaagggcccatttcctcccctctctacctacagtgagttccagacctgcccgtcccctcaccagcgcctccccaccctgttggtactgttccagaaaaactgttaactccccctcacccactccctccttccccagttgttcccttcagactcaggggctccaccgatgccatcccaacagggtcagacactgcccagcttccctccaggaggttcttgtctctgtgtaagggcttgtgtccctcccagtttttcctttgctccatgtcattttgtcaggctggttataagctggaggcagctttaaccagcccccagggatgattgtgaaggaggcccctccccttgtgaggagggggcgctcctctccagcccctcgtaccacagtcctcacgatggtgcagcgatctctagccaggcgtcaagatgcgctgctttccgtctcttgcctcatccctttttggcagctccagttcaggccgtggagggacgtgatgctgggctatgtttactaaacccacgggttttcagcctcttaagcccagctccgatctccaattagttgggagcgctgggttgactaacctctggtatctgagcacagacagagggtgctgtgggtctgctgggtggcagaaatggttccttccagcgtggcgttctcttctggccgctcctcctgctgcctctgactactcagccttgttttcggtgtgtaggccccagctgcccactggaactgctggctaatgcttgctctcccgagatctttaactcctcctggctgcacctgggtagggatggtggcaccgatgcccctctgtctgctgaaggacctgttgctgcttctgtcttttcacccctccttggctgatgacccagagccctctgatgatggcattctcctggcaagagaaaaggacttaactagacttctgaacttgaacagtttcaggttatattttaatttttttttttgtacaggttctgattctaatacatttcaacatggttttgtcaaaaaaaaaaaaaaaaaaaaaaa

SEQ ID NO: 4876 - DNA, 762 bp, Macaca Fascicularis
  misc_feature (1)...(762): n = A,T,C or G
agtttaagctcttgctgcaacatagntctgtacnnnntgggatgctagcagtcccagcagttagctcagatatctgagctgtctgccacacaaataccagcctgaggagatcatcattcttcagtttcattcattacttaatnnnnnnnnnnnnnnnnnnnnnnnnnaagaaacactctgtgtgatatactgaacaaggctgtgtgcatgattaaggagccactcaaaaagccaattttgagctttatttctcctttgttagcaaatctcaagaaagcctttgttacggtttagctcatgtcatttggttggttttattttctagccctttaacataggaggaaaattgtcatttcatgtataacttgtaacacgtacagaattgaactgataattagtttctttgccttaaattaattatatatcatcccaagggtctctgttaattttnnnnnnnnnnnnnnnnnngagatctgggtttggcatcagaagtatttcataggccgggcgcggtggctcaagcctgtaatcccagcactttgggaggccgagacgggtggatcagaaggtcagnnnnnnnnnnnnnnnnnnnnnnnnnnnnnnnnnnnnnnnnnnnnnnnnnnnnnnnnnnnnnnnnnnnnnnnnnnnnnnnnnnnnnnnnnnnnnnnnnnnnnnnnnnnnnnnnnnnnnnnnnnnnnnnnnnnnnnnnnnnnnnnnnnnnnnnnnnnnnnnnnnnnnnnccggccacnnnnnnnnnnttgg

SEQ ID NO: 4877 - DNA, 699 bp, Macaca Fascicularis
  misc_feature (1)...(699): n = A,T,C or G
aaatcatacatgaaaaggttttatgagaagggaaaannnnntagatagagggacatgtgaaacaaaatcatttgaaattttgattcagacatccannnnnnnnnnnnnnnnnnnnngccagagcccacaaacccaaatgatcggtgaaattgggtggttttatccaatgtctcaggcaagcaatgtctgggaatatcttagagtaactggtgctggtcagccaaagaaacattcactgcagtgaaccaacaccataagcacgtattatctaagcacttgatcaagaagtacacatgttgtacaagctctcaattttgttcatttactatcaattttttaaaatacaagtttggtatgtgatttggaaaagaaaccttctggatcttaagnnnnnnnnnnnnnnngggcctcagggccacaaacgtcaagacacatctctgttnnnnnnnnnnnnnnnnnnnnnnnnnnnngatacaggtgaatacataggaactatctgcctgtgtcctcaatctccctccaaacaagatgctgatttgtagggtacttggcaggttaaattaaaccagaagaggtgacttaataaaaaagggaatgacatttagggtataaagatctcataagaaatgtaatatgtaaattatatcttgctttatgttgtaaaatatacattgtttgcgctagaatagaaatgatttc

SEQ ID NO: 4878 - DNA, 749 bp, Macaca Fascicularis
  misc_feature (1)...(749): n = A,T,C or G
tagatgactcagaatagggcagtggtgtggggtgttgaaagagacacatctaaaaaatgattaggagataagttaaacaaaatttgatttttggctaaatatgagagtgagggagagaaaagagtgagggaaaactcnnnnnnnnnnnnnnnntaattggttggagagtgatgttgttcactaggaaagggaacacctagggagaagctggttggaaaaaaggnnnnnnnnnnnnnnnnnnnnnnnnnnnnnnnnnnnnnnnnnnnnnnnnnnnnnnnnnnnnnnnnnnnnnnnnnnnnnnnnnnnnnnnnnnnnnnnnnnnnnnnnnnagagaaatctagcctaatgatttgagttttatttccatggaagttgataaatcactggtggagtgtgtgtactgcaaaaaagaaggtggcttagactatgccttgaggaaatattttctctttcaaaggcaagcagaagaggacctataaaaaatatctgaaaggaaatgaggttagaattaaggaaatcagcaggaaaatgtgtttgaggaatgagtggatcaacaagtgnnnnnnnnnnnnnnncagatctatgaaaaatttcaccagtaatcctgacaatagcagtttcagtggcaaggcaggggagaaagctgtattgcagtgggttgaagaaggagtgggataaaagggaacaaggatgacaaagatgccaaaaacaaagatgccaaaggcaattgcagtaaacaaaaattaaaa

SEQ ID NO: 4879 - DNA, 719 bp, Macaca Fascicularis
  misc_feature (1)...(719): n = A,T,C or G
tttntattaatgcaaaagtatatgactttgttttttatgtgatacaccataaatattaaagtnnnnnnnnnnnnnnnnnnnnnnnnnaagaaggatgtagtatttttgctttctgnnnnnnnnnnnnnnnnnnnnnnnnnnnnnnnnnnnnnnnnnnnntgtatctagtgtgtgtcttaacatctttctaaatcagcagtgtaactgcatagtttaacttcctgtctgtgtgcctcattttacttttccctccttgcctcatgttttggcttttgtgtatcagagcatctttccttgcagcatcctagtcttgctttagtttctgtggtctcttttcatcctccttaaggattctgagtgtggaaggaggctgggaagtctannnnnnnnnnnnnnnnnnnnnnnnnnnnnnnnncccggggnnnnnnnnnnnnnnnnntgtctttgtgcatgcaaatccaacacacctggcgcatcctctggagagcatgacgcacggaaagnnnnnnnnnnnnnnnnnnnnnnnnccttctgcagtcatcctacccaagtaaaagtaactttggctatgttgttaccaccgttttggtcacccaggaggacatcttagcaagggtgcctgcgagcgagtgtgggactgggcctnnnnnnnnnnnnnnnnnnnnnnnnnnnnnnnnnnnnnnnnnnnnnnnnnagcactgtttcacagttactttcac

SEQ ID NO: 4880 - DNA, 596 bp, Macaca Fascicularis
  misc_feature (1)...(596): n = A,T,C or G
gaaagaatacaaaatctatnnnacttaaagcatctcatataagnnngaagagagacttatggtnnnnnnnnnnnnnnnactcctgagtaggttagcttgtagtcaaatctgtctgtggattatagtaccactacggatcatgaaattaatttattgcattacgactagcattgctaatttaagatatggaaaagaatagaaaatagaagagtacatcacagctcgtaaagatatgtgttttgaagtaaacatttcttcatgtgtaggtgagctaggttaccttgcaaaatatattccctaccgtgggttacaggccaaaccttgtgttcatttctgtttttaaaagtctactcttctgatcttcctttcaaaagggggaaaaaaggaatgttagaaagatctgactgcctatgaactagtgaaggattattagaagaagtaccaggatattttagagatctgatactagtttcagaaaggtaatcttaaggcaaagggtaggaaataaagtatgctgttagtagaaatgtcaaatctggttaaagttgtgaggaggaaaaannttcctagcggacctacctttcttgtgtgtagat

SEQ ID NO: 4881 - DNA, 1326 bp, Macaca Fascicularis
aaacaacaacaatgacatattatcttcatcacttatcagagatgattttcccagaattgttggctcaaattttagaagaagttctagaaactgattcaacctaaaattaaaacctgctagctcttcatgtaaatcatggaatcatttgtttgctactgaaccgcatgttgacattgaagtacagatgtttgatgttgaattcattcctctttgtataacagcaactacatgataaaccagggaaaaaaatggcagcatcttttatatcttcatttgtttgaaacagataaaaatatttcattttccttattcgatgtcaaattacccaataatgacaaaatctaaacttacattttcaagggatttttaaagtgtattaaatttgtaaaggtaaagcaatactttaaagtaaatacacggtttgaaatatatcagttatggagccaactgagatgtcaacaatttagtagtttttatctccgaaaatagagaatattcagaagcagatccagaaagtttcattttaacctcagttggaaccaggaagaggaactgaggttgcttactatcagatcataatacagtggacactgacattcttccacacattaagtcatttgtactttctctttgacaaatttaaaatctcagaagttaattgtgggagctagtcctgattcaccaagatcaactagcagttgccggaacattttctttcaaaagcttgaaaatgaatcaagtttacttgttaagatgtccagcaaatagcaagataaacatggtaatatactcagttttaaatatataagtttatatcaataatatatttaaaatagcatactttaaggttactaatgaatatgtgaagcaaaacgaaaaatgttagtttgcaagagaaactgattttatttgatgacttattttacttcagtaaaatattggttaagcagaataattgaaaaaagaaatatctgagtaagcaaaactttgatttggctagaaaataaagtagatttttcttgcacttgtagcctcactgttgagaattttaagaaatgatcctccttgtttaaattcaattggcctttaatgggcacataacacatgctgggcattacagtgggaggctgaaaagaataccataaataaataattcccctggctctcaaggaattcttagactcaataaatagagtacattgaacacaagtgaattatatatatatatatatataaaatatatgtgtgtgtgtgtgtgtgtatatatatatttctagaatccttcagacttaaattcagtttcagaaaaaaaaaaaaaaaaaaaaa

SEQ ID NO: 4882 - DNA, 685 bp, Macaca Fascicularis
  misc_feature (1)...(685): n = A,T,C or G
cccatgccccctccttggctgaaagaaaggagtcttgaagggtggaggggaggcagcggggaggaaggtctcaccggacaggttggggagaatgaggtcagnnnnnnnnnnnnnnnnnnnnnnggggcagtggggatggggcttgggcagacaccagcaggaagaatttgaaatgtgtgaggtgactccccagagggcctctgggaaaagaatgatgtctggaagggcttaagggacannnnnnnnnnnnnnnnnnnnnnnnnnnnnnnnnnnnttgtggggtgttagtgccaaacttgaataggggctggggtgctgtcttccactacacccaaatccagaatccctggtcttgagnnnnnnnnactttgcctcctgactatcccttctcctcctacctccnnnnnnnnnnnnnnnnntcttttctgatcctttcccctgcctggtctagctcctctccaaacagccatgccctccaaatgctagagacctgggccctgaaccctgtagacagatgccccccaaattggggcatgggaggggggctgggggaccnnnnnnnnnnnnnnnnnnnnnnnnnnnccagctcctctccccaaaacaatcccgacaatcccttatccctaccccaaccctttgcggctctgtacacatttttaaacctggcaaaagatgaagagaatat

SEQ ID NO: 4883 - DNA, 810 bp, Macaca Fascicularis
  misc_feature (1)...(810): n = A,T,C or G
catatgaaaannnnnnnnnnnnnnnnnnnnaaggaattgtaagnnnnnnnnngaaactcaaggaagccatctcggagcatgctaaggacacaggtgaaggctatcaggcccctaatattattctagatattcagcctggaggcaatcatgtaattgaggattctcacaaaaagattacagcccaaattannnnnnnnnnnnnnnaacttggacttgacannnnnagtgttttcgaggatcttaagaaatacctgaaattctgaaacactacgttcaactgggaattggatattgaagtatttcatagtcttggaggtagcaaaaaaaaaaaattaataacttgagatttttaagttattaattttttaaaatgtgcttctccatctaaattttgcttagtctacatcttacttgcttacactgttctctccactgatgcacatgcccattaacctaggaaagtagtttttaatttatgctccttagaaggacgtggagtagagggaagggaaggattggtgatagcagaactctaggcctcccttccagtcagaacagttgagcagtttacacatcagtgtcctgcctctttgctagcaaatgcttttagacactatggnnnnnnnnnnnnnnntaatttctatgattgcattttaagggaaaagataaaattcttccgcttaaaattcgttaaagttttttgaataatctggggtcctaatgtgttctggtcatcccctgattgatgctctctcnnnnagttataagctcctataagcgataatnnactttnnnncntttttttcaaaa

SEQ ID NO: 4884 - DNA, 724 bp, Macaca Fascicularis
  misc_feature (1)...(724): n = A,T,C or G
gagaaannntcannccggggttccagggtctgctgtctaccaatcgaggataatattctgttggaattgcagnnnnnnnnnnnnnnnnnnnnnnnnnnnnnnttctgagagtaagannnnnnnnnnnnnnnnnnnnnnnncagagtgcacagannnnnnnnnnnnnnnnnnnncatgaggattgtattttttggcttctggtcttctccatgactagtggtctggataggagtttgtgtccagaaaattttatgtaatttatttttttaaagaacctgttgtacatctttatcaaatacaaacttgggctttagctgccctctccaccaaactgacttattcttttgactagaataagaaaatggcaagaatcttagtaaggtggtagccaacttggtaactgcatagtaatcaagaggctttaagatgggaagacaccgtaggcagcggggtagagtgggtcccctgaaatgggattctcttnnnnnnnnnnnnnnnngataggggtgtnnnnnnnnnnnnnnnnnnnccctnnnnnnnnnnnnnncgcttcatccttcttggcaagcctgttcacatggatgtannnnnnnnnnnnnnnnagaggaggggannnnnnnnnnnnnnnnnnnnnnnnnnnnnnnnnctttgttgtnnnnnnnnnnnnnnnnnnnnnnnnnnnnnnnnnnnnnnnnnnnnnnnnnnnnntcttggggccggccat

SEQ ID NO: 4885 - DNA, 1178 bp, Macaca Fascicularis
ctactcagccccagcggaggtgaaggacgtccttccccaggagccgactgccaaggcgagcttgccaatcacaggcaggaagatgaaggttctgtgggctgcgttgctggtcacattcctggcaggatgccaggccaaggtggagcaaccggtggagccagagacggaacccgagcttcgccagcaggctgagggccagagcggccagccctgggagctggcactgggtcgcttttgggattacctgcgctgggtgcagacactgtctgagcaggtgcaggaggagctgctcagcccccaggtcacccaggaactgacgacgctgatggacgagaccatgaaggagttgaaggcctacaaatcggaactggaggaacagctgagcccggtggcggaggagacgcgggcacggctgtccaaggagctgcaggcggcgcaggcccggctgggtgccgacatggaggacgtgcgcagccgcctggtgcagtaccgcagcgaggtgcaggccatgctgggccagagtaccgaggagctgcgggcgcgcctcgcctcccacctgcgcaagctgcgcaagcggctcctccgcgatgctgatgacctgcagaagcgcctggcagtgtatcaggccggggcccgcgagggcgccgagcgcggggtcagcgccatccgcgagcgcctgggacccctggtggagcagggccgcgtgcgggccgccactgtgggctccctggccagccagccgcttcaggagcgggcccaggccttgggtgagcggcttcgcgcacggatggaggagatgggcagccggacccgcgaccgcctggacgaggtgaaggagcaggtggcggaggtgcgcgccaagctggaggaacaggcccagcagataagcctgcaggccgaggccttccaggcccgcctcaagagctggttcgagcccctggtggaagatatgcagcgccagtgggctgggctggtggagaaggtgcaggctgccgtgggcgccagcaccgcccctgtgcccatcgacaatcactgaacgcccaggcctacagccatgcgacccgactccaccccatgcctcctctctccgctcagcctgcagcgggagaccctgtccccgccccagccgtcctccaggggtgggccctagtttaataaagattcgccaagtttcaccg

SEQ ID NO: 4886 - DNA, 762 bp, Macaca Fascicularis
  misc_feature (1)...(762): n = A,T,C or G
gcgtaggttggcgaatgctgcaggannnaatatggagaaattttaccgaataaagactcatcattccaatgacatctggattnnnnnnnnnnnnnnnnnnnnnnnnnnnnnnnnnnnnnnnnnnnntcagagaggagtcacaatagcagctcttggtgctgactgtataccaatagtnnnnnnnnnnnnnnncaaaaaagcatgtggggttgctcatgctggttnnnnnnnnnnnnnnnnnnnnnnnnnnnnnnnnnnnnnnnnnnnnnnnnnnnnnnnnnnnnnnnnnnnnnnnnnnnnnnnnnnnnnnntacttggaccttcagtaggaccttgctgttttactcttccaagagaatcagcagaggcatttcataatcttcatcctgcatgtgtacaactatttgattcaccaaatccctatattgacatccgtaaagccacaaggattcttctagaacgnnnnnnnnnnnnnnnnnnnnnnnnnnnnnnnnnnnnnnnnnnnnnnnnnnnnnnnacatcttgccatcctgacaagtttttctcccnnnnnnnnnnnnnnnnnnnnnnnnnnnnnnaaattggcttcatatcaattagagaataagatactnnnnnnnntttttgtataactgtttcctgcctcctnnnnnnnnnnnnnnnngagagaaatttagctgtttgatctacttaaaaccaaatggattacaatggataattcatctttagggtatatttttactgttattcaaagtcaaatga

SEQ ID NO: 4887 - DNA, 2020 bp, Macaca Fascicularis
ttgattaacctacagctactgtttctgaacaacaaccttcttcggtccttacctgataatatatttggggggacggccctaaccaggctgaatctgagaaacaaccatttttctcacctgcccgtgaaaggggttctggatcagctcccggctttcatccagatagatctgcaagagaacccctgggactgtacttgtgacatcatggggttgaaagactggacagaacatgccaactcccctgtcatcattaatgaggtgacttgcgaatctcctgctaagcatgcaggggagatactaaaatttctggggagggaggctatctgtccagacagcccaaacttgtcagatggaaccatcttgtcaatgaatcataatacagacacacctcggtcgcttagtgtgtctcccagttcctatcctgaactacacactgaagttccactgtctgtcttaattctgggattgcttgttgttttcatcttatctgtctgttttggggccggtttattcgtctttgtcttgaaacgccgaaagggagtgccaagtgttcccaggaataccaacaacttagacgtaagttcctttcaattacagtatgggtcttacaacactgagactcacgataaaacagatggccatgtctacaactatatccccccacctgtgggtcagatgtgccaaaaccccatctacatgcagaaggaaggagacccagtagcctattaccgaaacctgcaagagttcagctacagcaacctggaggagaaaaaagaagagccagccacacctgcttacacaataagtgccactgagctgctagaaaagcaggccacaccaagagagcctgagctgctgtatcaaaatattgctgagcgagtcaaggaactccccagcacaggcctagtccactataacttttgtaccttacctaaaaggcagtttgccccttcctatgaatctcgacgccaaaaccaagacagaatcaataaaaccgttttatatggaactcccaggaaatgctttgtggggcagtcaaaacccaaccatcctttactgcaagctaagccgcaatcagaaccggactacctcgaagttctggaaaaacaaactgcaatcagtcagctgtgaagggaaatcatttacaaccctaaggcatcagaggatgctgctctgagaactgttggaaacaaggacattagcttttgtgtttgtttttgttctccctttcccagtgttaatgggggactttgaaaatgtttgggagatagaatgaagtaatgattttgcttttgctagttttcctttaaattatttctctcttgctctcctccccaccttttttttttttctctttttcccttctcttcttaggaaccatcagtggacatgaatgtttctacaatgcatttcttcatatatttcgtttatgcttttgtttcttttttcttctttgtttttcagtgtgggagtaggaagaggagattatagtgactgaagaaagaataggcaaacttttcaaatgaaaatggatatttagtgtattttgtagaagatctccaaagatcttttgtgactacaacttcttttgtaaataatgatatatggtatttccatcgtcagttaccgagtatagccactgtgcatcactactttgtgttaaagtgccttcgcactttaagtacattacttaaatgttgcttttagctttgataaattgaaaatattttaatgtgttgtatttttgaaactgaaaacactgtaaaatagattgatgtgtcatctatattaagtcaacgtacagtttgcttgagttatagaaaccagcctgtcatcaaatgattctagttgctaggactttgtaggcttaactataaaatatttcctttcctctgggtttaagtgattttatttaagtcaactaaggggatttaacagtggactagaggtaataagccacctcagtcaggattaataattcattaataaaatatatttaacccaaaaaaaaaaaaaaaaa

SEQ ID NO: 4888 - DNA, 650 bp, Macaca Fascicularis
aaaaaaaccaataaatgttaaatcagaatggatattctgattcaaaccttttacaagaatgaaagtacaatgtgcatgatgaagcttagaatcttgatttttgaactctggtcaacaggacatgtttgtcactttgtaacttatcaaaaacaaaccatcatatcataccaactaaaatgatatatggatgaagcaacatcaagtaaaattttagacgatggttataggacccaaatttaaagctgtctaaatgttaatgcaataaaacaagtattatttttgcatgagtacaatgttacacataaatcacaagaaatagggaagctatgtttgttgcttggaaagaaaaaattacaaaaaaacagccaaaaaaaaaaaaaatactttaggcaaagcctataaatgtaagctgtctaggagactgaattttctttgttctggatctgtgacttttttgtgtatgtgtatggtgtttatgtatgttaagatggtgtaaatatgccttatactgttatttatggcatcaacattcatttattactgctagtcatggctattactgtgaaatgagtcttttacatcaggctgtgaaaattggtataacgatactttgaaagatcctattatcatgttaatcaaaataatatagg

SEQ ID NO: 4889 - DNA, 765 bp, Macaca Fascicularis
  misc_feature (1)...(765): n = A,T,C or G
tgaccaacgatggcaatgcnnnnnntngagagattcaagtccagcatccagcannnnnntccatgnnnnnnnnnnnnnnnncccaggatgaagaggttggagatgggaccacatnnnnnnnnnnnnnnnnnnnnnnnnnnnnnnnnnnnnncagccaggatggtcttgatctcctgacctcgtgatctgcccgtctcggcctcccaaagtgctgggattacaggcnnnnnnnnnnnnnnnnnnnnnnnnnnnnnnnnnnnnnnnnnnnnnnatataccttattgtatgtgttttctgtcttcaagacgcccatttaatatatatagttgatttattagcattgaactcatagcccatagcaatataactcgtgcctggacaaagctcacctaacatgtattttctctnnnnnnnnnnnnnnnnnnnnnnngnnnnnnnnnnnnnnngatagcagtgaagcactatacttgtgagccgttataaataccgaaatcatcaagaaaaatgtgaaaaacataaccttaaatatactgcataaaggacacttttttttacagtgtgagagctaaaggccttgtttgacctcacctaggaatgtctgtcattgggtgactcagattttttgccatcctgtgaatttccatgaatgactatgaaagtgtcatgaatattgatttgggggttgcaaataataagaaatgaaatctttaggataaggaccctgggctatgtatgtttaaagacnngatctttctacttcctata

SEQ ID NO: 4890 - DNA, 737 bp, Macaca Fascicularis
  misc_feature (1)...(737): n = A,T,C or G
cacatgctgnnnnnnnnnnnnnnnnnnnnnnnnnnnnnnnnnnnnnnnnnnnnnnnnnnnnnnnnnnnnnnnnnnnnnnnnnctggcgtnnggggcatggtgaacccaccttcatgaatagcannnnnnnnnnnnnnnnngatgtggctgacatggactgctggcctgtgagccctgagtttggccaccgctgtgcccctgggggtcaggggcttgaggtttacaacnnnnnnnnnnnnnnnnnnnnnnngtggccggtgtgctgggcatggggcctgctcgcagacagcatggagcagggatgggctgtctgtgcccatgctcagcatgccctgaggggaggaggtggcggccacgggttcccgacatcggtccaggaactgannnnnnnnnntttgtgaacattcccaaatattggagcctctgtggcctcagatgnnnnnnngtggagggagacccagcatagccaggccagtatggagcacctcacgcacagccctnnnnnnnnnnnnnnnnnnnnnnnnnnnnnnnnnnnnnnnnnntcgaggctcccgaaagagaaggggcctactggtctcatcctctgcttcctttgtctttaccccgtacctctctgcatgtcccaaacccgtttttgctgtgcgctcacccctaggatgtgtactcggttgtagtannnnnnnnnnnnnnnnnnnnnnnnnnnnnnnnnnttgcacatctagagacagagactgagt

SEQ ID NO: 4891 - DNA, 698 bp, Macaca Fascicularis
acttagaagaattggtgatattaggagttcagtacttctggaaaaaaatgcaaatggtttagccaggatctttcctgtctgattcgtcactattattatatctgatgatgcgaatggttggagcgattcaatcctaagtcattaatgagctattttataaacaccactgtctgaagatcttcatttacattttgctaaggatcacttcgctaacctcacaggcttgtgtcaacaacatgatttgcaggacttcagttacactcttataaacaacacggctgtattgttaatcggttaatattttataaagtgtaaatattttattatgttttgaagggaactattgattctaaattattaaacccctgagaatgactatttaaatgaaatatacatttaagtacaattaaatgtacattgtggctagtttgttttcagattctgcacccttttaaattcattgcttttctctttattggagtttcctcttgtccatttctgatactgaaaaaaatctatcatgttaggaaaaaaacctaaattatttaaagttgcattaaacttagaggaaaatgtcaaatacgattaattatgaccagaaatgtattttgaatgtttgtagagttgtatttcatatcacattttacaaatttctttcgatttaaaggagagttctaggaagttttgtgatgtatgtc

SEQ ID NO: 4892 - DNA, 720 bp, Macaca Fascicularis
  misc_feature (1)...(720): n = A,T,C or G
gaaaagtctnnntatgtcttgnnnnnnnnnnnnnnnnnnnnnaacccctccttttattcctgttccccgtagggtgtttgtagagttaaggacctactgcatgtctgtccccagggccccggtggaaggagggcagcgcctgctcttccccgactcagcccgtcatnnnnnnnntcagaagtgaaccaagggttagacgccaaaggttgggctnnnnnnnnnnnnnnnnnnnnnnnnnnnnnnnnngagaagtagccttaaaaaaagaatgggtgtacgcagtgacttccgatggaaatctccaaaacaatattcctaagtagcaatggggttggctcaagtctttattaacaaagaacattctctttcatctataaaaaannnnnnnnnnnnnnnnnnnnnntattgaattaccagcagcctgtgaagatcagctggacgggtgtggacacgtgctggtgaagcgcacaggcttagtgggctgagcgggatcttgatcgtggggctggtgtatggatccaccgtnnnnnnnnnnnnncagaggaggatgtagggggccgtcacatcccccaggcctccctgctgtctctttaacacaggcaaaaaaggtccccggcaatataacagtcaatgaacttccagtttaaattgtgtacatttttaaattgtaagatttttactgtatattgatgcatagtgtgattcaataaattgcttgta

SEQ ID NO: 4893 - DNA, 723 bp, Macaca Fascicularis
  misc_feature (1)...(723): n = A,T,C or G
ggcacaggtgccnnnnnctgtcttggctgtcctgtgccactctggtctgtgtctagaggagtgaaattcccaaggttgggctgggagtgttttgtgcacgcggtacggggagggctgggagtgttnnnnnnnnnnnnnnnggggagggctgggagtgttnnnnnnnnnnnnnnnggggagggctgagcccagtgcctcctgggagacttgcccacgtgcagtgacccagaacaatgggatccttggcctgaactctgtgatagagcttgaccgagctgctgggggacatgtgagcctcaaatccatagaaagacaaacggccaccttgggtgcccaggacaatggtgcccggccccacgtacactcacatacttcccaggtggctcccacgttttaagattttaaaaatgaaaccaaaaaataaannnnnnnnnnnnnnnnnnnnnaaaaaataatcaactgggcannnnnnnnnnnnnnnnnnnnnnnnnnnnnnnnnnnnnnnnnnnnnnnnnnnnnnnnnnnnnnnnnnnnnnnnnnnnnnnnnnnnnnnnnnnnnnnnnnnnnnnnnnnnnnnnnnnnnnnnnnnnnnnnnnnnnnnnnnnnnnnnnnnnnnnnnnnnncagctacttgggatgctgaagtgggaggatcgcttgaacccgggagacagnnnnnnnnnngccctgattgagccactgcactctagcctgggtgacactc

SEQ ID NO: 4894 - DNA, 707 bp, Macaca Fascicularis
  misc_feature (1)...(707): n = A,T,C or G
ttgttgtggaagagacactagaaatgctcaaacacctgcaatatacagaatatatacaattttattccagtatttccctaacatatggtttaaaattattccaggtatacagtgtatgcaattctgcattatcacagaggaacaacttctttttaaaaaaataaatagttcagccatttttattaatgtgcaaaaactttatcactctaacatgctctaggtagttgaggaaaagaggtctgatcactctgtatttttttttctttgtgggnnnnnnnnnnnnnnnnnnnnnnnnngaatttgctttctataaaaggcttttatgagtttacagtagaatcagtggaaggaagagttaataagggctgtttttaaaaaaaaacaaacaaacaaaacaaataattaaaaaaaaacattttacattccttcctattctctaactacacttgggaagtgcacttcagataagtttgcagtgtgactgagagatgaaggaaatccatagaaaaggtcctcttagcgaacaaaatttagttattaactttatagctatgaaatttccctgggcatttgtttttnnnnnnnnnnnnnnnnacctctgcatcatactnnaccccgcaacannnctaccgnnnnnnnnttttgttttgaaaaaaannngttttgttccagtctgttaagaatattcaaaaataataaaggtatgc

SEQ ID NO: 4895 - DNA, 684 bp, Macaca Fascicularis
actgtgtataattctttcttcactgtaaaatatgaattaataaataaactgccactagattcccagagaatggtactattaggcatgggttgttcccttctttctgagatgttcatgtatgttacaatagatgaaataaataaaagcataaggttgtctgcaaaagttttgtttcttattgtcataatgaatttgtcatccttgaattaattttccacctctggatgcaatctgtatccatgtcctattgacatactttttacattggatctcccacttactttcttttttatttctaccactatgcatgtccaagttcatgttgttgaactattattattttgaaatatagtcatgtactacatgatgacattatagtcaacaatggaccacacatatgaagatggtcccgtaagattataatggaactgaaagattcctattgcctaatgtttagtatgcgctgcttttttatgattactttagagtgtactccttctactcatcaaaaaataagttaactgtaaaacagcctcaggcaggttcatcaggaactattccagaagaaggcattgttatcacaggaggtgacagctccatgtgtgttattacccctgaaaaccttccagtgggacaagatatgaaggagaaagatagtgatattaatgatcctgaccctgtgca

SEQ ID NO: 4896 - DNA, 773 bp, Macaca Fascicularis
  misc_feature (1)...(773): n = A,T,C or G
aaattatttcagtgtgannnnnnnnnngcaagttccaattagtatgaaagagtactttggaattgtcccatattaatcagagacagcaacagaaaaagttctcatattnnnnnnnnnnnnnnntgtctcatttcaaattttaatttaaaattatggttttcatttttgtttaccttaaagtgatgcttaaaagtggtatgtaattaggacacttagatttgttgaaagcattttggacatttgtataaaagaatttgtgataaagttaatatatccaggtgctcaccaaagaaacatgtatgtaacaactgaaattagatttttctaactgatagttttcactcatttataatcagtaggagagactgtctagatgttggggcagctctgtgatttgagtctgtaacatgttataactgaatttagtaccctagttttgttaagctattaggattttctaatagaacttactccccacctgcctccccagcctacttatagttctcttaacgacttctgggtcctgagctccctttgnnnnnnnnnnnnnnnattgcagtcagaaccatgtactgatgataaaagcctctggtagcaataaaaagttgtccttaacttttgtttctgtgacttttttccagttgtgaagaggtacaggtacctgattggctaggcactgctatttcaactagagaaaacaatagaaagaccaagaatatacttactgaaaatgaaacatgaagaaaagaggatttgaatgtgatcgagggata

SEQ ID NO: 4897 - DNA, 770 bp, Macaca Fascicularis
  misc_feature (1)...(770): n = A,T,C or G
ggatgcttttgtagtggtattgttgctccctcttcgcgttttgactacccgtcattcaggggtaactcatcactcttcacacggggatttaaattaagaaactaatcggctcatttgaacattccaaattttcttggtttcaatacccttttttttcttttgaggggnnnggaggggagaaaaacaggagtgatgtcatttctttttcatgtattccaattaaagaaacaagggcaggtcgtataatggcatattaatacattagacttaatcaagaacccctgtagcttcttgatgtgttttatttcttatctcttcgaattcctgtttggttacttggcttccaatggaggtgaacttaacaaccatacttgaatactccgtctcgactttgtaaactgtggctacttgaaatgaactttatctggggctgatggatgaatggtagatttttccaatgtctcaaggcaataggatgtgtattaaactgtagatattcttagtacagtaaatttacgcagataattttattctgtataatttttaccttttaatattttttccttccacactactggtttgcctcctgagctacccctcctttaccctcccttctccctcagtgtttcagtaaatttaatttagggtgcctagaaattgcaagtatgtatcctttttgatttgtattttattataatttacacaaacaactgggtttgtgaactgtattactcctggtattctttaaaatattgtgggtgtttaataaa

SEQ ID NO: 4898 - DNA, 767 bp, Macaca Fascicularis
  misc_feature (1)...(767): n = A,T,C or G
aagtctcatttcagtgcagtgggctggatggtgggggaaggnnnnnnnnnnnnnnnnnnggtccccgagggtccattgagccctctcaggccagctccaggaatcctggcctggtcacagagcagagttgnnnnnnnggtcctagtggccgtggggcctgggcaggacatcatctctcagagggtnnnnnnnnnnnnnnnnnnnnnnnnnnnnnnnncacggccctccaccagctctgggttctcnnnnnnnnnnnnnnngctgcttttccnnnnnnnnnnnnnnnnnnnnnnnnnnnnnnnnnnnnnnnnnnnnnnnnnnnnnnnnnnnncattctccaccacgcagagcactagggcaatgccccagaggcacaggctggagctataaatgcgtgtggggtcaaagggacagtcaggtgcgagggccagtagttcagagctcccnnnnnnnnnnnnnnnnnnnnnnnnnnnnnnntgggtggcaaaggtcacggcgatggaggccaagaggccaagggcacaggtcagagagaggagagcacaggccacgctcgannnnnnnnnnnnnnnnnnnnnnnnnnnnnnnnnnnnnnnnnnnnnnnnnnnnnnnnnnnnnnnnnnnnnnnnnnnnnnnnnnnnngcacaagtgacnnnnnnnnnnnnnnnnnnnnnnnnnnnnnnnnnnnnnnnnnnnnnnnnnnnnnnnnnnnnnnnnnnnnnnnnnnnnnnnnnnnnngcggccgtgatgaagctcacgtggcccag

SEQ ID NO: 4899 - DNA, 717 bp, Macaca Fascicularis
  misc_feature (1)...(717): n = A,T,C or G
atttttttagtacnnntgtgccagtgnnannntcagtaagaaataagnnnnttgacctnnnnnnnnnnnnnnnnnnnngnnttaaaaacaaaagctcttatatacatgaaataattatattttaattaagcctttagcttagttgttnnnnnnnnnnnnnnnnnaatgaataagcagcatttttcattgtacttaaaaatgtaaaatatctgcatgccactaatctgtaacattttaccagttcnnnnnnnnnnnnnnnntgactttatgtgtgtctgtgttgttttgaagataacaaaggaagtaatactttgtaaactgtttaaacaagtgtttaaacttctattggcaacatttattgggctaagcagttactgaaaactccatatagttttattttccatttgaaannnnnnnnnnnnnnnnnnnnttatattcattagggaattaaagactaatttgccttttaaatgtgaagttgaacattgtgtggaaagtaaatgtgtgataaagcaaaatgtataaagtttgaaatattatacttttaccctggataattattcaggaccccagttggcccaaataggtgcaatttnnnnnnnnnnnnnnnnnnnnnnccagacttaatgctaaggtaaatgtaaactgttttaattaattagctttcaaagatataatgtatctatttctnnnnnnnnngatatttccaaatgaaaa

SEQ ID NO: 4900 - DNA, 756 bp, Macaca Fascicularis
  misc_feature (1)...(756): n = A,T,C or G
tatgtgcttnntgtgcaannnnnnnnnnnnnnnnnnnnnnnnnngtttgctgagcccctttgctactgatgtgaggatccttcaacagttcnnccgatgcctattatggcnnnnnnncaatatggtggtgtaatggaagtgtaccactggtactaccttattaggnnnnnnnnnnnnnnnnnnnnnnnnnnttatgccttcaagatgctacacattccagaattattttccttggccatccaagtgaagtagaagtagattgttggattgcaaagaaaataataaagattcccctaaaggaatttatgagcaggcaacttcattcctaagatattgggaggaaacaagctgtaccacaacaaatcttnnnnnnnnnnnnnnnnnnnnnnnnnnnnnnnnnnnnnnnnnnnnnnnnnnnnnnnnnnnnnnnaactcaatgatgctataactccaggattggatcttaggtattctggaatctatcccctgagacttgggtatttctcaatttacacacatgcaaggaggaagagaattttttgaacaaaatgactggctttgacaaaactatcttgctctttttaaatgtcacttgatactaaaacgtgatttaaaagcatgtaatgcctcaggagtctggcacataaaaccaaattatcatgctcaggatcttcagcattctaaaggtacatgttagaatgcagagtcctgatgacctgttgataaacatttttttattaatgaactgtacattaa

SEQ ID NO: 4901 - DNA, 1807 bp, Macaca Fascicularis
aagttggaacgtgccctggggtgggggaggcattgcccagcctggctggtaggttcctctcagcccgggccaagggccgggcctgtctccttcgcaagccagcggaaaccggggctggaaaccccagacccgccacttcccccagaggtgcagctgtggccgccaccggaaatgggccatcaggaaggggtctgcgggaggtgaggggctagagggcaaggaagcagctgggtaaggtcagtctgggatggggaggccttgggggtggggcatggaagcccccagttctgttccctgcccatgcatgttgggcccatctcagagggcagcctccaccctgcaggcctccggctggccttggttcatggtacccgacagcccctcctggggcgagccagggctcccccaccccctggtcatcttcccagatgcccctcagtcccgtttctccccagatccacaccttgctttccccgtcctgttccagaatgcagcctggtccctctgccatcctgtcctcccagcctgtggtctccctccacacacgccagtccaggcacccttccttggtgcctgacccctcctggctgccagcagcccccttctggccactgcccactgagggagggggctccgtctcacccctccccagcctgggccactgggcctgatcctggggacctcgctgccaccccaccccactctgccatgctgcgggggggtcagtgcatgctgtccctagtttgaaacttgtgtcctgtgggttcctggtggggaacccttgtgggaaggccattcccagcttgctgggtttgtccctgcttcccagccagcctctgtccccaggtatgggctggggtctggcatgggcctctgcagccggccacagactgaggggctccagacaacaccgggaacagcctcagggtgtctgtggttgggggctgcatacagggctggggtcctctgctcagccttgacaggtggcaggcaggttgtcagccggatctgcaatctcatgggggcatggggtatccttggcccacatggttatggcagaattcatgtcctggtggctggcaactgggtcccacctctctgctggctgttggcccctcccagcatggcggttgcttcctcttcagggccagcaggacaggtccgaatttctccctctctggcattgaaacactctctggagggcttcctgattgggccatgcctgcctaggatgctctcccttttgatgagctcaagtcactgcttagggtccttaatcacatctacaacaccctccccacctggcgagtacaacctgatcagggaagggatgccctgctggtggaggggccacaggcgtgcacaccaggtgggcatccggtgggagagggcatcccacagtcctgcctactggagggctggagggagcagagtagagagggtgagtcggagggtggtagaagggccagggggccagcagggcgactcagcagaccctgtctcaacccgtaggtctggagtgggactgactggctccagacagaccatgttctacacagaggtgacagacgcccagcgtagtggtccagatgggggcctggcagaggaaggtgagctcattgaggtggtgcacctgccgctggaaggcgcccaggcctttgcagacgacccggacatcccgaagaccctcggcgtcatctttggtgtctcgtggttcctcagccaggtggcccccaacctggatctccagtgagatccagggttctagacagaggccagtcttggccacttaccctacattctgcag

SEQ ID NO: 4902 - DNA, 511 bp, Macaca Fascicularis
  misc_feature (1)...(511): n = A,T,C or G
atatattgtgactgttccannnncattcattttatagaattggtcaaaagaagccttatgcacagccttatttgaaaagaaagttctttgtctgaatcaggaacatcctgttttccagctgctacatcccctttcagtgtgtgaattccactccttaccaaatcacttagaaaacactttgacaagttttaaacttaaacactgaatattttatgaagcatacataaagaaagaaaccaaaatttggtgcaggtatttagtcatgggtagaacctgttaatatctgaatcatatataatgggccnnnaacatggaactacctcatcgccccccnnnaaaatgtggccaactattaatattctttgtgacatttacaccaagcagcaaagtaagtatttctggtattataaagtaaacattcaaattctctgttgtacaaaactcatgtaacagttggtgggacaaaatatccaaatgtgggttcagagttcataggtggtgaaaactgagg

SEQ ID NO: 4903 - DNA, 727 bp, Macaca Fascicularis
  misc_feature (1)...(727): n = A,T,C or G
tttgtagctanntcgtannnctgctggctgaaaactgtgtctatgcaaccttccnnnnnnnnagtgtcaaccagctggacgggagagagtactgttcctactccaggactctcacaaagctcatcagctgtacttcacaaaaaaataataatttccatgttttnnnnnnnnnnnnnnnnnnnngcaacatcttacagactactgacttgaagacaacctcttttatatttctctatttctgggctgatgaatttgttttcatctgtcttttcccccttcagaattttccttggaaaaaaaatactagcctagctggtcatttctttgtaaggtagttagcaattttaagtctttctttggtcaacttttttttaatgtgaaaagttaggtaagacacttttttactgcttttatgtttttctgtcttgttttgagaccataatggttacacttttggttcctaaataaaacattaaaaaaannnnnnnnnnnnnnnnnnnnnnnnnnnnnnnnnnnnnnnnnnnnnnnnnnnnnnnnnatttgtgatttttgtttctaatcttgatgtaaatttacactatttataaatacatatttattgcttgaaaatatttgtgaatggaatgctgttattttttccnnnatttacctgccattgaaattttaaggagttctgtaatttcaaacactactcctattacattttctatgtgtaaataaaactgct

SEQ ID NO: 4904 - DNA, 803 bp, Macaca Fascicularis
  misc_feature (1)...(803): n = A,T,C or G
gatattgaccttatcattgacactgatgaggctgcagcagaggacaagcgnnnnnnnnnnnnnnnnnnnnnnnnnnnnnnnnnnnnnnnnnnnnnnnnngcagggacacagacctctggggaagctaaggatggtcctcccaagaagcaggtctgtggggatagcctcaaggctgaagaaaccgaggaggtgnnnnnnnnngaaactagaaatctgcctcactccaaccaaggcaacaaaaatgannnnnnnatgggggttacggcagcaagnnnnnnnnnnnnnnnnnnnnnnnnctcagaagtgccagggagccaagccagttctaacccagtacctggggatggattnnnnnnnnnnnnnnnnnnnnnnnnnnnnnnnnnntatgtgatggcctatgtggaagtaagccagggaccccagcccagcagctctggaccctggctcnnnnnnnnnnnnnnnaaggtatatttgagtggcaaagctnnnnnnnnnnnnnnnnnnnnnnnnnnnnnntcccgttcctccaaagcccacaatcagannnnnnnnnnnnctnnnnnnnnnnnnnnnnnnnnnnnccacctagcactcaggtggatcggaggtannnnnnnnnnnnnnnnnnnnnnnnnnnnnnnnnnnnnnnnnnnnnnnnnnnnnggagggggnnnnnnnnnnnnnacatatcactgcattgccctggacctcctcctttatctcagtgcctgaggtacaagtaagnnnnnnnnnnnnnnnnnnnnnnnnnnnnnnnnnntttaagtctgaannnnnnnnngaaa

SEQ ID NO: 4905 - DNA, 1984 bp, Macaca Fascicularis
aagtgtccgaggaaatggaacagcagggagggggacatcacacccaccaccaaaacttcttgcaaatctcctgaatagatgcttacttagcacgtgcatctacttggaatcgaacatctgaaatagttactgtttgtggtgcactgactgtaacttcaaacttgggcagcactagaaacaaagagaaatatacttcagtccccataaacactgggctgccttggctgttcttgattctttgattttccacgtataccgcagaatcatcttcaatgtataccaaaaaaaaaaaaatgctgggattaattggcattccactgaatccgtacatcaaattagaaagatttggcatctgaaaatattgagtcttccaatccatgaacatgatgtaatcctccattaattagctttaggtgtgcagctcaatgagttctgataaatgcatgcagccacatggtcgtcacaatgaagactccagcatccttcagagttcccgtgtgcccattagggctcctcccccgcagcctccctcctggccctcatatccacagacctgctttctcacactgtcattttgccttttctagaatttcaggtaaaagaatcctacagcaggtaccttttgtgtctggctcctttcactttgtgtaaagctcttgaatgttagatgtgtatcagtaagttgccctgttttattactgaatatattccactgtatggggataccacagtttttttaatctatttatcagctgaaagccacttgggctgctgtcagtttctggggagcaggaggaagctgctggaacattcttgtacagattgttgtatggaaatctgctttcatttgtcttggataaacacttagaggaagaattgctgggtaccatatttgactttataaggaaatgctaaactgttttccagagcagctgtgccatcttgcatgtccgtcagcaccatgtgagttcacctgtgctgcagccttgccaacatggatgtgtttttcaatttcacctgttctactgcggatgccattgtggtttcaggctgcatttccctaatgaatgatgatgttctgaatcttttcaggcacttttttttttttttttttgccatgttgtatacttctctggtgaagtgcctggtcaagacttttacccacttttccccacttctttctctctcactctctttggatatggaagaattctaactctgtattccataatgtctaaacattcaaatttagagttgacaacaatacagcaaattattcaagttgctgtcaaaaaaacccctgcgttttctaggattaaaactgtgaataaagtactggaagaaaaaaaaagtcatagactcagttgcaaaatgacaacatttaatgggatgacaaggaaataaaacctgataagaagccagagcagattgcagactgttcaggatgccagatggttcatgaaatttttccaggtttgatacagaagaatcagtttgttaaaagaaatggttttccacctgagatttaaaacattgtttaaacaacaaacacatgtttgtatgtatatataaatatttagatataaaaacatgcatatataggcacatagacatgtatcatacatatacatgcatatgtacaaatatatgtgcctaaatttttactgacctgtcaacttacaaaacaaaaatgagagatttataaaaggtacatatatagctgtgaattctataaagctatttttaaagaaattaatacaatcttaacgactatcagaatactcatgtagtacacagttacacaactctaatgaagtaccaaacacttgtctttcttcaaccattgtcctatcttatttaggttttcattttcttattagatgtgttttcaatggtttatgatgtaataaaatttctttacctcttccaaaaaaaaaaaaaaaaaaaaaaaaaaaaaaaaaaaaaaaaaaaaaaaaaaaaaaaa

SEQ ID NO: 4906 - DNA, 769 bp, Macaca Fascicularis
cagatagtaaataatgtaacctttgcggttaaagaggataaaatggagaatattatgtgggtatttatatgacctttgtaaccatttataaaggaaaaaccacccgacatagtaatgcgaacctagagtagcagctactccggaagctgaaacgggaggatctcttgagcccaggagtttgagtccagtccagccagggcaacacagccagacgcccttgtgttttgttttgttttgttttttgagaagaagtctccctctgttacacagggtggattgcaatgacacgatatatgtcggttcactgcaacctccacctcctaggttcaagtgattctcccgtctcagcatcctaagtagttggggttacaggtgcccacgaccatacctggctaattattgtgtttttttagtagagatgggttttcaccatgttggtcagcctggtctcaaactcctgacctcaggtactccacccaccttggcctcccaaagtgctgggattacaggcgtgagccatggtgcccaggcagacccccttctttaaagatgtaaaatcattcttagtccgtgggccttacaaatcaggtcactggcccattgcttgtagttgatccatatcatgcaccctcaaaacggctctgtcaatgagtgtcttcagtgggattctgagaataaatttatattcttgctaggtagaacaaaacaaaaatgacagtaatatcaaggaatttctcatcccttttttccctccatttgtatttattgc

SEQ ID NO: 4907 - DNA, 1955 bp, Macaca Fascicularis
tttttttttttttttttctacagaaagtgctatcgtggttaaaatccaaggttattttgatgcatggcaagctctcctcatcaaaccagacatcttctttaagatttcttggctatataaaaagtatgagaagtctgtgtaagtaatacaactttggaagatttatgagtacaattggattggttttttccccttgtgtctttgctgtttttgttggcctctccggtaacttttctgctctctagagcccacagggagctgttgattaggttgctgatgaaacactttttacagcaatctggctgcatttggccagaccagagaataaatgaagcctttggctgggcggcttctcggcaaggggtctgagtgtgtggtctcggagcttcaactcgggaactaggacactggtgtgttttgagttgaagagaagggttgactgatcctgtcattaatatctgtcaaaattatctttgcacaactgaaaatctggaaccacagaatcaatttatagttgtgttgtttttgaaagaatttaacataatttaacttgtaagaactgacattagtctcaatacaattttttcttaatgagtataactaacttcaataaaatgtgtgtgggtttttaaaattatgtatcttgtgtgttgggggtcctgaaattgtcattaaatggctttgttttgatcttagaattgtccatcagaaaaccggacaaatgcccagtggcctataggctaatcaatgggtttgtagagtacaagtagccagtcactaaacactgctacctctaaccaccagtggaaagcctatggaatctagaagcctatgctttgtgtcctgtttctaatggccttgggaagttatttaaagtaagatataacctatcttctagagtaggggcataggttaatgacatcatataagtaaggaaattagcatagagcatggcacatagagggtactaaatatgttagtttctccctttcctgtgttcatatcttcctcagatgttcctaaccatctcaagttctccatctctaaacgtccccaagcttgtctgaagacctgactttattctacttgtggattttaaaattcaataatattagtttctagagaagaagccaacttgatgttgttttgtttattctctcatggttgatgagtactaggtgaatgttttagacacttggttctttatacatttcattcccaccagagcttattgtgacttgaaaacaaatagataaaagattcatctcttccctgtgatcagagttggtggcagtggtagtggtctgaagagttcattacatagttcttagtcattagtttagccttggtcttggccattggacctatagaaatttattgtacaagtctgtgtaaaggtttctcttaggtttctgcagttccgtcaaggaactctctatgaatttacaggctaggggcactccaacacctcccagaccatttggggctagtgctcagatgggaatgctatgagcattcttggcctactaggaagagggcaccacagcccaactgagtgaatatctgttaattgtatgtaggagttgctcagcaaacatttgatgaatgcatggatcagtagggtatttaagtgtatcagtgaacatgtaaattagaatttgaaagatggatttattgtctttaacgtaatacagaacattgtcccctgggataagggaacaatacacttacaaagaacacatacacttaaggacagagataggaaaaattgaatttagattcaaggtgactttatttttcatctagtgtgatcccttcactttaaaaggatgtagggcccagagactcaaagtatcttacatagaaagagaacaacctgaactaggacctgaccccaccccgtccaagtgttctttcaaccacactgccaaaatacctatacatatttatgcgta

SEQ ID NO: 4908 - DNA, 485 bp, Macaca Fascicularis
agtttttgaaagccaagtgaccagtaattccccagaggctgacccactggacattctggaacttgaatcactaatgggagaagtgatgagggtgaggtggggtggggtcaaggttaacgctaaataacaaacactaactcaacctgccaaacaaaataaatttgtggaccatactttatagtgtttagaattttatttgcttctgttgtttgtccttgcccctcccgggctgggatccacatgattttatactgcctttatgttcttcccatgctgagtatgtttccctataaatatggaacgttcagttggcagggactaaacaaccgaatgactgagccagtcatttacattaggcactatactagtttaggcacagtttgctgcctaaatcctgaatctacccatcattccttctcccaatgacctatttccacggcttgagttttgatacaaagtcggaaacacgacagtaatgaacttcc

SEQ ID NO: 4909 - DNA, 994 bp, Macaca Fascicularis
  misc_feature (1)...(994): n = A,T,C or G
gagtgcnnnnnnnnnnnnnnnnnnnnnnnnnncctctgcctctcgggttcaagggattctcccgcctcagcctcctgagtagctggnnnnnnnnnnnnnnnnnnnnnnnnnnnggtaagttttgtatttttagtagagacggnnnnnnnnnnnnnnggtcaggccggtctcgaactcctgaccttgtgatccacccgcctcggcctcccaataacttttaagttatgttagcgggnnnnntcaaggcctgccctccccatgnnnnnnnnnnnnnnnatgagctcaggaaacagtaccggctgcgtggcaggcgtgggcgttgcgtgggaggacgtggcctttgaacaccgctgtgttctcagacgtccttaggagatttttttgggtcttatggggactgtattaagttcaggcaaatcatgctaggtgtggagagagtctgaaatatgtcagtaaagtaagtaggagtgagcgattgtgaatgtgtaatgcaaatggaaaaccaggttttattgtgttaagttattcaccagggaaccaactgtagttctttcnnnnnnnnnnnnnnnnnnnnnnnnnnnnnnnnnnagttgcagaaaaggaagtgtgtggagagaaagagagcgtttcaggtgggtcagaggacgccatccacagtggattcatgttcgtttgcagggtggaagcagtgatttttaagaccactgattaaaaacaaacatccctcagtgtatctgagagatgctgtttatttgttaatgaaaaagcttttttctccgtctcttaaataatggctttcatgtaataaggatatttttagtgaaaagttattttccttgcaaattacagacctttttaaaaaacaatttgagcnnnnnnnnnntcatttgacacttttactgtttctaaccttaggaanngcagaacntncgtctggcagacacaacgttttcagtnnnnnnnnnnnnnnnnnnnnactccatttcgctttgga

SEQ ID NO: 4910 - DNA, 701 bp, Macaca Fascicularis
  misc_feature (1)...(701): n = A,T,C or G
aggtcatnncagctcaatctcaataaccctatgaaagccctggtctgttgtgttccttcaccgtacggtttctgtaataaaaagtgttaatccatgttaatctgtgtgaaaattattgcgtgcaacagtattttctcgtgtacctctttttcctatgtgaattgtccctcttttttatttataaatgtctacttttgtttttttaaagacaaaccaatgtgttgtagacctatatgtaacctattccttagtctcatattataggtatgttataagaatggatattttacttggctttagaatgttttacaagaaaactaattcttaactgatcaagtccttgctactaaaatgcttgtgtttttcatcatgacgtcgtgtgcttctaaattaatcattttcgttgtagaaaaatggagtgaatttatattagtcttggaaactaataatagcattgtaaatttatgagatgattttaacagaaaaaatatagaagaatatagttattttaattgtaatattactaactgtagggtgagaaaaaggggggtcccattgtggtgaactatgttatagcttgttactcacagtttctttttgatcattttttcggtctccgaggtgaaacgacttattaattaaaatttgtaaactcacatatgcatattgtatatgtgtagaaatgtanntcacactttgtc

SEQ ID NO: 4911 - DNA, 1703 bp, Macaca Fascicularis
  misc_feature (1)...(1703): n = A,T,C or G
ttaacaatgctaacatttgttcattaatttgccaaatgttctctgtctccttgtacttaatacatataaaccagatttttgtggatgcctctggtagccttaaaagtcttcatagaaaatgtgaaagaaaaagtgtctcctcacatttgacatacataaatttggattttgtatggcaaagtaaaaattaattttatgtaccaaagggttaactttcaaaagttgtaaaggctaagcggtagctttcagtcttgggcagtggttggcttcatatgaaggctatagaaaaataatttctagagttcaaagctccttgtatgttttatcattaattgattttctcctcatcttcctcccgctcctcttcctctttctctgcttcctttttcttcttcctataaaagaaaatactcttcattatttgagtctcaggatgacaaagttgtgccatcccttttggtgttggggaggtggatgaggagcagtggtgtatcaaataacagggcttgtgatatttctaaactttgttttactgaaatcctactggacatgtcccatttttaggttcctccaaaactactgaccacatcaggtgttggtaccgttggttggatgttctaaatagatcccttaaatcatgtgcttttacacagatacttctatacctgtcaccttaattactaaactaaacggaatgtgatttgggattagagcaaactcaggtaaatgactagtaaattcaatagaacctatagacaggtattatattaactcaataatatctgtagacaactagtttcagtcatttggaatcaggtaagttcttattctaaagtccgtccattgagaaatagaaatcattggagaagaaatgcaagggacgtatgttcattgaagataattcttaaaacacaaaaaagcaaaagaaaggaggatagtaaaaattatccataattgcatagttcagagacaaatcattcaacatttttgtttatacccttccgatttttctttgttttccaagtttatgtgttttctttacagaatcagaaacattctgtatgcactctgcaacctgtcttatctttgctcaatatacaacaaccacctttttgtcataaaattttcttttattatgtcccttttaatgcctgtgaaatattctgttttatgaattagcttcatctaattaacttatctcctgtcattgaatattatttgccttagttttttatactatagttaattgtgccttaatgaacatcctgtcattaattttttgtgaacacatcgaattttctttcttagaataaattcacaaaagaaaaaatgctaaattaaaataaaaatttaaattattgtttgaagacaggagtgggggctcacacctataccctcagctannnnnnnnnnnnnnnnnnnnnnnnnnnnnnnnnncaggagtttgaggctgcagtgagctatgatcacaccatggcacttcagcccaggcaatagaaccagatactgtctcaaaaataaacaaaatcaaataagtgaagaaaaataaataaaatattgttttacatttaaagacttttaatagacatggtcaaattttgattcttaaaatttgtatcaatttaaactcctaccagcaatacataagaaagtccactttactcagcagcagtagttattgttacaaaaaaaaaaaaaaaaaa

SEQ ID NO: 4912 - DNA, 749 bp, Macaca Fascicularis
  misc_feature (1)...(749): n = A,T,C or G
ggaaggccactgtgtgtgtgcgtgtcagtacttttctagtaaaatnnnnnnnnnnnnnnncttcctttcannnnnnnnnnnnnnnnnncccccactcccccannnnnnnnnnnnnnncnnnnnnnnctcggattggttaaggtctttgtttgtattgcatatctccccaagtcttccgtggccatctgcatctgtctgaatggtgcaagaaggctgccagaccttacgcaccgatttgcatgttatgttttacctgccccgtttttgagacagatcctcaatgtcggtggatctccttgagatccttatagcctattacattaatgaagtaacggtgagtttttcttgtattgattttcacagctttaaggaacatgcctgagaaatgtagctgaagtagaggggatgtgagagaagggccaggccagcaggccaaccctcctcccgtggaaattcccatgttgtttcaaactctgagatagatgggacttaacaggcagtggggtctgcgtccccctcttcagcaccccctgtgccccactttnnnnnnnnnnnnnnnnnnnnnnnnnnnnnnncagagacccccagctgaaagcttgaatttcgcgtactggctctgtgtgttgctgnnnnnnnnnnnnnnnnnnnnnnnnnnnactaaggtggtcaatgctatgctgccgttggtatacattgtgaatttttatgtaaattgctctgcaaagcaaattgatatgtttgataaattt

SEQ ID NO: 4913 - DNA, 693 bp, Macaca Fascicularis
  misc_feature (1)...(693): n = A,T,C or G
gacaggagactggggaannnnnnnnnnnnnnnnnnnnnnnnnnnnnnnnnnnncagggaccccgagctagcacagaagaccccaacnnnnnnnnnnnnannnnnnnnnnnnnnnnnnnnttttatgttcctgtttattctatcaggcaaacactttcaaacaccagcaaggcaacatttggaaaaggggaggctcctcagccccgactcctgccaataactggctgtatgctcttgtgtttagcctctctggaccttttgctcctattgatcaaatagaggcttgaactatttgaacgtcaaggcttgtgcccgactctacaattccacaaccttgannnnnnnnnnnnnnnnngagaataagacggggggaaggagtggaagggcctccactcagtgaagaaaggctcatggaccccccatgaccactgggtgccagggtctatagggggcctagggacacgcccccaggagagctgcctgggttcttgctggggtttgagcccttgctatatgacctctctgtgcctcagtttcctgaggacacaagaagcaaataattcagcagggaaganaggaccnnnnnnnnnnnnnnnnnnnnnnnnnnnggatgttggaacttaaggctcagaacccatgtcattgtcctatctttggaccctgggatggttgtccagagtgctggctcatccct

SEQ ID NO: 4914 - DNA, 730 bp, Macaca Fascicularis
  misc_feature (1)...(730): n = A,T,C or G
ttgttttgcttttttcttgctagggtgannnnnnnnnnnnnnnnnnnnnnnnntcactctcgtgggtggtgaggacagaacaggaacctctgccctctgtacctatctgggccctgtgggctcccctgtcctggcttccatctctgtctcagcgaccatccagccctgcgcaggaacacatgttgcttagaaaagccaaatccagcctttgtctctgtctcctctggtctcatgatgtgcatctgtcgccttgannnnnnnnnnnnnnnnnntatcaatgtctgtgccaattttttgttccctccccaacctccttccccatatgactttatttatgtaggatgtgtgctgtctaatgatgggatgaccacacttttccatgttctaaaagtgctcctctcccacagggccccagagctgatggttgctttgggtctagagctgtgtcttaccggcctcctgcctcgaaagcctgtgtggtggcaaagctggtgaggggctggggaacgcagcgttctccaggaggggacccggctctccttctgcaatgcaggcaaaggcctagatgccagtgtgacctcccacaaggcnnnnnnnnnnngactccctgaccagaagtgatgcttttttgcttcaggccctgggtttgaagcagcctggctttctctcagtaagtggctagtgtcttagcagctgcaatctgagctcagccacctnnnnnnnnncgtgg

SEQ ID NO: 4915 - DNA, 3947 bp, Macaca Fascicularis
  misc_feature (1)...(3947): n = A,T,C or G
tataatgcaatgctctgccaccccaagtgtggctgtaggagtttgggttctctaggtggaaatgctttctaaggcatgcaggtggcaaggggatttactggagggttatggggttgcacataacatgctggaacggcttcagaaccactggaaccagctctgaggagcagactggggcagagcagctgagctgagggtgctacatctctccttgcactgatggctccaggacccagcctccaggaggaagaggagttcagaggaatcagagtcagatcccgaccatggccaggtgagaaaacagcttcattggcagctccaccaaggctgaacggtagaggaaacttctccgaagatatcattggtgctgcccacacaaaaagaagaaattgatgcaacagagtacatccaaccccagcatccgccataatgcaattctgagtttggcaggatctgaaatctgagactcaactgtatctttagtgtaagaagatagttcattcaggtctagtggagaacataatgattttaactggggaataatttgttttaacccacataatctcccttaagaaaatactatgtgtcataagtttaaacattttagctaattgaagttatttttgttcagggatgtgtgatatttcagcaaaaccagattttagaacctaatcctgtagccatagtgatgggaggcaggaaaattggactctgagttgtctactctgtacaggagaaaagggtagaaaaatcgtatgtagaactattaataaatttagcctagaaactcaaaaatgcatttgctaaaaaaattgcgtttgctatcgatttttaaaaatttacttagtatgactttgacttattgcctaagtcttctttacccagctaggaatataatgggaatgaaaactttaattggaagcaagaggaggatactattgagcttccccaaacagctgacatgtattgagggccaaggatagtccaggcttgttggcttcatgacacaggaataaccttattggtttcattcttcctattttataagtgagaagactaaattcctttagagttaagtcatatggacacattgtctaactaatcaccagcagaatcaacctcaaacctgtcagaccatggggcttgtgcctctggtcacctcctaatgtgcctccttaacctaaggcaggtgctcccacctttgtccatgagggaatcccactattgatttgcgactctagggtacaccatgtgtgctcaccgtggagttggcagatgtgccttgggctaccccagtcctggctgggagctggaggaccaccctctcagcacatgctggggagcaggaagctgaggaggaggaagcacattcattcatgtctctagttcctatcgaaagaattagagggcctagcacatagaagaccctcagcccattttatagagtgcgagtgtgttactattgacgtacttggcattccaagatgtcccttggggttttaggactggatttgccagacatttttaggccagcagcaaacatgactgaaaaaattgtgtctcaatcttaaaacctttacaatctattgaggcctcctagggtagaaaaattaagcaacatggtggaaaggataagcacatgatgtggtttgtccagcccagtaggcctgtgcctgcctctgtcaacctgagccaacccatgagataactcctggagactctacttctcccctgtgagaggaaaagttcacattttattatttaagtagacttctgtttaaggaacataaggcattgtccagaaaaaaaataatacaatgtaaagcttcccttttaaaaaatttttttggcccaggtatnnnnnnnnnnnnnnnnnnnnnnnnnnnnnnnnnnnnnnnnnnnnnnnnnnnnnnnnnnnnnnnnnnnnnnnnnnnnnnnnnnnnnnnnnnnnnnnnnnnnnnnnnnnnnnnnnnnnnnnnnnnnnnnnnnnnnnnnnnnnnnnnnnnnnnnntcagttactagaaagtctggggcaggaggatcctttgagcctgggaggttgaggctgccagtgagctgtgatgatgccattgcactctagtttggttgacagagcaagacaccaactcaaaaaaaaaaaaaaaaaaaagaaagaaattagtagtattgagtgcagtatagcatcatattcaagagtaaagaccgtttagccatattaccatattcctcacttcaaagctcttacagtttagggtatacatatgtgatattcacaacaaaccacctgggtgtatatcagtatctcattttatataaacggaatctgagtctcagagataatgttttttgttgaagttttagtttattcactgtttaaggagttaacattccctgtcaatatttgtttcttaatataaatgcccttactctgaatctctttggaaccaaagggcaggatgcctacttgggaaataattaaacaattgatttgcaaagttggtgcaagtatggaaacgagaagggagcttgatgagcttcaatcaataagaatttcttcagggcttccatgcaaagtagctgcttcttgatggaggatagtgaagaataaaattgtaagcctaatcataaggaggttgtaatctctccatggcagtgcacatatccatgaagcaatgaagcgtgatttaagatcttgtatgtgtgagaaaataattggtctgctgtgtaactgcttcatgaggaaatagaacttgaacttgtttctgaatacagttttagctgagagacctggaatttgaatttataccgttgcctggcctatcactgatgcttctcttccattttattcagtgacttatatatttggaaagcaacatagacttcaaaatttgggctaatatttagcaattgcccaccttgtaaaatgtattgagataaaccattttaatctagcagtctttgaaggcacagtgattactgccattttacagataaaggaaccaaagcttgaagagtttaaataagcaatgaattcgttaatttcacattgattttggctgaattcttttaagaggtagttttagaccctgagcttaaatttgtcagcacatttagtattgaatactttcacgttgaatttttataaatcacatgaaatctcgctaacgtttttgagcaaatcatctcagattcctactctggcccatgaatacagccagttctgttttgttgttgaatgtcaccgtgttacccggggtgtaggagaaaaattcttgactggctagagtgggtgcttcgtctcatcttcactcctttctccgagtggggatgaaaccttggtttgtctgacccatgtgctaaactactctactctcctgcattctagtttctgtaagaattcttatcagtgggccgggcgcggtggctcacgcctgtaattccagctctttgggaggcccaggtgggcgaatcacgaggtcagnnnnnnnnnnnnnnnnnnnnnnnnnnnnnnnnnnnnnnnnnnnnnnnnnnnnnnnnnnnnnnnnnnnnnnnnnnnnnnnnnnnnnnnnnnnnnnnnnnnnnnnnnnnnnnnnnnnnnnnnnnnnnnnnnnnnnnnnnnnnnnnnnnnnnnnnnnnnnnnnnnnnnnnnnnnnnnnnnnnnnnnnnnnnnnnnnnnnnnnnnnncccccccacaacaaagcagaatttagatcagtgtgccaattacaagtaaagcccctcgggaagctgggtgatgccatgcattatagatctacgaattccagcgcacgtacatcatgtgttgaccgcggcgtttcagttcctgatggaagagcttaccgataacatacggtgtttttatcccaccgtttggggccatgtgctgggcctacaggagacctggaaaaaaaggaaattacaaaacaaagcaaaaaaaaaaaaaaaaa

SEQ ID NO: 4916 - DNA, 764 bp, Macaca Fascicularis
  misc_feature (1)...(764): n = A,T,C or G
cgagatgtgannnnnnnnnnnnnnnnnnnnnnnnnnnnnnnnnnnnnnnnnnngagaagcatatggcagcaaacagaaatgaaaacaatatgtcccagccagggggaaaannnnnnnnnnnnngattataaaaatcaatgaagtactctccacctgggtcagctgaaattcgagccctcacaggcctgtaagagaagttaagcagaaacatctcggggggacttctaaaatttggtgaaaacaaggccttgcaaccccaaagaaactttttccccccccctccttgaaacagggtcttgctctgttgcccagcctggagtgcagtgatgcggtcatggctcactgcagcctcaagctcctgggctcaagcactatccccacctcaacctccttagtagctgggactacaggnnnnnnnnnnnnnnnccagctaaccacagaaactttcatctgtttattctttnnnnnnnnnnnnnnaatacctaagacaggtagaaagggnnnnnnnnnnnnnnnnnnnnnnnnnnnnnnnnnnnnnnnnnnnnnnnnnnnnnnnnatcaggctggtacaggatgccttaaggtgatgagaggtgagggtgcatgaagaataatgagcacagggaagagagaaacaggacaaagcaacagataaaannnnnnnnnnnnnnnnnnnnnnnnnnnnnnnnnnnncttgtatttctctgcacaatgtaaatatccttgctatttcaggatggcggctggcctgctcagtaacatac

SEQ ID NO: 4917 - DNA, 2742 bp, Macaca Fascicularis
gaacaagcacattgtcgggtacctcaaatttttcaccactctacacatgtctacaaacaactgtgaaaacgcccaagtttgatagtgagagtacagataatttctagtaagtagactaattcacaaatatttgtaaataatgaacactgtgtatgattatacaatagggaatgaaaatattaagtatggtacttaaatgcctggaggacttcagctccagttgtttttagactatcagagttcaattgtaaactttctttcagggatgtttctccctcctggaattattaataagtaactaatatgaatattttgttgttttaataaggagccagttttatagaaattgaatacctagattgagctagttgttctaagtcactggacacaaagacatttgtttatttgcagctgaacaagaaaaagggaagagatgtaagtttttgggggagcatctactctgtggtacaaataataatcggtattatgcatctgtctcattaaatctggttaactggtaattaggctccctgtttttcacagatggagctacaaagacttcattgcccaaagcttagggccctccttctagagcaatacaccccacaacctgccttagtgagcaaccagtgaaccccatgggggtgagccagcggccaacctcttccacatcttctagctgggtgcctgtaacccattaggaccaatctaaccattccacatggccctgattacttcaccccaagtgtcccgcctcatctcttatcaccctcactaatctccatatatgggttccctacatttcctaacatgaaccaagttcccattctcccaaatctttccactgttgtttctgcaactggaggttttgtcagtacttgaccatcatatatccttcacttctctgaatagcctcttctttttcttcctctaagccaggctatcctctgagtacactgcttcccttgcagtcttctcactggagaatgtttttctgtttgcttgctcttggagtttttttgggaaggggatgtgggggagggtcaagtacttcaggaacactccaaaccatttgttctccttccttcttcaaaaatcctggctcatttcaagtccatcctgcaaagctgtgtaactcactgtcctccttgtgtttcctccattgacctcccagtgatccctgtccttctctgaagaggtccggtcctggcttaccattttctttgccatatttcttactgtcttcattcttcataaagtcaacattctactggagaatccgtcctacatcctgggctctttgttgactgcttccagaccaaaaacctttactctcatcatttcccagccactcattctcatggccataccaaaggtcctatcttccctgacaactccactaccttcataatgcagataccaattagtcttctcttaccacaccatcacctgaacttccacttcactttctttagtaaaacaattcccactaatctatgggccccaagaaacatataatgcattcatcttgccacttgttcactccccatcaacattacttcttcacattcactttcaaccagtgagagctcataattcatcataagaaataatctcatttccaacatctttaactttcttgcacccctttctcttttacctcaggccaaacagcacccatggataagccctctctggcaccatgcctgcccctgggcagttgaacatgctggggaagccattggaagccatgctgactggcatcctatgtgtggaacaatgtctttgttcctctggaaggccagcttcaccacttgcacgctgagcctgactgccaaccaccagccactcttgcttccagtttatactttttttcatactctactggatcatttccagcagaaataaacatgcttataaacacagtatatataaacacaaaatcctgccaaggttctattgtaatcttattttccaaatcaaaaaactaagtttcaggaaagtaaagaaatttactaaggtcgcacagctaatcgagcagaacaggacaactctaaaatctgtactttttatggcatcatactaattatgatggcataagactgaccttgaaataactctcagtatcaatgataactggtagatcaagctccagaaacattttggttagctaagataagccataaaaaaatagaggtgggcattaagtaaatgaatgatggatggtggaaaccaggtctccttagagagcttacagagaagcaagagaagatggctagaatgatccatgtggtagtgcattagagtagaagacatcagtacaaactcatgtttagcttatcatagatagagatagtaaaacacacatgcatgcacaatatatagatatgtatataacaggttagtacacatagtaaacgtttctcaccttgtaaattgagagagaacagaagcaatgattccgtagtagcaacaagtacccctagcacccagctcttcgtttctaataccagtctccaataaaaagaaccagggctccatggagaaactgtttattctaagacttgggtagggaatacagaagatgagcctggagtatcttgtggtgacaaaaaataaaaaagcgttcaataaaacccaaaaaccaaaagacagttatggggatatatcaaagggaaacaggagccagataaaagtgtctccccagagcgagactccgtctcaaaaaaaaaaaaaaaaaaa

SEQ ID NO: 4918 - DNA, 1072 bp, Macaca Fascicularis
ggtgttcatcagaacagacaccatggcagagtatgatcactatgaagatgatgggttcctcaacagtttcaatgacagcagccaggaggagcatcaagacttcctgcagttcaggaaggtctttctgccctgcatgtacctggtggtgtttgtctgtggcctggtggggaactccctggtgctggtcatatccatcttctaccataagctgcagagcctgacggacgtgttcctggtgaacctacccctggctgacctggtgtttgtctgcactctgcccttctggacctatgcaggcatccatgaatggatctttggccaggtcatgtgcaagaccctactgggcgtctacactattaacttctacacatccatgctcatcctcacctgcatcactgtggatcgtttcattgtagtggttaaggccaccaaggcctacaaccagcaagccaagaggatgacttggggcaaggtcatctgcttgctcatctgggtgatatccctgctggtttccttgccccaaattatctatggcaatgtctttaatctggacaagctcatatgtggttatcatgacgaggagatttccactgtggttcttgccacccagatgacactggggttcttcttgccactgctcgccatgattgtctgctattcagtcataatcaaaacactgcttcatgctggaggcttccagaagcacagatctctaaagatcatcttccttgtgatggctgtgttcctgctgacccagacacccttcaacctcgtgaagctcatccgcagcacacgctgggagtactatgccatgaccagctttcactacaccatcatagtgacagaggccatcgcatacctgagggcctgccttaaccctgtgctctatgcctttgtcagcctgaagtttcgaaagaacttctggaaacttgtgaaggacattggctgtctcccttaccttggggtctcacatcaatggaaatcttctgaggacaattccaagactttttctgcctcccacaacgtggaggccaccagcatgttccagctataggccttgccagggtttcga

SEQ ID NO: 4919 - DNA, 753 bp, Macaca Fascicularis
  misc_feature (1)...(753): n = A,T,C or G
ttttgactttaaantgaaatcattcacaaacnttgngtatatgatggagaatgaaaaactagagtcagacagctttaattgacattgtcaagacctccagttatcaggaatacatttttttactgcctnnnnnnnnnnnnnnnnnnnnntnnnnnnnnttcttgaaggggattcatgtttttataagaattttcatgtaattattgcaattgtggtcaaataaggaacgtttcctgcttgaaattatattgatttaaatgatgtgtgaaatgtttcaccattttcaggcactgtgtaattctattgtaataaactggcaggtatctttgtaactataaatagtgcatgctcagccatgtacactgtaaatannnnnnnnnnnnnnnnnnnnnnaaggaccataattaacatcacttagtgaattgtgataaagaaaaacaagccatgatttattcgatgtgattggcttaattgtttttatgtggcgccaagaatgaaccannnnnnnnnnnnnnnnnnnnnnnnnnnnnnnnnnnnnnnnnnnnnnnnnttatatttgattgtggttcaatagtattgcattgtcagactaggaaagctaaacaaacaaaatnnnnnnnnnnnnnnnnnnnnnnnnnnnnnnnnnnnnnnnnnnttcctaacaagagattattaacttttatcaggtgttaacatctgtttcaggaacatggcagtatgtttacnnnnnnnaagttttgtttaattctatgg

SEQ ID NO: 4920 - DNA, 716 bp, Macaca Fascicularis
  misc_feature (1)...(716): n = A,T,C or G
tgacatnnnnnaattgccctccncnctcatcntccaggactgagcgcttcagaactttctctccctcctcctccctctcccttgtcattaaaaacttacattgcctnnnnnnnnnnnnnnntttgcaattcagtttccgtatctgcaaaatgataggaataaagccatcaggtgaacagatactactatctccatttaatagaagaggaaatgaaaccttacaggattgttgtgatatcacattagattatttgtaaacagctttcaaaaggctgcaaaagaataaaaaagaatgttgttgcctgctgagccctggggaacactgtaggtgaatcagggtatttcaggtccctgggctgccttgggacaggtgctgtcaccaaacaccatcaattgttgagtgtgaaccctggaatggggtgaagcttacactgacgccagcgtttccacatcccatatgatctggtgtttgtgtttttcatttccttacctccttgccatatgccttactgttgcctgtaagattaataaatcccttaagagttgatgtggggacttaagttccttaagggcagaattttttttttaagtttttaatactttagtgcttatgtatttgaactagtggttttaaaaaatatacaactgacacatgctgatatataaggtatatagtaaagaatataaggaatataaaatgaaaagccaattctctc

SEQ ID NO: 4921 - DNA, 445 bp, Macaca Fascicularis
  misc_feature (1)...(445): n = A,T,C or G
ggagaaggcaggtctcaggctaagtgcaaccttggacacccatgatgtccatccacctaggcaccctgtccccgccacctcctgaccacccccccccagtcatgagcagacaanntaggtcacctcaatcttcatgttggttttaaaaaagaaagcagagggggtgtgtgctgaaggggaagaaagggaagttatttaatactgaacaggtgtcaggagtnctaaattctgccgatttcttttaataacgaagtactcatgaggaaaagccttttttcactactttcttaagatactaatttcacaacaagctccttgttacggcgcaattattccaatcttgtatttcccggagacggttgcagcctcccgtctgtcctggcctatcggtaaatgaaagacaatcnnntaaccacctttcattatgccctattttactttcagc

SEQ ID NO: 4922 - DNA, 706 bp, Macaca Fascicularis
  misc_feature (1)...(706): n = A,T,C or G
ttatctctgccaaaaacaaacaaaaaaacccaaaaaacccagattcaaggaaatgggatcatttgacagttctgtgaaacttgcctctgggactccctggactctggtgtagcttgaggtgccaacctcaggccaacctaagcctccaggtcacnnnnnnnnnnnnntgtggccaccctttcagactcctttctgaatgcttgcggcatctgccccatgattaggaatggacaccctgaccacgtcacagatagcccatttcacactggcatgtggatagtgactataaaacaccccttcagaacaaaccaagacccgaagggggaagcgggaagggacacccacacactgagtctctgctcttatcccagcttctctggccagctgcccctttgtcatttcccttctttgttgcaatggctccttgggagactgggggaggagactggggaaggggcctgggggctgaggacttccactatggcctgattttacagagcctctggcttcaatcaaaatcccaaatatcactgggaacagcagtgtgaggggctggaggccccaggagggaaggggctaggggctgcatggcagcttctcaaactcagccagaggagaaagctcctccttccaccgggggagcttggggatgcggcaagggtgtttcccctgcaatctccccagcctctattaacctttgaatcac

SEQ ID NO: 4923 - DNA, 1625 bp, Macaca Fascicularis
agatgcctcattcccacctgtgatgctcagacagaaaccatgagccctgaaaaacaccctattgttttgtgatgtcacctctggaatgttctgagtgttttggtgaccaacttctgcataggacctatacctggcaactcacattgcactcaaggccaaattttacaagaaaaagagataccagatctgaaagcctagaaattccaatcaatgtggttctacctcagaggggcacagccgagcccttcccgaggctccacaacttgcacagcatccctcgctgcgcgcagcaggccgccctgccccggctgagccgcaggatggcgagccagcactcctacccgctgaaccgcttctcctccgtgcccttagaccccatggagcgccccatgtctcaggcggacctggagctggactacaacccgccgcgggtgcagctcagcgacgagatgttcgtgttccaggacgggcgctgggtgaatgagaactgccgcctgcagtctccctacttctccccatccgcctccttccaccacaagctgcaccacaagaggctggccaaggagttcgtgctgcaggaggagaacaagtctctgcgggaggagaacaaggccctgcgcgaggagaacagaatgctccgcaaggagaacaaaatcctgcaggtcttctgggaggagcacaaggcctcgctgggccgggaggagagccggcccccctcaccgctgccgcaaaaggacagcgcgtccctggaggtggtgaagaaggaccacgtcgccctgcaggtgccccgcggcaaggaggacagcaccctgcagctactacgggaggagaaccgcgcgctgcagcagctgctggagcagaaacaggcctactggacccagacagaggacgcagccgcccccgccgaggaaagcaagcccgccccctcgccccacgaggagccctgcagccccgggctgctgcaggaccagggctccggcctctcctcccacttcgaggagcccagagggccccccgccccgcaggaggactccaagaccctgcgcgccctgcgggagatggtcagcaacatgtccgggccctccggggaggaggaggccaaggcgggcccgggcctgcccgacggctgccagcccctgcagctgctgagagagatgaggcaggcgctgcaggccctgctcaaggagaaccggctcctgcaggaggagaacaggaccctgcaggtgctacgggcggagcacaggggcttccaggaggaaaacaaggccctgtgggagaacaacaagctgaagctgcagcagaagctggtcatcgacaccgtgaccgaggtcaccgcgcgcatggagatgctcatcgaggagctctacgccttcatgccgggcaggagccaggaccccaagaagcccagcagggtctgaggcctccaccgtgcaccgggacgccgaacactgggcaaaagagaatcccctgcctgcctttgtcgtcctcgcctttcccaaccagttcgtacctattgaaaagcagcgttagtggccttcctaaactcagagtattaataaaggtgtgaggaggctggggccagttgaaaaaaaaaaaaaaaaaaaaaaaaaaaaaaaaaaaaaaaa

SEQ ID NO: 4924 - DNA, 737 bp, Macaca Fascicularis
  misc_feature (1)...(737): n = A,T,C or G
gaaaagcctagcaagaaatatgctagggtcttatgtccttnnngaaagataagaaaacctcagtaatggnnnnnnnnnnnnnnnncatgaatggaaggttatattgtaaataattcatttcaatcctgttttaaaactctcaacaggacttagagctggtcaaactgattctaaaattcacgtgaaagtgtaaattcaagaatagccactacttcaaatgnnnnnnnnnnnnnnnnnnnnnnnnnnnnnnnnnnnnnnnaacttatacagacatacattagagatattgtgggtttggtttcagaccacggcaataaatcaaatatcacaataaagcaaatcacaaaatttttagtttcctgatgcatatataagttacactgaagtctataatgtgtttcaatagcattatatctttaaaaatatacataacttaattttaaaatattgtcagaaaatgccaaagatcttctgagcccttagcaagttgtaatctttttagtggtagagggnnnnnnnnnnnnnnnnnnnnnnnnnnnnnnnngtggtagtttctggaaggttgggtgactgtggcagtttcttagcataagacaatggactttgccacttgattgactcttcctgtcacaaaagatttccctgtagcatggagtgctgcttggtagcattttgcccacagtagaactttgttcaaagtttgagtcaatcctcataccctgctgctgctcacaact

SEQ ID NO: 4925 - DNA, 740 bp, Macaca Fascicularis
  misc_feature (1)...(740): n = A,T,C or G
acagtgccgggtacctccagaaatgagagtgaaagtagggctaaaaacaggaagattggttgaaagtnnnaagatagagttagactctggtttccttcccctactccatgcagcactccaggagatgtatggaggtttattctgcagaagggtaaaagaaatggtctctgaactgaaggacaccaggcacagttaaagatgggaataacttactgaaaagggcgtttaagtaattgtttacacactgaatattaagaatctatatcacttcattcaactcccggaacataaacattaaggcttattaccccctaggcaagacattgaaaaatccttatttgatcaatctgactagcctaagaggaaaatcaaaagtactgatatgggaggtgggaaatgctcacccacatnnnnnnnnnnnnnnncaaactccacccacttaaaagctcagtgcttccaatcagtgctttagttctttgttcttaaatatgagcatagatctaggattacaggatacctgaggaaaacctcttaatgagaaaaatagaggacaaaataaatagaaggaaaaaaagaaacttacaggaaacagactatataggaagataatttaagtaaaatcatgnnnnnnnnnnnnnnnnnnnnnnnnnnnnnnnnnnnnnnnnnnntccacgcctgtaaatcccaacacattaggaggacaagtcaggaggatcgcttgagccccaggagttctagac

SEQ ID NO: 4926 - DNA, 368 bp, Macaca Fascicularis
tggacaggcaccagacaacaccagcaccttaatcttggactaccaatctccagaaataagagacatttttgttacgccccccagtctgtgacattgtgataacctgatacggtttggatttgtgtctccgcccaaatcttatgttgaattgtaatccccaatattgagggaggagcctggtgggaggtgactggctcatgggggcagatttcccccttgctgttcttgtgaaaatgagtgagctctcaggagacctgcttgtttaaaagcgtggcacctttcccctctgctccctttctctcctggtccgccatggtaaaatgtgcttgcttcccctccgccttctgccgtgatgtaagtttcccgag

SEQ ID NO: 4927 - DNA, 1855 bp, Macaca Fascicularis
  misc_feature (1)...(1855): n = A,T,C or G
gaaacattggctcttcctggctctatggcagcctggtggccttcagacttgcattgggacatcagctctgcagattttggggttgtcagcctccataatcattatctgagtcacctgcaggaccaaaatggaggagacaccacagcattgcctgtccagattgccagacaactctgccctgaagcagcaggagttacccgcccaccggctgtatttcacggccaggagagtcctcttcgtctttttcacaacaggaatattctgcctttgtatgggcatcatccttatattgtctgcaaggagcactcaggaaatagagattaattacacaagaatatgtgcaaattgtgcaaaactgcgggaaaatgcctctaattttgacaaagaatgcacctgctctattcccttttacctttcaggaaaaatgatgggtaatgtttatatgtactacaaattgtatggcttctatcagaacctgtatcgatatgttcgatccagaagtaatagacaactggtgggcaaagatgtaaaagctgttgaggactgtgccccatttaaaatgtccgacaataagacccccatcgttccttgtggtgctattgccaacagcatgttcaatgacaccataattctttcacacaacattaattcatctgtacaaatcaaagtgccaatgctaaagagtggacttacgtggtggacagataagtatgtcaaatttcagaatccaagttccaagaatcttgctgatgaatttagaggaaccacaaagcctccaaactggcccaagcctatctatgacttggataaaaaggatccaagaaacaacggcttcctcaatgatgacttcattgtgtggatgcgggcagctgcctttcccactttcaaaaaactgtatggtcgactcaatcgaacacaccattttatagaaggcttgcctgctggtaattacagtttcaacataacctatagtatcctttcataccacttttctttctggagatgaaagaaaacctggctgctggttgttgagattctatacttttctattttccaatcaaatctgtataccaaaaaaaaaaaaaaccaaacatgtgtaagggaggataaaattctcctattccctcccaggggttaaagctgggactgacagattaacaacagaaaagcatatgaatgttatgcctttacatgtacatgtgagcccttacaagaaaaatggagactaaaaaaagaagtgactaagtctaagtgctcatatgctaggctgaacaaagaatggcaattgtagaaacataactaggaagataaaggttagtttagcaaggctttgtttgtttgtttgtttgtttttggttttggttttgcttttgtttttgtttttgtagaattctctcagtctcgactctctgggaggccgcggcaggcagatcatgaggtcaggagtttggnnnnnnnnnnnnnnnnnnnnnnnnnnnnnnnnnnnnnnnnnnnnnnnnnnnnnnnnnnnnnnnnnnnnnnnnnnnnnnnnnnnnnnnnnnnnnnnnnnnnnnnnnnnnnnnnnnnnnnnnnnnnnnnnnnnnnnnnnnnnnnnnnnnnnnnnnnnnnnnnnnnnnnnnnnnnnnnnnnnnnnnnnnactgagactgtctcaaaaaaaaaaaagaaagaaagaaagattaaataataccaggcctagagatctgttaaaaaaaactgtgagaagcatgccagataggatgggaggagatggaagactatgaaaataggagtttgataagtaaatatagactaaaaattaaaaaaaaaaaaaaaaaaaaaaaaaaaaaaaaaaaaaaaaaaaaaaaaaaaaaaaaa

SEQ ID NO: 4928 - DNA, 1587 bp, Macaca Fascicularis
cgtgctcccagggagagctggcaggagaggtaaccctcacacttggctttggggacacaaatgaggactgtctttcccttggcagctgtcactggtaataacagcaatactgagctccagcggaagcaacgtcggcactgcgctcacacagttacgcatgcatggccacatgggtcccctgactccaaagtacattccttcccccacaccacttggctggcctgtggaaggggatattaaggagcgggtggactcctgagcacctactgggtagcaaggtgctttagacagcaggaataaaacacaaactccacctccacgaagctgacgttctaaaggggagacagatcacgatcagacccataaggaaaagcgtgtgtgtatcttcctctctagggaaaaatacagcagggtgcggggattgagtgggagtgcaatcagggaagacttcctgaaggcagtgactggaatgaagaatgagaacgagcaaagcaggttgcccagggagagcatccaggcagagggagcagagaattccatcctcgcccagccctgccggcccagatactttctcctctgccttctactcccagtctcaccccagtgcaacacacttcagttttctgggaactcctgatggaaagcggcagtgtgtgttcatccctatagccttagggcacagccagcagccctgcagcggggtaaggagacacagggctcccagctggcctggccttacctctgcgccggcggcccatccatgatgatgttgatccacaggatctgcatggcgttgatggggctgggcaggttgaacatggtggacagagtgatgagactgagggcggagatgctcctgcgggccacacccggccagtcagcggccgcccgccaggcgtggcccttaatgacactcggaatgccggcctctacttacgtgctcagctggaatcggacaaagtttttgatgttgtaaaaaatccccttgccttcctccaccgcattcctgcaagggaagagagccgtttactcacagagagggcctgcgggagggctcagccagtgcgttggttgctgcaaggggcagtggggacttgctcagatggacgctgtacttggacctctgctggttccctttgctggcattcttggggacacatttgtaagagatggtagtgttctaacaggtgccccttggtcactgggaactgatccttaagccatgttcgcccttctgtgccaagggtacacttgatacctccaattggaccatcaattactcttctgccgagcccagggatcccatccctgcccagactcccgaagtgctccgtgcatctcagcgatttaccaaagagaagagagagatgcagcaaaaccagttaggcctaaaaatgaagtccgggggacggtaaggagggagggatggggaggctgaaggacatcgcctacttctgtctttagaaggctcttcacggaagcccttttaaaccttgacctggggtcacgcatgtagaaaaatcatctatgcaccgcgccccgccccgccagattttactaaaaaatttgcaaaaaaaaaaaaaaaaa

SEQ ID NO: 4929 - DNA, 716 bp, Macaca Fascicularis
  misc_feature (1)...(716): n = A,T,C or G
acnnnnnnnnnnnnnnnggttctagacagctgtggaagtcaggcctnnnnnnnnntcattccctccaccttggcccccaaannnnnnnnncctgaaggggtcacagttgatacttctctgagagggcgtggggttggctgaggttatagcagcctcactgagtggtaagctgggattaagcaatcaaccgnnnnnnnnnnnnnnnngagttctcaaagcgggtgtgggagagttcttatacatcttctgtggagggcagtttatcagtctctaaattacaaatacataaaccctttgtctcaccaaannnnnnnnnnnnnnntcctacatatatatttatatgtgtgcaggctacatggttttcattatgctattgattttaaaagtaaaaatttagaaacaacctccttgtccaccatggggaactggctaagtcatttatggtggaatagtgatcatattcttaaaaatgaagactctttatatacagcttgaatattccttatcaaaatgcttgggaccagaagtgtttcagatgtttgcatattttctgtttctcatttaagttcacattttctaaacatgatattcctactgatttccttgtagatattttgaaacagagaagaaactcttctgtggaaattactgttaactagggaaaagacatgtttttttctgtttgtaaaagtaatgtgagttctttgtagcaaaac

SEQ ID NO: 4930 - DNA, 1680 bp, Macaca Fascicularis
ggcacgaggcgcgatgcaggttcagtgccagcagagcccagtgctggcaggcagcgccactttggtcgcccttggggcactggtcttgtacgtcgcgaagccctccggctacgggaagcacacggagagcctgaagcccgcggctacccgcctgccagcccgcgcagcctggttcctgcaggagctgccctccttcgcggtgcccgcggggatcctcgctcggcagcccctctccctcttcgggccacctgggacggtgcttctgggcctcttctgcgtacattacttccacaggacatttgtgtactcactgctcaatcgagggaggccttatccagctgtactcattttccgaggcattgccttctgcgctggaaatggattccttcaaagctactatctgatttactgtgctgaataccctgatgggtggtacacagacatacggttttgcttgggtgtcttcttatttattttgggaatgggagtcaacatccatagtgactatatattgcgccagctcaggaagcctggagaaatcacctacaggattccaaaaggtggcttgtttacgtatgtttctggagccaatttccttggtgagatcattgaatggatcggctatgcgctggccacttggtccctcccagcacttgcatttgcatttttctcagtttgtttccttgggctgcgagcttttcaccaccataggttctacctcaagatgtttgaggactaccccaaatctcggaaagcccttattccattcatcttttaaagaaaccaaattaaaaaggagcaaagctcccacaacgctgatgtaaactgtcaagctgctgaaactgcaatttccatgatataatagtcctccatatatatatatatgtatgtgcatatataatagtaggtctcctggcgttctgccagctggcctggggattctgagtggtgcctgcttagagtttacttctacccttccagggacccctatcctgatctccaattgaagcttcaaaaagccacttttccaaatggcgacggttgcttcttaggtattgctctgagaaagtacgaacttctcctatttctttcactgggcaatccaagtacgcgtggcttcatacccactcccctgtcaatgtaggacaactctgtaatcaagaattttttggcttgaaggcagtgcttatagaccttattaaaggtatacattttgtacgcatacagagtagcagagatttaaactctgaagccacacagacccagagcaaacccactcccaaatgaaaaccccagtcacgtcttccttttccttggttaattaggaaagatgagaaattattagatagaccttgaatacaggagccctctcctcatagtgctgaaaagatactgatgcattgacctcatttccaaatgtatgcagtgtccttagttgatgagtgcctctgttttccagaagatttcacaatccccggaaaactggtatggctattcttgaaggccaggttttaataaccacaaagaaaaaggcatgaccctggatggctgctgggagagtagagaacagcatgatcctggatggctactaagaggatagagaacagttttacaatagacattgcaaactttcatgttcttggaaactggtggcaatagcccaaaaaaaaaaaaaaaaaa

SEQ ID NO: 4931 - DNA, 210 bp, Macaca Fascicularis
atgtccgtcctgacgtccctgctgctgcggggcttgacaggctcggcccggcggctcccagtgccgcgcgccaaggtccattcgatgccgccggaggaggagcttgggatcatggaaaaggccattgggcttaccttctgctttgtaagcctcttcctgccagcgggctggatcctgtcacacctggaggactacaagaggccggagtga

SEQ ID NO: 4932 - DNA, 728 bp, Macaca Fascicularis
  misc_feature (1)...(728): n = A,T,C or G
agatatttaaactacgtgnntaatcaatgtgtttcccaccaaagattcagaaaaagatgcttgagagaaatgggttaatgcataattaattaagcattgtggaacaaatttatggttcctgtgattaattttgtgatgactaagatgctggaaagagagtgagttacccattaattatgattaaaattctcacctttcacagacagacaataagccagacaacacaatgaaagctcaatagatgatttcttgctttttttagtcatttataaatgtagatgtaatttttcatggatcagttaagtacacttgaaggaagtaaatgattgtatcagtttctttctagtataaattggtacctgtaataatactgagctcttggaagggaatcatgcatgcaattagctccctcctcctcacctactccactcccatctttatgacatttcaaatgtttatttggaaacaacagcctagatcactgttgaaggtgttcatggcatagctggagtctctgattgttttaaaaaatcatggaacagtacttttcttttagtgtttcattaagcctatgttgtaaaatgaaatgcttttgagcagtcttgtaatattgttcattcatattgacctgcatctcatcattgcatgttttatgttttcaaacatgccataaggaaaatgagtgcttgaactgcatgatttattagttctctcnnnnctctgcataa

SEQ ID NO: 4933 - DNA, 760 bp, Macaca Fascicularis
  misc_feature (1)...(760): n = A,T,C or G
gatgataccactcancngatnnnnnactacaannnnnnnnnnnacacaccagatgacggaggcacttcccacctgtctgtcgtcgcagaggacggcagtgctgtgtccgccaccagcaccatcaacctctactttggctccaaggtcnnnnnnnnnnnnnnnnnnnnnnnnnnnnnnnnnnnaatggatgacttcagctctcccannnnnnnnnnnnnnnnnggggtgcccccctcacnnnnnnnnnnnnnnnnnncagggaagcagccgctctcgtccatgtgtccaacgatcatggtgggccaggacggccaggtccggatggtggtgggagcttctgggggcannnnnnnnnnnnnnnnnnnnnnnnnnnnnnnnnnnnnnnnnnnnnngttcggctatgacgtgaagcgggccgtggaggagccccggctgcacaaccagcttctacccaacgtcacaacagtggagagaaannttgaccaggcagtgactgcagccctggaaacccggcaccatcacacccagatcgcatccaccttnnnnnnnnnnnnnnnnnntgtcgtccacacacctggtggctgggcagctgcctcggactccaggaaaggcggggagcctgctggttactgagtgcttggggcggacaaagctgaccagcaatccagggacaagatactcaccaggaccaggaaggggactttggtgtcccctgtgagtggtagagcatcacaataaatgaggcccactgtgtcagcct

SEQ ID NO: 4934 - DNA, 785 bp, Macaca Fascicularis
  misc_feature (1)...(785): n = A,T,C or G
tgccaaccagctaccctactcctaccctggnnnnnttatgctaggactccttaggaggagtgagacaggtagtaatggatccttaacaggtgaactatccacagaaggaagagggatccatctcttaagtaattggttnnnnnnnnctgaattttgnnnnnnnnnnnnnnnnnnnnnnnnnnnnnnnnnnnnnnnnnnnnnnnnnnnnnnnnttagggcagaagtgaatgcctgccatggagggattgatcttcannnnnnnttttgttcctgcctttagtgttccatnnnnnnnnnnnnnnnnnnactactatgtgcaggagccctnnnnnnnnnnnnnnnnnnnnnngggaagctcccagaatttggtttggtccctggttttcagtcatcttgctgagagtctgtctggatttgcctgaagagtttggattaaaaatggcaggttgggtaaccctccctgttcatcccatgttagctctaaagcattttccaccctccatcatccctnnnnnnnnnnnnnnnnnnnnnnnnnnnnnnnnnnnntgggcgttaggggcaggcagagggcctttgcnnnnnnnnnnnnnnnnnnnnnnnnnnnnnnnnnnnnnnnnnnnatagctggtgttnnnnnnnnnnnnnnnnnnnnnnnnnnnnnnnnnnnnnnnnnnnnnnnnnnnnnnnnnnggtttttattaaaaaatatatatatgtataaataaatgatctagatattttcctctttttctgaagttactttcttaaaaaataaataaataaaa

SEQ ID NO: 4935 - DNA, 2281 bp, Macaca Fascicularis
atcatttttaaaagcagacttgttctaaaaaaaatcagttttaaagaccaacaagaatatttgattacatttattatgttagtgtctctttgtgccttaattactctctaaattactgcttgaatgtagggtatctaagctcattttatttgttatttaattgctcattattttatatttagcactgaatgattgaaatgtgttggaagctgaagcatacctaaaataagtaactgatgaaccttttattaactcactttatgtgtatgtatacttttaagcttgcatcctccagtctactgaaaattggccaggaaacagataaaactacaacaagaaatagagaatcagtttatttactgctagatatggtaagtctcattttaatttttactaaaaataaaagagttccagtcattcctgagagtcttttcttggcattttagtcatttaatactttttttgatcccttttgtttacttcacataagccacacctttctaaaatttgcagagaagactgacatcactcatattttatcatttcagtaatatcagaaaataacaaaatctaaggttagtattaactatgggtattcttttatgaacaatttttcaacctgttggaaaacacttaggccttgtatttttctagtgtattggcgtcagctctcttccagttttctgagttttctacattctgactctattctgcccatttcttgtaattttctgtgcctagtgacttccctctctgcagtgtctatgaaccggctcttgcttgtttctaccacgtggctctttccccacttagaatcattttccttacctgcagaaatcggatttatcctaatgattcctcaaatctttttccagatagtctttcctgattactttggcctgcgttaatttttcttctgttttgaattcctatagaatttacagctttccatttcattatagttggttttatgtttggttttgcttcctagcttagtcttggactgccaggtagagttggtggtatggaccatattttaaatatttttgtattgtcttttatttctagtatatcagtgaggaaaatgaaagtgctcagtatattcctgttgattaaatattataattgaaaagtagccctttttaaactttttttaaactttttgatatatattcactgtggcacatttacattttagattaagtaaaaggaaaataacatgtgtctatttctaataagaacagtacagaaattctgccttactggttgtcaataaatgttcccattataaataacttgagttttgatgcattttttgaatttttcagattgtacaagaatccccattccttacaatggatcttttggaatcttgttttccttatgtcttgctgagaaatgcataccatgctgtctacaaacaaagtgttacatcttctgcataaaatacctacttattcaagacaagcacgcatttttgttgccttggttttacctgtagactgtggaactattttaccttaaggcctgaaaaagttttgtggattataaatttctttcatacggttgtattttctgatcattggtttcttaatatggttgtactacagtatacttggttgatttaggttgcacattcactgaattcactgagattattcctataattttagagtatcatttatttgaacaacatacattatcaacatgtttttgatatttgataatgaaaaaaatctttgcttgtttatttctgaaaaagaattgtatttagtgattattttagatagtgatattatagcattcatctgtgtgtaaattatttcatatagggaagagttctgatctgtacctatggttcttattgaaaacaaaattggatgtgcatttctgtgatgttatgaatacatttctactttattttgaaacatttgccaaactaaatactataacactgtataacattttaaaatgttaaagaactgcttagtgttagaagcagatcatttcccaaaattctaaaaacagcagcatatgttgttgcttgtataaagcctagggataatttttagactaacttccatggtgccctgttggcattagcactaccattgtaccctgctgtataataaacaatcttagacatttatcaactgttgatacaaatgttagtccctaaccactttttatatatgttttaaatttttgaaattcaagtgtacctgccataacataaaataaacactagactgtatcacactttgaaaaaaaaaaaaaaaaa

SEQ ID NO: 4936 - DNA, 753 bp, Macaca Fascicularis
  misc_feature (1)...(753): n = A,T,C or G
actggtggtgcgtgtcnnnnngagnnnagtaaccaggttatgttactgtggagtgtctatttccnnngcctggttaaannnctgagataatgtgatagaggatgagctgcaaaagtgggtagggcgagttaccctgagctccccacatagcacctcctgcggaagcaagtgcagacgtgtgtttgtgaacatgagctgtcatctggtcaacttgannnnnnnnnnnnnnnnnnnnnnnccagaaatgtataagaaaatgatttgagaaatttaaaatgtcatcttaaaatgaggcaatataaattaacactccaaagttaagtgnnnnnnnnnnnnnnnnnngagtgaccatgagtacagtgggaagttccgtatgatttaatttagaggcgatggtaaaaacacatcattaggtctgtagcagaagatttaattgggtcatacttgatgagttgtgttggataaaataactttttgttgttgtttaactctcaggtgaatatagtttgaatataccatgatgtacatgtgcattttcaaaattctcattgaattcttattttgtgaacctacatgacttttttagtcagtgttagctcaacaaatatttcttggttgcatgttttgtgcgaggtattgtgtgaggtactcacctcatttgtatcttgtttgtcctcatgggcttgtagttctatatccaaacatcgatttatactaattttaaaacactcaatttttatatcatattatacc

SEQ ID NO: 4937 - DNA, 1075 bp, Macaca Fascicularis
  misc_feature (1)...(1075): n = A,T,C or G
agcaataaataatactnntgataaaaatagttcaaaagtagactgtacatactttgttacatagtcaggaagttcgcaaaagattaatagaaaaacagaacagtaacaatgaattgtacaagtaaattaaaagcagaaaccaactgtgaaaagacaggctgcctccacctctgtatctgctgcacannnnnnnnnnnnnnnnnnnntgacacgctttgctggctttttaatatgccactgaaaaagtaaaagccacatctgcaacttacacaatccaaaatggctataacatcaaggtctaaaaatgtcccactaggttcattctttaaacatgtttacaaacaaatgtaaaaagatgatttacataagaaaaataaggcctttattagagctgcactgcactgctttctgggtctcctgccttcatccgctgtgtgcgcggacttgcgcgtggtgttggtggctggccccaaggggagctacatgggtgtctctccacccgctcccaaggagcagaggcagggaagagggcgcaggggctgggctggtccccaggttaccccatcccgagtctctccagcnnnnnnnnnnnnncccagctcacggtctctgtcagccactgaagacaagctccccaaatccagagactaggctaggaaagcgttaaccagnnnnnnnnnnnnnnnntagtgttgtgatagtcttttcagtccacattttattaggagctgatatttaacaccagctattttaaatctgttcatgctgcagaataaagcatttcttactagaaaaagtatagttaaggtcagtcattaaaatacaattgcttgaaattaggtatgcttatttcagaatgattgctgtagagctaggctgcgtctgtcaaggataatgcacattgcttctgtcataattttataaatgtagtaaaatccttttcatggtttatcattaaaaaattaatgataattacaataaatgcataatttacaaaagccctctatttgttcataggatttatacatacannnnnnnnngtacattcatttgaaagactaaaattaggtataag

SEQ ID NO: 4938 - DNA, 2306 bp, Macaca Fascicularis
  misc_feature (1)...(2306): n = A,T,C or G
cattttccatctgaaccacagaggattggatgtcactcgggactcatgacttgaattagggtgtaaaagaacccagcctggtccgtctgcagaattcctagtgaagagtcactgttggggtatcaatgagagaagaggctgtgcattggagcagcatggagacaatgcacctctggttttaggccttcatttatggatgattttagacagtcccattaaagacacagttcccttgaacttcacaggcatgctgagtgatgacaaaccttggcaggtctgtgaccagtctcttccaacaagttactttaaggcattcctactaatctttcaacccacccattgcttaagagtaataagatctagaggtgacatgatagataagactgttgacacattctttaatctcaactaagcaaacagagactcattgtcccaagccagtgactggcccaatgccctgaatgtcttaacagagtttgacagggaaataggagcccttcaacccttttttgagaatgaaactacattggtgagaagattattcttccctctcaaatgaccccgaagaatcaataaggattcaagggttttcctctccacggtaaggaggttgttcttggcaagttactctgagaagcctgttgtatgccttgtcctccctcaagtcatttcagccttagaattgaattaactgcaggccaaggacatacatgaaccacttgagtcatttttcaaaagcaaatgacagggcacctgtcttctggaattggtgaatccattcagcggagactcttggcaaggcttagtgtgagattatataaataggccctgacctgaggggcttgttgcccttgggtgaggtagaggcatttgtacacaaaaaaatcacaaactggctaaactgtgccacatgattagcaaacacgctcatgcccaatcagcaagatcttcatcgtcaagggactaatgtctggagaagcttggctgtatggaatagcatggccattagtctcatagcctgttgtggttccccgcacttttcaattactcggtaagtaattcgagaccagtcacaggcttttttctcacataatggacagccttgatgagggctagcaatttcttcacttcttattccaaatacatcccacttataaaaacaccttctggaactccacacagggaagaataggatttaatcacaggaaatgtatcggccggctgtgcattactcaatttcgcactgttgggagcaggttaaaatctgggatccatggtattagatggctccaagcttcaaaattttgtgttgctttcattggcnnnnnnnnnnnnnnnnnnnnnnnnnnnnnnnnnnnnnnnnnnnnnnnnnnnnnnnnaaaatatttactgagcatctactaggtgccagggcctttgtaggcatcaggaatatagtagtgaacaaaatagaccaggaccctgtgctcacatagcttattacctagcggagggtaacccgtagtaacaggtgcacacatgcatgaactaggtgcctccagatagtaatcattaggccacgtggctcaatgggaaatgactgaggggagatgagggtcacgtggaccagtgcctcctttgatagacaagcactggttacggacatggccctagactccaggtgtcagaattgccactgtagacctactgtctgtaacagagagtttttgtaggagttactgaaacccctcactgcctcctaagtgcagcaggctctatagctagagggggctgtttccctgagtgaggtagctttctgaggtctcttttataagggcattaatcccattcacaatggctccaccctcatgacctaatcacctccacaggcccccgctcctagcaccatcaccttgggtattagaatttcagtactagcattttgggagacagtccatggtagactttttaagataacatcaggccaggtgcggtggctcacacctgtaatcccatcactttgggaggccgaggcgggtggattgtgaggtcagnnnnnnnnnnnnnnnnnnnnnnnnnnnnnnnnnnnnnnnnnnnnnnnnnnnnnnnnnnnnnnnnnnnnnnnnnnnnnnnnnnnnnnnnnnnnnnnnnnnnnnnnnnnnnnnnnnnnnnnnnnnnnnnnnnnnnnnnnnnnnnnnnnnnnnnnnnnnnnnnnnnnnnnnnnnnnnnnnnnnnnnnnnnnnnnnnnnnnnnnnnnnnnnncacaaaaaaaaaaaaaaaaaaaaaaaaaaaaaaaaaaaaaaaaaaaaaaaaaaaaaaaaaaaaaa

SEQ ID NO: 4939 - DNA, 765 bp, Macaca Fascicularis
  misc_feature (1)...(765): n = A,T,C or G
gaacagagtacaaaanctggtagagtgaacaanctcataaaactnnnactgcaaaatgccacnnnnnnnnnnnnnnnnnnnnactctgattctagcagttgaggggattccaggtccattaacacacatgtgtttttattttttnnnnnnnnnnnnnnnnnnnnnnnnnntttggtgctgcagacctgtgtacagaaatgcgaacgataggaagatctggctgggcgcatcctatttaatttacactnnnnnnnnnnnnnnnnnnnnnnnnnnnnnnnnnnnnnncaggagatttgggaacttcctaatgtgaatggagttggcagcccacattcnnnnnnnnnnnnnnntacagcttcagtttctgacccccaggaggccaaaccagcaagaggaaaatgcatatagtaaatgttgagacctacgtccataatgaaagtgccccnnnnnnnnnnnnnnnnnnnnnnnnnnnnnnnnnnnnnnnnnnnnnnnnnnnnnnnnnnnnnnnnnnnnnnnnnnnnnnnnaaaaatatcaaaatctcacatcaacccaacaatagaaggaattgtttaaaacaatatggcttgcataagattacctattggcaacccttttaagtcaggtttttgaataacatttaattcaatggggaaacactcaaaatgctaacttagaaagtaggatgcaaaattgtattttataacatagtcacaaaaaanagtgttaaatnnnttatgtctgtatggtgagattacagatgattt

SEQ ID NO: 4940 - DNA, 3790 bp, Macaca Fascicularis
ctcaaaccaaattgcagatatgtctcctattcatgacaaaggcctctgggaccagagaattctatatgggttaatgctacctttatactgagcaatctggccaagttggttttaaaaaaatcactaagctctttaaaaatatactgtactctgctcacttcatcagcacatacactaaattggaacgatacagagattagcatggcccctgactcacaaatacgtgaagcgttccatagaaattttttttaaaaaaaagaaaaaaaatactggaggaaggcagtgtgttttcttgcaaggataaattatgcctggcatttatctaaggccacaaacacacaatttcttggtctgctcaaaaatatataattaatttaaaaggctcatgtgaagtgaagaaaactgaattatgaggttttgtttgtttgtttgtttttgttttgttttgttttttagaagaaaacaggaagggtaaaactggcacttttctgaagtgagaatagtaaaaagaaggatacgccccaaaatcaattcttggggcagccttattgatgtaacaccatggctaagagcattggacttggtcattaaatgctcagctttgccaccaccagctctgagaccatgggaaaaactatatgatttctctgtgctttcatttcctcccatagtgctataaggattaaataaagttgatcaagcacttaacacactgcctgccgcatgataaatgcacaatacaaagtaaaatgtcttcttcagtcatactgtcttcttcgtcattattgccaacatcaaaacactgatctgaagaaagaactacacagtgagatttccagtgttgcaggtggtaaagagttgaagtgggtagaccataggaagtgggaataaaaggggggcaggtgaattttgattcaggcagatacacatcaaaacatctggggaagagggatgatagctttctctacacataaatactggggaataccaagaaaacagagctcaaggcgactgctaaaccaactcctatgaagcaaattttcatggcagaatacatggcagaatactggatttggtggatctcatctggcaggaacagcttgggcttctttgtgaagtgaggcttcccattttccatttcccactgcctcttaccctttttttaaattttactttggctctttctctggtttcccttattgatgtctcagagtagataattgttagactagaaatattgccaatgtatctgtcaaataagtcatcatttcctaactccccaattaattcagaagagtaagggagacagaggccactagagcaagtggggaactgagcgggccaggagctgagacagtggtaactgagtggaaggagaaagcaaaataggttgactgaaggtggaatgccctctgggaaccttgtgttccatctttcattcactggcttcaggccctagtttctagcctgaacaaattctctccagatggagtaaaatcactaaattcactcgctggcacaggtttttcttttccgtcttgtctctctgtattagcaaactcacccatggcccatgttattagataagccagagaaaaatatctgggtctgggtgttgtcgtgaagctcttcatgccagagggttcactctgaagggtggtcagggcttaagcaggttgggaggaaggacaagggcatttcagggctattagaccagtgaagaaggctggagacagcagaacttgctctcagcatcagcaagtaacccatctgactggttcataacaagagcacagggtaaggctgggaaaaaggtttgtttattagcagtaaggtcaacttcatgtttgaaaacaactatttttctttttaaaaaatggacccctattgtcttccaaccttatgccccagaaagaagatggggaggaagaacctaatgaaaaaaacattcctagaggaaacagaaaatacttaggaaagagaataatttaaattcagtgtacattaaacacacacaaatcagactaattaaaagctgtgagcatcagtgcctggaggagagaagaaaggggaatccaacagaaagaggagagagcctgtggacccagggagggcagccttaggaggaggccctggaaattcccattctccaggcttcataacagacctgggttcctcaattcaatggtgtcaggcgatgagagtggaggagggtaaggagaggagaggaaagaatatagaaacaccaaatatcgaatcctggacatatttcacgtttagcttagattagaattcccaagatcccagagatcactctctcaactaaagccctctgacctgactctgttctccctcaccaggaccatcggcaccttccactccatagattcctggctgtgggactccttggatcttcctgcagcaaatagatacctcatagactcagtttcacagaaacagacagaacctaaaatcaaaagaaaaggcaggctcttcctttcatgcttgttgtcttagttttattctaattccccttagttcgtaggccagaaaatggagtaaaaattgtggtttgggctattttccatatattatccaataaagaacttacatccagaatatatttagaacttttacaaatctacaatgaaaaattaattaactcaattttttaaaaagggcaaaagacttgaaaagacatcttacaaaagtagatgtacaaatggtcaataagcatttgaaaatgttctcaccatcatgagtcatcaggaaaatacaacttaaaaccataatgaaacagcgcttcacaccttctagcatggctaaaattaaatagactgataatgccaagtgatggtgagggtagagcaactggaacttgaatacattgctactgggaatgtaaaatattacaatcattttaaggaactctgatggttcccttataaagttgaacatacacctaccctatggcctatatataattccacccctaggtaattatgcaagagcaatgaaaacctatgtccccagaaagacatctacaagaactttcacatcaaccttattcatatgagctaaacactggaaacaacccaagaattcattaggaggagaatggataaacacattgtggcctatctatacaatggtactctattcagctgtagcaaggaatgaaccatgcatacacacagccacatgaatgaatcttgatacaacatgttgtgaaaaaaccaaatgttaaaaaaatatattctgtatgatttcattcgtatgaaattcaagaataggcaaaactacatctatgatgatagaaatcagaaattggtacctagttgtgggttggggaggggaggaatggattggaagggggcacaagtatgttctctagagtgatggaaggctctatagtttaattttggcaatgactacatgggtgtataaaattgtcaagactcagaactgaatgcttaaattatgtgtattttgtatgtaaattatacatcagtttttaaaatacagtaacgaaaaaagatatttacaggcctagttctataaaaactataaaagcctatttatattttaaattatgctttaaaaaaaaaaaaaaagaaatagggtctctgtcaccgaagctggagtgcagtggcataataatcgctcactgcaaccttgagcccagttcaaggctgcagcaagccatgattgcatcattgcactgcactgttcagcctgggtgacagatcaagaccctatctcaaaaaaaaaaaaaaaaaaaaaaaaaaaa

SEQ ID NO: 4941 - DNA, 674 bp, Macaca Fascicularis
  misc_feature (1)...(674): n = A,T,C or G
tgatcccaaaaggaagggaactcagtgttgtggtacttggaggctcagcctcccaggctgcagagtgatctggaggggcacctggaggatagcaagcacaggagtcttctgtggctcctaaaagtcctccatacaccataggtttttattttggttttggtttttgagtctcgctctgtcacccaggctggattgcagtggtacaaccatggctcgctgcagtctcagacttctgnnnnnnnnnnnnnnnnnnnnnnnnnnnnnnnnnnnnnnnnnnnnnnnnnnnnnnnnnnnnnnnnnnnnnnnnnnnnnnnnnnnnnnnnnnnnnnnnnnnnnnnnnnnnnnnnnnnnnnnnnnnnnnnnnnnnnnnnnnnnnnnnnnnnnnnnnnnnnnnnnnnnnnnnnnnnnnnnnnnnnnnnnnnnnnnnnnnnnnnnntgatctacacactattgtttcaaaaatgttattttactcacaagagggctttggaaannnnnnnnnnnnnnnncagagcctaaatgcgcagacaggacagaggacccttaaggatcaatnnnnnnnnnnnnnnnnnnnnnnnnnnnnnnnnnnnccgggagcaacaagggaggccaccttgttgactatgcactggaaaatgcatgttcctttattgtaagctctcggtgcacagtgt

SEQ ID NO: 4942 - DNA, 1567 bp, Macaca Fascicularis
gttttaaattgagcctggcagagggggtcgcctggagcgccctttggggacgttctccctcagagctgtaggacagggccgggcttcccctccgaagcgacgcaaggattgagaacaatggactttttgatgtgtgttgcaacaaactcatagccgagggctgtaaatcggagggatcaccaggtctgcctaccagccacgagggaagtggtgagaagctgtcaccccaacttgagtttcaagaagactccttggaagaagagacctgctcacagcactgaccccagctaatccaagaacatgtcacctataatgagaataatgaagaaaaatcaaccatcttccagatgtgtctatatcatgatacggtacatgggacagcaagttgtagctattcttgagatggggcagtggctccatgctctggcccccgacctcagcagctgtcccagctcatcaccctgagtgccagctttcccatctcatctcaggatctgcactggacgggcaccaggtctttcttcagcgaacatctaaactctctcaagtgcctccagagacttttacatgtctacaaagatgacctcattctgtagcagcatggatttaacttgctcttcgatgtcactccttcacagagtgcactgttcatcgtcaccctatccattagcgtcagtcttactaaaagtcaaacatcaacgttagtggtaactctggaggcctggcattgtagcgatatccccaagagaaaattgttttgaacctttctgggaaaagttcatgtacgttttattcaaacgctagtttttataatctcgctaccatgtggctttcctgaaggatgaaatttctaatgtccttcaggtagagagaggtaaaaagtattctagaacattaattgcccactcctctcatcccttctcagaaaccaactgaattccagtgagtgtgcctggcaaacccaaacacggttttctgttcaggatgctggtcttacctgtgaaggcgttcatgaacgtggagagggaccggctcaacattttgaagaaagggtctctgcatgggtatttccgagacccacaaaggatggtatgctcaagaatgtgaggaacaccggtactgtccatgggagtggtgcggaactgcacgctagggaagaaggaacggcacgccaggaagggggaggaacaaggaacagaaggccagcgacggggagaaacagaacgctagggaaggagaatgactagaatacaaaacgttcatcttagtgctgtggacacagttcccagatgcatcatcaccttgggctactagaaatcattctgacaccacaatcctccaacccagggtttcccaactttaatgtaaatcattgattcagaatataaaattatattttgatgagattgtaagtccgtgtaagcttttccttatttttcaagatgctctgtcaataaaaatattagtgagatgatatttaaaccacaaaaaaaaaaaaaaaaaaaaaaaaaaaaaaaaaaaaaaaaaaaaaaaaaaaaaaaaaaaaaaaaaaaaaaaaaaaaaaaaa

SEQ ID NO: 4943 - DNA, 1423 bp, Macaca Fascicularis
  misc_feature (1)...(1423): n = A,T,C or G
gaagagatccatnnctnnctgggtgatnnagcctccnnnnnnnnnnnnnnnnnnnnnnnnnnnnnnnnnnnnnnnnnnnnnnnnnnnnnnnnnnnnnnnnnnnnnnnnnnnnnnnnnnnnnntagcagagagctcagcactcccgtcactttccctgatgggcgctcnnnnnnnnnnnnnnnnnnnnnnnnnntctccatttatggccttcaccacaacccaaaagtgtggcccaacccagaggtgtttgacccttcccgttttgcaccgggttctgctcaacacagccacgctttcctgcccttctcaggaggatcaaggaactgcatcgggaaacaatttgccatgaacgagctgaaggtggccacggccctgaccctgctccgcttcgagctgctgcctgaccccaccaggatccccatccccatggcacgacttgtgttgaagtccaaaaatggaatccacctgcgtctcaggaggctccctaacccttgtgaggacaaggaccagctttgagggcctccacctgccatcctgtcttcctgacccctgctcctgtctgtctgcccatatcctgctttctatctgcccaccttcccttcttcccacctgcctgctgtcctgcctcctgtccctcagtctgcctgcccttctctctcacctttctccaggctccctacctgcttgtctacctgtctcctacccacctgtatctcttgttgggagaaaaacttggtgttgagagaagctgaggcttctgcatgtctgacataatgtaagagtcttggaacatgtcgagggtccagtgtctaaaacgccttgtggcctttggaacaccacactgtgtgctaaagggtggaaggctaccctgacgcaccatcatctaagcccagggcataaaacccctcatgacttggaaagaatccagggctcgtggctctggaatgtgtctggacctgctggctccttgcttcttgctctcccaggatcaattgtatcttgagttaaaagaacctgctctccattatctcaagtagcagagcatatgctaaaccgtcagttgtaaatcatgtgcttaatgcaatgtgctctttcgacccccacattctcaccacctgtttcttggttcgatcannnnataaatagtctgggcnnnnnagctccgggccttcacagcctccatactnnnnnnnnnnnnnnnnnncccactttctccttcaaactgtcttttctcattcctttgactctgccggacttnnnnnnnnnncnnnnnnnntgttggctctgatcactccaacatccctgaatctccactcacctcccaaactcctgcctgccctccagactgtctgcccatacatctatctccttcttcctgcctgcttgtctgtttcggtgttagtttcctatgctgctgtaataa

SEQ ID NO: 4944 - DNA, 679 bp, Macaca Fascicularis
aactcactgattcattgaggacatgctattcaatgctgtgttctcaagaaatgtctatgagtcctctcaaccattgttgttgataaaataggtgaatgtcaggtgggggttagcatttgataaggtgtacgtttgaaataatgttttatcacctcttcttcataaatacatgatataattccaagaagaaacaagaagtagaaattcagcatccttaagatgacagaaagaatgagggggaaaaggaagaaaaaaaattaagcattttgcaataaaaagctcacaatatttttatgtatttgaacatttccgtaaaaaatataaaatggaaaatattgacatgggctgcttcgggtgattggggtttgagggactgtgttagtcaggttttctagaactcaagacaccaagacaaagttagaagtgcaaacactgattggaggttaatgtttgagaaaggtaaaagggagaagaaacagaagtatgggtatggggtgggctttcaggctcccacctgtgagagggaaaacgggaggtgtggggagtgaggagaaaaaccatgagattcagacccagctctgggagagtcttggcaggctcatggtgaggcccatagcaaagtttgcccagagaggagagagtgtcatgctgggcagaaatgtctgggtcttagtgcccc

SEQ ID NO: 4945 - DNA, 811 bp, Macaca Fascicularis
  misc_feature (1)...(811): n = A,T,C or G
cagtgagctgagatcgngcnnngcacnnnnnnnnnnnnnnngagcaagactctgtctnaanacaacaaaaaaagttgaattaacaataaggaaattaggacgaagtggcaaaaatattttgggttacattatactctcagaagctatatggtttagagaaaagggtccccaaccacaaaagttagtggttcttattctgtctacctcatactaggtatatggtaactaataaagtcacttaacctctctgaaccgtaacttcatcatctatgaagtgaatctgacattttccccccggcctacctcacagggttgttgtgaggatcaaatgaaataatgtacatgaaaagacatatataaaatgtataatacagacaaagggtcctgttacatagttggaagtcattccctcagatcttgggtctaggaaggtaggtgatttaaactcactgaaagcatgtaccatatnnnnnnnnnnnnnnnnnnnnnnnnnnnnnattaaatttttttctctgagttgagtccctaaaatactatcatgggctgattctaagaaggagcacgaatatatattcccctaaaattatagcttagcattgttaatgctctagagcagttatcagagttatatgttgtaacatattagtgatttgtgaaacttttttactaaaatgtgaccctcatttttctttaaatgaaagaacatagaatatttcacaatgcattccatgtggtaagagtaaaaaattgttttagttatatgtacaaatgtgtgtgtgtgaaggtgnnntgtacttggtcattaaataaa

SEQ ID NO: 4946 - DNA, 748 bp, Macaca Fascicularis
  misc_feature (1)...(748): n = A,T,C or G
gctggannnnnttggannnnnncttaaacatctgtagaanttcnttcctgtcacaaggacatactgtttttagtgaactccttagtttttttttggttgtggtaatgaatgtgaagcccctttgatttttctgctccatctaactgagctcctnnnnnnnnnnnnnnnnnnnnnnnnnnnnnnnnnnnnnnnnnnnnnnnnnnnnnnnnnnnatctgtatagtggcaagtggatgcatcctgaaaatctgtagttaataattctctactaagacacagtattttcatctaattctggaaactcgttaatcactaagaatctttaaaacaaagacaaagttaataaaatgtcaatatatattcaattaaatgttttcaatagttacagcacattattggcctgccattttcccccaattgttaataaaaccccttcaaatatttctacaactagctttcatgaatctaagtgggtgttaataattttaattaatggtttaatgccttagtacaggttaaaagcttcattaattgtgttagttttgatgaaaaatgtaagttataatcttatttaaaaaaaagcaggcaaaccacaggcttgcacttttatttgccctgggctgaaaatgtgccaaagtcccacttacaattttttttttttaaatgcttgaaacttttctgaccatttgatcttgtgttggattgtgttttgtaataatctaagcaggattgctttatgctatccccaa

SEQ ID NO: 4947 - DNA, 578 bp, Macaca Fascicularis
  misc_feature (1)...(578): n = A,T,C or G
tagtgaaggatcgacccgtgacttagtcggttatgttatctatagattatagacagtgtatagaaaagcactgtgaaaatccctgtcatgttctgttccattctagttaccagtgcatgcagcccccagtcatgtacccactgcttgctcaattgatcatgaccttctcacggggacccccttagagttgtgagcccttaaaagggacaggaattgctcactcggggagcatggtttttgatacctgagtcttgctgatgctcctggccgaataaagcccttccttctgggccaggcgcggtggctcaagcctgtaatcccggcactttgggaggccgagatgggcggatcacgaggtcaggagatcgagaccatcgtggcgaacacggggtttagtannnnnnnnnnnnnnnnnnnnnnnnnnnnnnnnnnnnnnnnnnnnnnnnnnnnnnnnnnnnnnnnnnnnnnnnnnnnnnnnnnnnnnnnnnnnnnnnnnnnnnnnnnnnnnnnnnnnnnnnnnnnnnnnnnnnnnnnnnnnnnnnnnnnnnnnnnnnnnnnnnnnnnnnnnnnnnnnnnnn

SEQ ID NO: 4948 - DNA, 773 bp, Macaca Fascicularis
  misc_feature (1)...(773): n = A,T,C or G
gagcaacttctccagtacgagagataaagcaagtatgaatgggtgcggtgggggggagcttaaaacctgccacactgagactcgatgccgggggccatgcacccgctctgccgcctgctaggtctgtgcaatggtcagagcaggggtgtgtgatgagttcagctcccaagcatatccacacttaggaagtgttctgtgtgtttttaaataatccttaccatgtaaagattgtattacatttgtatacaaaatttttttgcattttacttttgtaatatttggggttttatagatttttattttatggccaagtatacttttgtaaggaaatgttgaagtcttgagtatttttattcttttaaaaaactatagttagtgtcaactgtgagcactgataaatattattcatgtgtggttttctttctttttaatccagactttttaagaaacagttttggcatagagttttacttaaaatgctgcttcattttacatattgtgaatactgaagattctaaaaaataaannngcatttaaaatctctgtgctgttccattgtagaaatggtaatgtgcannnnnnnnnnnnnnnntgtaattaaatgtttaatggtttagaactcctagttcacaatagggcttctcgtcatcactcacagcgtgtgagcttccaaataagccgccatttctttggaaaacgcaccgcacttaggcatggcgatctcctgttccgttaggaaatacggttatgttgacattatggttactgtgcct

SEQ ID NO: 4949 - DNA, 727 bp, Macaca Fascicularis
  misc_feature (1)...(727): n = A,T,C or G
tgctttgnagcaggtttatcacgttagagcattacttcttttcccttctagggcnnnnnatcagagcatggtgaacagaacaaagaaccagccaagaagaaaaggaaaaaataaannnnnnnnnnnnnnnaatgtgaactttggggcttctgcttcgtttttacnnnnnnnnnnnnnnnnnnnnnnnnnnnnnnnnnnnnnnnnnnnnnnnnnnnnnnnnnnnnnnnncactgaattcaacnnnnnnnnnnnnnnnnnnnnnnnttctnnnnnnnnnnnnnnnnnnnnnnnnnnnnnnnnnnnnnnnnnnnnnnnnnnnnnnnnnnnngctgaaagcctgagtttgggagcctgcaccgccccgacgaagctccatgggagcaaatacagagcctccaggcagtgctatggtccaggctggcttcgtttttccaaggagccnnnnnnnnnnnnnnnnnnnnnnnnnnnnnnnnnnnnnnnnnnnnnnngaatcccgtatctcctttccatcccagttgggttggaaggggttnnnnnnnnnnnnntcacttccttccnnnnnnnnnnnnnnnnnnnnnnnncactgaaaaaggcgactgactnnnnnnnnnnnnnnnnnnnnnnnnnnnnnnnnnnnnnnnnnnnnnacangacccaatctcccctcagggccagcccctcctgtgaacacggtcctcctcccgcacnnnntagcgaacttcgtcat

SEQ ID NO: 4950 - DNA, 766 bp, Macaca Fascicularis
agcaaaatcgaaacataaagtgaagtttatttcaggactgagaaatatcttgaaggttatttattagatggctatctcaaatgaactttttatagacaacgatgaaaacagaactaaagtcaatgtttcctgactcccaggctcctactattccaggccatcacactggcctgttcctgagaatatttctctcagaatgttattatctacttacaattaggataaactataaattttattctatccttgtagtatgaaacatgctccaaggaaatggaatctgtcctttaaatggataacagtatgtattctaatggcataaaatattactggataaaaacaattatgtcagtgtctctcctaggatagtaaatataattgacttattctgaacccattctattttgaatcttccccctttcctctcacaatacttgaacattttaatcttttggaatgttgtctttttttgttataactattcatttttagcttttgtctccagtgcatgatctcatatttttgcttttacttttagtataagaacatttatgaaatcacatttttgttattgcaattgttttatttgttgtgtggtaaatgagaaatcctttatttattgtgctgtgatctctctgtgtggaatgccttggtaagagagatgcttattatgactattatcatttctgaccaagcttctattaatgttatttctaataatacactatcttgattgtactctccagaaaatttactgtcaggaaag

SEQ ID NO: 4951 - DNA, 759 bp, Macaca Fascicularis
  misc_feature (1)...(759): n = A,T,C or G
aaacatgcagcagtttgactttaaagttgcaaattggctgaaaatgttttactggacattcagctgtgctgcttagaaaaaggccacatgtttctttttcatacaagttgtttattgagttatgatagaaatatactcataaataagcaaagaaaaatacctaattataattatcaaaggttcacttaaaaaattaactattaggtaaatttaaggggacagtgaacaatctgtttatgattttgggagtaacctaaccacgaataatattagcataatgagaacatttattttttaaataaataactagattttgtttaaaataagaggttttttccagaatacaaggtttcaataactacatgaggagtttaaagttttaaatatatactcagacattcattgtaacacagagtctgtgtaaaatcatttccctcacccactggagggagtatttattgcagacattttgttcagcaacatttagtgtttctgtgaaagttggacagttggggcttaaaacatttatttgtaaaatgagatatgtacaaatgtaaatatttgtaatttaatgtatttaccacattgactgtactaattatttagtagtcatactaaataatttttatgttaataattgtggagttcaaagtctagctattggtataatcatctaatattatgtatatctccnngtgccactgaattttatgtctgatgactatatatttgggcatatatcttgtggattagaataaa

SEQ ID NO: 4952 - DNA, 2106 bp, Macaca Fascicularis
atgtttttatgattctgatgtgggagtttttccaatgctatttttccagtggcatggataaccgagagttaaccataattacaggcttatagctgctgaggagtatcattagtttatttttacttctttctggacacgcatacttcagcagaaaagaaaactaagagaattaaactaaacaatatcaaaaccatgggcagcacaaatcttgattcagttcaacaaacattattcaacatccagttgaatttgcaagtcatattagtaggcattttgggggatatagaaataaagaaaacatgaggcttgtccctaagaagttgtcagtatagcggggaattggagtatgtccatgagagtgtacaagggagaatggggcatgtgctgaaaagatcagaagtacagaataaatgcttaacaaacacttgctaatgaatgaacgattggcttcatggaaaggagattttggctagaccaacagtggtgaataggattttgatatgtggaaatgggaaatcctaataaattgcaaaagggcttgatgtttgggaagcttaatatgctggtttgctagtgtttaagatatacaaataggaaaatagctagagaaaagcagtaacaaaagatttgatagagatgcagagagcctaaaatattaggcaaggaattcatttgataggcattagggaaccactaaaggtagtccagtgtgtattcattaggaagatttatttggcagctgtcttctggatgaatgtggaagggtgcccttggacacaggacagtcagccagaagattaagccaggtaagaggtaaagaaggcttgactaagacagttgcaatgaaatagaagagaaaggactggaatggaatgacactcaggaagaaaagaactctgggattataagactggataagtagaggtatggagttggcatgagtagaggtatggaggttggagttccttagagaaggaacaggttgtcaggaggtcaagagggaagacagagacagcgagcttggctttggacctgtggtgtttgcagttaaccctgggtgtccttgaggtggctggcagacaggtggaaagatgggtctggagcttagcagggagaaagaggataaacaggccgtttccaaaatcatcagctgaagcagaaaaaatagatgagattggccagggaaagatgaagggagggaagagaagagggcatggggagcatttcctgcctcatgccctacttctctggcacctgcccccagtagaaactttggtgctgtctgtgaacagctttgctgaagcttggattcagtctcttgtcttcacctgtggaagttcccttttatactgtgtttctgctgaagccaaaaggtcagattgggtttctgagtaaaacaagggtttttttgtttgtttgtttgttttgtggggttttttttttttttgcctccggcaatgattattaaacaaacagtacccacccaagaaagcagaatttatgagctttgctaaaataataataataataataataataataataataataataaagagacccttacattggcatgtgggtggcacatggggtctaaatggccacagaccaaggaccatttttgcttgtccaagagtgatgctgcttcagagtggtacagcctttgtgggtgacactgtcctggttcttgcagtgccaagctcttggcagaacttccagacacttaagacaccacttctctcatttactccttcctttcccttggagaaaaatgtcagatgcacccgctgttatcactgagagcatcctgtgacctgccccctctaggagacatctgtcttgggcccttggtaagaaactgggggaagtgatggttcactaattcggcaaacatgcatggagctgacactatgaagatgacccagtcctagttgatatgaggagctgcaaagagagaaaggggtggggactaaatcccttgaggtggatgttaggttcccattctacatatgagaagattgtgagaagattaaaatattgtgcccaagcactccagcccgggcgacagagcgagactccgtctcaaaaaaaaaaaaaaaaaaaaaa

SEQ ID NO: 4953 - DNA, 719 bp, Macaca Fascicularis
  misc_feature (1)...(719): n = A,T,C or G
gcttgcagaagacctgtctccttggaaatgccccagatattttccataccctccnnnnnnnnnnnnnnnagcctggggctagatatctgacatatccctggcattgcttcctctccttccttcctgcatgtgttggtggtggttgtggcaggggaatgtggataggagatgtcctggctgatgcctgccaaagtttcatcccaccctccctgctcatcgcccctgttttgagggctgtgacttgagtttttgtttcccatgttctctatagacttgggaccttcctgaacttggggcctatcactccccacagtggatgccttagaagggagagggaaggagggaggcaggcatagcatctgaacccagtgtgggggcattcactaggnnnnnnnnnnnnnnnnnnnnctccccaaccccccagataacctcctcagttccctagagtctcctcttgctctactcaatctacccagagatgccccttagcacactcagagggcagggaccataggacccaggttccaaccccattgtcagcaccccagccatgctgccatcccttagcacacctgctcgtcccattcagcttaccctcnnnnnnnnnnnnnnnntgaggggagggcccccagagagcccccttccnnnnnnnnnnnnnnnnnnntgctttgcattttgggctcttctatatattttgtaaaataagaactataccagat

SEQ ID NO: 4954 - DNA, 2047 bp, Macaca Fascicularis
  misc_feature (1)...(2047): n = A,T,C or G
ggacgcgtgctcttcagtggcagaggcggcggcgaggcctgagcgagttgaacttcctctctttttagaagaatggatttctcggaggccaaaaaaatttatggttcttctctggaagaattttattttaaagaggcggcgatgtattgctttagttgtggaaacggtcctcacatttctgtttagtgccgcactcttggcagtacgctctgttattgttataaagaagaatggaccttttgatttcgctgctcagcctgttgatgaagtgcctttctacgtcacagcttccttagcttctgctttccctttggaattggcttatgtgccttccagaagtactgtggttcagggtattgtcgaaagggtgaaaatggatttaaacccccaaatgaaagttctaggcttttctacagaagaagaatttgaagattacgttaaggaagtaaataactctgaaaaggttctggctgctattgtttttgaccatgacttcaaaaatagcaatgatcccctgccgctgaaggtaaaatattacctgcgttttagtaatgaaaagaagagtaatatgctggaaaatatttatgaagaagcaagctggttgacagattttctctttccacctatcccttcggtgggacccagaaatgaagatgaagatggggggagtcctggtaagcagatctttattcttaatatcccagtcatataggatgagccattacatatttaaatttctgtttctttactcttgcaatggaagctgcttatttttaacttactattttggtgatttttaaatatgtccaaaaccccatatgaaacattctatatctttgaacaacatatttttattgccttttatcctttcctggtccttaccattgtgtatctttatattttcatgtagtttaattgtgaacttttgacttacatgacgtaatgaacatttgtaggtaccaacacaacctgattaattgtaactgtgtgttatcctgttggattgatgagtgatttttaatataactatagtaatttaaaaacgtcaacttattatacagcctaccatttataaggatttagtgtgggggctttgcttttaccaataactttgcaaacttaccttgaggaaactattcaaccaaagaaataaactgattgatttagcataattcttaaaaatgtgaaataacctacatcttaggtatggtaagttaatagtacaaatataaatataatttgacagagcattgtgcagtcattaaaatattcatgagatctttttgtagaagccaagttcagaactctgttatcaaattatagctctgttaactgcatattcatcaacataaaactgggacagatacccaaatatgaaaacaattgctctgttagggtggcagaattgtgatgtatgttattctctttgaaaataatttcaggctgggtgcggtggctcacacctgtaatctcagcaatttgggaggccgaagtaggtggatcacttgaggtcggnnnnnnnnnnnnnnnnnnnnnnnnnnnnnnnnnnnnnnnnnnnnnnnnnnnnnnnnnnnnnnnnnnnnnnnnnnnnnnnnnnnnnnnnnnnnnnnnnnnnnnnnnnnnnnnnnnnnnnnnnnnnnnnnnnnnnnnnnnnnnnnnnnnnnnnnnnnnnnnnnnnnnnnnnnnnnnnnnnnnnnnnnnnnnnnnnnnnnnnnnnnnnnnccaaaaaaaaaattaataaaaataataattttcaaatattatttttccagtcataaaatttgaaatgaaatcttatgtttcttatgcattatgttactgcattataaccttagtcttctagtaagaaaacatgaaacccaaattgtggaacattctccaaaatggctgaccaatattcttaaaaactctcacggtcatgaaaaacaaggaaagaatgagaaactttaacagctcagaggagagtatggagacgtgacagctaaatgcaatgcaatattctgaatgggatcctagaacagaaaaaaaaaaaaaaaaaaaaaaaaaa

SEQ ID NO: 4955 - DNA, 720 bp, Macaca Fascicularis
gtgagaccagctgctgccagccaagctgctgccagaccagcttctgtgggtttcccagcttctcaaccagtggaacttgtggctccagctgctgccagccaagctgctgtgaaactagctgctgccagccaagctgctgtgagaccagctgctgccagccaagctgctgccagaccagctcctgcggaaccagctatggcattggtggtggcatcggctatggccaggaaggcagcagtggagctgtgagcacccgtatcaggtggtgccgcccagactgccgcgtggagggcacctacctgcccccctgctgtgtggtgagctgcacacccccatcctgctgccagctgcaccacgccgaggcctcctgctgccgcccgtcctactgtggacagtcctgctgccgcccagtctgctgctgctactcctgtgagcccacttgttgaaaacctccttctgctgggaatcctgataagatggcactttaaaactagccaaattagaatcctaacaatcttctgaactccagtacctataactgggcttgcaacctctcatcacacagccacataaattctctaggatgtaaattcatttacaatggaagaccaaaattttttcctagacctggatgtcagccaaagtcctacaatgtgaaaagagttagataatattttactataaatatcatctgaaatatttcaacaattattgggactt

SEQ ID NO: 4956 - DNA, 712 bp, Macaca Fascicularis
  misc_feature (1)...(712): n = A,T,C or G
cctggcaggtagtccccagaatnnnnnctcccagctttcaggttctgggctccggaaaggcttctgggattctggccttaagaccccagcacagactatctgcatgttccattctcagattcctggaggaaaggtaccctccgtcgaccgaggggctggctgcttctgagacttaccaaacccaagaaatttggagacgttcacctcaggctaaaaggcagtggtccccagagttcagaaagcaaaagaccttgacaactgtgctagtagtggctctggtcctctctctccacagtgctggcctctgctggggaaggcatctctcccaaaggtatccccaagtaccacgttgaaaatgtcctcagtctgttgctccatctttctgagcctgtgcttggtatgttatgtttatggtcattacagatgactgtgtgcagagcttcaattttttctttttaagctacaaagaagaactatttcttctcaataaaaaaaggtttggattcggcctcttcctctgagcccacctcccagccctcccgggagcatcagtgtacctgagtcactctgtctgcatctcttcatcccacaaaacacgaggctgggtctcattcagctgcctctcagcagccttcaagatccagaagaaaacaggaacgttcagctctgccctgtgtcctgtctcatcacatacattaatttatctaaccac

SEQ ID NO: 4957 - DNA, 745 bp, Macaca Fascicularis
agccctcagtgtggacatcaggaccatgtcaagtagagatttgctcaatgcattgaagtcagtcattaatgagcctatctataaagagaatgccatgaaattatcaagaattcatcatgatcaaccaatgaagcccctggatcgagcagtcttctggattgagtttgttatgcgccacaaaggagccaagcaccttcgggtcgcagctcacaacctcacctggatccagtaccactctttggatgtgatagcattcctgctggcctgcgtggcagctgtgatatttatcatcacaaaatgttgcctgttttgcttccgaaagcttgccaaaacaggaaagaagaagaaatgggattagttatatcaaaagcctgaagtggaatgactgaaagatgggactcctcctttattctggcatggagggttttaaatggaggatttcctttttcctgtgacaaaaaatcttttcacaacttatcccattaagtcaaaatttattttccagggatttaatatgtgctttagttggaattattctctgtcaatgatttttaaactatgaaaaataacaataatataaaaccttatgggcttatattgaaatttgttattctaatccaaaagttacatgcaaaagtcactgagcttcattatgtttcaaacattgtatttgaacacaacaacattaagaactccactcatagtatcaacattgttttgcaaatactcagaacattttggcttc

SEQ ID NO: 4958 - DNA, 481 bp, Macaca Fascicularis
  misc_feature (1)...(481): n = A,T,C or G
gttggtggcggcggtcgagcggcagacgcaaacatgcagnnnnnnnnnnnnnnnnnnnnnnnnnnnnnnnnnnnnnnnnnnnnnnnnnnnnnnnnnnnnnnnnnnnnnnnnnnnnnnnnnnnnnnnnnnnnnnnnnnnnnnncnnnnnnnnnnnnnnnnnnnnnnnnnnnnnnnnnnnnnnnnnnnnnnnnnnnnnnnnnntcagactacaacatccagaaagagtccaccctgcacctggtgnnnnnnnnnnnnnnnnncattattgagccttccctccgccagcttgcccagaaatacaactgcgacaagatgatctgccgcaagtgctatgctcgccttcaccctcgtgctgtcaactgccgcaagaagaagtgtggccacaccaacaacctgcgccccaagaagaaggtcaaataaggctcttctttccttgaagggcaacctcctgcccaggccccgtgcccnnngcctcaataaa

SEQ ID NO: 4959 - DNA, 714 bp, Macaca Fascicularis
  misc_feature (1)...(714): n = A,T,C or G
catagacagctgcctcaaagggaatnnnnnttaaactgtcannnncgcagaggtcagtcctagtcggagcttgggaggggtgcgctcacatcgtctgacttgagttgccactgattgtggcaacagctttgccccaaaaactggtgatttctttcgatttttaggtgttgaatttgctgtttcaagcatttgtacatattagaagtctaaggagtagcaagtcagtgggaggactttttcacccctggcattagcagcttcaaccttgttttccacatgcaccagctcctattaataaattagcaaggaaagtgtatgtcacgtgcaggaacagtgaggcagggacaggggttctgctccttctcacctcaccactggcgcgcaacttgcccctgtctttgcccccaaaggtattttgtgtctagtgtcaaatgggagcgattcttcactggtccttaaccttgggttttaaaaaggcggcttccctgtttgggtagcgtaagatctgattatagtaagtcctcttccaaagagatggcaatannnnnnnnnnnnnnnncaaaaaaaagtctgatttctacaagagaggttaggattttattgttcatatttccctttacagttctgcaattccatcacagtatttttttaaaataactcaggtgttatgagaagaaattagaaaggaaaattaacttatgtggactgtaaatg

SEQ ID NO: 4960 - DNA, 771 bp, Macaca Fascicularis
  misc_feature (1)...(771): n = A,T,C or G
caatatgacatttagtaatagtctatcatannnaaaatagacatnncaaacnnnnnnnnnnnnnnnnnnnnnnnnnnnnnnnnnnnnnnnnnnnnnnnnnnnnnnnnnnnnnnnnnnnnntgcctgcattttcagtaccacatannnnnnnnnnnaatagttttgtnnnnnnnnnnnnnnnnnnnnnnnnnnnnnnnnnnnnnnnnnnnaattgtgatgagtgttttcgattcnnnnnnnnnnnnnnaagattacaaaagctgnnnnnnnnnnnnnnntagtcaagctagtgagatagtgtatctccccataagaaagtaagataattgatggggtgtggattcaggagagggattacttttctttgagcttcagacttctaaatatagacaatatacttcagtcagtaatggatcacatatagaacagtgttcccttagtagaccatatttttactgtgccttttctatatttagatacacaaataccgttgtgttacagtnnnnnnnnntattcggcnnnnnnnnnnnnnnnnnnnnnntggaacaaaataggccataccatctgnnnnnnnnnnnnnnnnagctgattttcacacaagaagattccctaactnnnnnnnnnnnnnnnnnnnnnnnnnnnnntaagtgatacatgagtaatttatgtgaaatttatacattctatctttcctgtttttgatttattgatggtgaggaaaacactcatttcagctttttcatttttttactccccaaattgattttcacc

SEQ ID NO: 4961 - DNA, 666 bp, Macaca Fascicularis
tgaagataatcaccaaatacaccagggctcctcattccagtcgtaacgcatccattgagactggaatgattgagttcagttgaaaggcgttttttgtgttcctactgggagctcacggtgatgcagggctctaggagggatgtgagaaatgtctgttctgttccttgctctccagagaatgctatggacgaaaatcaaattttaccaggaataattgtccatggaaacattctgtttttcaaaagaagaatgtacatatgccacttggctgggaagctgtgtggcccaaatcactttttgagtggaggaatgttttccatagcagtgactgcaaggacaaacgtggtgttgcagggcaaaaattccttgcctttggtatagaatggtggtgccttttccacgtgttgggaaatacttgatagacagtggtgtgtgggagagctgaaggaggaggcgtgttccatattccactcactcaaaggacagcttagtgttttcacactttgtgcaggttaggggatctgattaatgtttcctttccttacaacagctagagaaaacatctcatcacaattggcgacctctactcccttcgaactttcctactcaacggtaggagatagtaatgtgtccagcaaagaatgtctactgctcttgtccttggct

SEQ ID NO: 4962 - DNA, 2266 bp, Macaca Fascicularis
attagatgcgctctctaacaggggctcactgacagggaagttggcgtaaggtctgtttctttgctgggtcatattttacagtgtgatcttttcactctgaaagcggagaaacacattttcaaatatattttccattacggctccttctagaacactgtgttgtttctcctagtaaagtggctattccttgaaaaataactataggtttagctgatttgtttttattaataattgatgatgcctttaagaaaaagaaaatctccagagaggcctgcatcttcaaaatcccctgaaatctctaggtcccatgtaaacagtataaaggagagaacgtcatcagttgggttgcctagtgttattccaaactctacacgccgtgtgagctttgcacctaacctgccttctgtgaaaacatctcaggatattggagactctaggatctctctaaagactcttttgaatgctattaaaaccatggagggaagactggaaggcaaaatagagattcttgcctcaagacctttagtaaatgatgaatcaccaaattttcttaaacgggactcggtgaaatctattcttgaaagaagtaaagaggagctgtcccgaacagtgaagtgtcgtaatgcggccctgaaagagagtcagaagttgaaagaagacctcgaggccgtggaggacagggaaaacaagaaggtgggaaactttcagcgacaactggcagaagctaaagaagacaactgcaaagtcacaatcatgttggagaatgtgctggcttctcacagtaaaatgcaaggtgctctggagaaagtacaaatagagcttgggcggagggattcagagattgcaggcctcaagaaagaaagggatctcaatcaacagagggtgcagaagctagaagctgaagtggaccagtggcaggccaggatgcttgtcatggaggaccagcacaacagtgagattgaatctctacaaaaagctctagatgtagctagagaagacaacaggaaacttgctgtgagtctggaacaagctctccagacaaataatcatctgcaaacaaagctagatcacattcaagagcaactggaaagcaaagaacttgagcgacagaatttggaaaccttcaaagaccagatgactgaagagtccaaagtggaagcagaattgcatgctgaacgcatagaagccctaagaaagcagtttcaaactgagagagaaactgcaaagaaagtggcacaacgggaagtggctgagctgaagaaagcccttgatgaagctaacttcagatcagtggaagtgtcccggaccaaccgagagctgcgacagaaacttgcagagctagaaaaaatactagaaagtaacaaggagaaaataaagaatcaaaagacccaaattaagctccacttgtcagctaaggcgaataatgctcagaatatagaaaggatgaagcaaatagaaaaagaattgaagcaaatggagctaattaaggatcaatatcagaaaaaaaactatgaacagtctttgagtatccagagatttgtgtgtgaaatgactaacctgcagaaagagatgcagatgttggccaagagccaatatgatgcctcagtgcggaataaacagcaagagctgtgcctagaagcagagcggaaaataaggcaggagctagagaatcggtgccaggaattggaagaaactatcagacacctgaagaaatgtaaagaggcaacagagaataagctgaaagaagccagtgtggaatcagaacagataacagctaacctggaagaagcccatcgctggtttaaacacaggtttgatggtctacaacttgagctgataaaaaaccggttgcagaggccttctggggaagacaggtggcaggaaaaggaccaagatgtaaaacatgatgtcatgtccaaccaatctgttctgcatcgatgggagaaaaaacagaatcttaggcctatgcccaagaagtatcattctgaggtacagaggaagtgatgtccttgacaagggagcttctttatgtgtagctacactccatgattccacgagcccagcagccagggctggcctgtttctagagtcataagaacatgaagtctttgatgtgggctgaagattttggacctgagtttatcattttatgaactattatatcagtacaaagctaccccgttgttttgtccctttttgcattttccacccaataaatttatgttaatttgttttatgataaaaaaaaaaaaaaaaaaaaaaaaaa

SEQ ID NO: 4963 - DNA, 678 bp, Macaca Fascicularis
  misc_feature (1)...(678): n = A,T,C or G
tggaggaggaacttcccaagtgcttttaaaaataacttctngnnngaagtgagaggaagagtctgagttgtctgtttccagaagaaacctcttagagaattcagtaccaaccaagcttcagcccagtttcacccccactgggcaataaactttccatttccattctcctagctggggatggggcatggtgagactcagccatcccccccagcagttaccctcctcagcaaggcatctaccggcccctcacagagacagtactttgaaactcatgttgagattttatcctctcctccagccattttgggaaaattttggactgggactcttcagaaattctgtctttttttctggaagaaaatgtccctcccttacccccatccttaactttgtatcctggcttataacaggccatccatttttgtagcacacttttcaaaaacaattatataccctggtcccatctttctagggcctggatctgcttacagagcaggaagaagcaagccaccaacttttacctagcccggctaatcatggaagtgtgtccaggcttcaagtaacttgagttttaattttttttttttcttggcagagtaatgtaaaatttaaatggggaaagatatttaatatttaatactaagctttaaaaagaaacctgctatcattgctatgtat

SEQ ID NO: 4964 - DNA, 2175 bp, Macaca Fascicularis
gtagtgtgcggggcagcggaggagagcggagcctgtggactggcagaccctcgctcgctcgctcgctcgctgtagactatgcgcaggcgcggtgcactgcgcgccggcactagggtgtttttgcagttggctgtggagaaacagcaggcggtgtggactgccgttgctgagctggtgtggaatgtctgtggtcagcttcttgaacctgatgccttccctagtgaggttaatggggcttctgcacaacatatgaacagccaaaggattaccctctccagatgttggtgcctggctcttggacttcccagcctcctagaactgtgaaaaaaaaaaattaaagaaattaacaggaggtggccaagatggtcagctagaagcagctagtgtttgtggctctcacagaaacgaatggaaggagaaagtaaatacagcaccttcaactgaaacatgcaggaccacccaactggagcctccagccacccctgctggcattctctggccattagcacctgcagggagacaggaacccctgtatccaccagcactctgctgtagctgccacaccatagcactcgccagcacagtggaccctaaaccatgaggagccacaggacaatggcagggcttgatgcaagtcccccagagttagagaacgcagtccaggagttggaatctgaactttggccccctaaaatctctcaaaaaatgaagccagttgacagaattcatcttataccacaatcaaaccctcaaggtcatcaaataggataaaacaaacaaaaaacccaaaggtcagcagcctcaaagattgaaggtagaagcccacaaagatgagaaagaatcagcacaagaatgacaaaaactcaaaaagccagagtgccttctttcccccaaaggactgcatcacctccagcaaaggttcagaactgggctgaggctgagatggctgaaatgacagaagtagaattcagagtatggataggtacaaagttcattgaactacaggtgtatgttgtaacccaatacaaggaagctaaaaatcataaaacatagcaggagctgacagacaaaatagccaatataaagaagaacatgacttagctgatagagccgaaaaatacattacaagaatttcataatgcagtcacaaatattaatagtagaacaaaccaagcagaggaaagaatctcagagcttggagactagctttctgacataaggcagacaagaatagagaaaaaagaataaaaaggaactgaaaaaaccttcaaaaaatacgggattatggaaagagaccaaatctataactgattggtgcacctgaaagagatgagaataaaaccaacttggaaaacatatttcaggatggcattcatgaggacttccttaacctagctagagaggccaacattcaaattcaggaaatgcagagaacccccagtaaaatacttcacaagatcatccccaggacatataatcctcagattctccaaggtcaagatgaaagaaaaaatgttaaaagcagagagaaaggcaaggtcacatacaaagggaagcccatcttattaatgctggacttctcagctgaaatcctacaacccagaagagattgggggccaatattcaaaattcttaaaagaaatgccaacccagaatttcatatctggccaaactaagtttcataagcaaaggagaaataagatccttttcagacaagtaaatgctgagggaatttgttaccaccagacctgccttacaagagctcctaaaggaagcactaaatattgaaaggaaagaccatttaccagccactacaaaaacacactgaagtacacagaccagtgacactataaaggaaccacatgtaaaaagtctgcaaaatatccagctaacatcatgaggacaagatgaaatccacacattatcaacactaaccttaaatgtaaattgactaagtgcccccaattaaaggacacagaatggcaagctggatgaagaaccaagacctgttggtatgctgacttcaagatacccatctcacatgcggtgacacacacaggctcaaaataaagggatgaagaaaaatctaccaggtaaatgcaaaacagaaaaaggcagggtttcaatcctagtttctgacaaaacagactttaaaccaaaaaaaaaaaaaaaaaa

SEQ ID NO: 4965 - DNA, 779 bp, Macaca Fascicularis
  misc_feature (1)...(779): n = A,T,C or G
taaggtgacagctgccaaattcaagctgacaggnnnncaggcagtgactgggagccgtgaccggacagtgaaggagtgggannncggccgtgcctactgctccaggaccatcaatgtcctttcctactgtaatgacgtggtgtgtggggaccatatcatcattagtgnnnnnnnnnnnnnnnnnnnnnnnnnctgggacagcagggggccccactgcacccaggtcatccctgtgcagggtcgggtcacctccctgagcctnnnnnnnnnnnnnnnnnnnnnnnnnnnctgttcccgagacaacacactcaaggtcatcgacctgcgtgnnnnnnnnnnnnnnnnnnnnnnnnnngctgatggcttcaagtgcggttctgnnnnnnnnnnnnnnnnnnnnnnnnnnnnnngaagctatgcactggcaggctcctatgatggggccctttacatctgggannnnnnnnnnnnnnnnnnnnnnnnnnnnnnnnnnnnnnnnnnnnnnnnnnnnnnnnnnnnnnnnnnnnnnnnnnnntccgggagccacgtggtgagcgtggaccagggcaggaaggttgtgctctggcactagggccatgacttccctgcctgggctggagctcttgcccgaagcctgaagcttccctcggcgccgtgcgggggttggggnnnnnnnnnnnnnnnnnnnnnngatttaatggggaagaaggcctggtaggacctggcctgtttgtttaaaaatgaagctagtttttctttgtatttttatctctatctcc

SEQ ID NO: 4966 - DNA, 1409 bp, Macaca Fascicularis
  misc_feature (1)...(1409): n = A,T,C or G
tgaccctcgctcnctgtannnnnnactacagaacagaaaggacaggaagcagcaggagtatgaggaacagttcaaattcaaaaacatggtaagaggcnnnnnnnnnnnnnnnnnnnnnnnnnnnnnnnnnnnnnnnnnnnnnnnnnaactaatagaaaagcaacgaagagannnnnnnnnnnnnnnnnnnnnnnaatacagaaataacctcaagaaggttggaatttctcaagagaacaagaaggaagtggaannnnnnnnnnnnnnnaagcccatagaaaccannnnnnnnnnnnnnnnngcaannnnnnnnnnnnnnnnnnnnnnnnnnnnnnnnnnnnnnnnnnnnnnnnntgtgaaaagactgaaaccagaccctgagccagatgacaagannnnnnnnncctcatcctgcaagtctctcggaaacacttccctgagtggcccctccatccactgcccctctgctgcagtctgtatcggcatccttccgggcctgggcgcctactctgggagcagcgactccgagtccagctcagacagcnnnnnnnnnnnnnnngccaccggaaagattgtctcctccatcttccgaaccaacactttcctcgaggccccctagtttctctgtccttacacagggagctcctccccaagggtagattggaccgttcatgctgccttcgggcattacgtctcaaaaaaaaaactcctttgcctgcatcctgtgcacaacatgacacttttaaccaatccaatctaaaaatgtgccagaatccacctgtggcccgaattgtgtttggtttctctttctactgcagtgcacatgagcaaacctatcccgctgccactttcctcactgatattaggaggagggcaaggcccagctgaagttccactaaaaatgccctaggagaataggcaccggctggctnnnnnnnnnnnnnnnnnnnnnnnnntttctgtttttttcttttcctgacagcacaaagaagtaagggcagttataagtaagaagtaaggtgttatttaaacattctattgtaggtgaacgtgttgtttggttctactgcattgtggagcatgcgggggaagagaactgacccaggtgatgaaatggagcccttccctggaactaaccaggtnnnnnnnnnnnnnnnnnnnnnnnnnnnnnnnnnnnnnnnnnnnnnngggtgtcacttcacactcggcatgcattgtgaaagctttccatacccttggccattctctctcccctctttatccaaccccgtttatgcaggaagggactgctaacaagaaagcttccatctcagaccttttttctgcctgggaaattattttatgtttgttttgaaataaaggatttagtttaagattctaaaaaaaaaaaaaaaaaaaaaaaaaaaagg

SEQ ID NO: 4967 - DNA, 745 bp, Macaca Fascicularis
  misc_feature (1)...(745): n = A,T,C or G
agattttttgacnnnntgaannnctaatgtggtgagagagaaaaacataaaaacnnnnnnnnnnnnnnnnnnnnnnnnnttaactttaaaggggatgtcttacataatgccaaaggaaaatgtgacagggcttcagctgatgacatagcagtgcaagaaatcagtgaaattgctttaaggtattacaataaacaacaattttaacagttattcctatgcttgtcacaagcacataatttcagacaaacaagacatcaaaacatacatccttgaattagtttttcaaaaagtcaacactgaagctaaacattgcccccaaatctctgcaaggcacttatcaaaatccacatagaacccattcagtatctcataacactgatgaaagactgtttaaacttctgatagttttggtaaaaatgggaaggaattcagcaaaaatgggagaaatataatctttgcagtaatttatatgaccttaaatgccgtttatgcatgactggatatgctgtttctctttacattttaaaatagcttagagtgttattggttagctggacatggtggtgcgcacctgtagtcccagctacttgggaggtttaggcaggagaatcacttgaacccaggacatggaggttgcagttagctgagattgtgccactgactgtacttcagcctgggtgacagaggaagaaaaaaaaaaaaaaagcactgttattagattgtttgtaactcaaagaataaaggc

SEQ ID NO: 4968 - DNA, 713 bp, Macaca Fascicularis
  misc_feature (1)...(713): n = A,T,C or G
tggacaaagaannnnnnnncgcaaatggagacatttatnnnnataatactaaagagaataacaagattggnnnnnnnnnnnnnnnnnnnnnnnnatcacatggggaagcgctttatacagnnnnnnnnnnnnnnnnnnnnnnnnnnnnnnnnnnnnnnnnnnnnnnnaaccagtcatttcatttttgtaaattacagattttatcacagagtaannnnnnnnnnnnnnnnnnnnnnnnnnnnntatatatatatacgtatacatatctgtatatatacatatatatatatataaaaatataaatatattctttactttttgtatnnnnnnnnnnnnnnnnnnnnnnnnnnnnnnnngccacgtcgcaaacnnnnnnnnnnnnnnaattaaaaatgtatttgtcatgttgaaaagtgttagccacaaaaggctacttactttcttttccttttcctttaaaattgtaaataaataatgttnnnnnnnnnnnnnnnnnaaccttgcatatccttcacatatttcccataagcccctcagaaaggctaactgtgatgannnnnnnnnnnnnnnnnnnnnnnnnnnnnnnnnnngctcctgttaaagannnnnnnnnnnnnnntgttcctgtagtnnnnnnnngtacttgtgtattgtggaaaaagtattnnnnnnnnnnnnnnnnnnnnnnnnnnnnnnnnnnnnnnnnntacata

SEQ ID NO: 4969 - DNA, 2689 bp, Macaca Fascicularis
aacttctcaagataaacctaatggtaatgatgttgaaatggaaactgaagctaatttggatacaagaaaaaggtttgtaatttaatcaatttgtgtattctttgttttatgaatgttctgtctttatgtaaaattgatgcgagtctttttgttaaaaataattattgagtagcatgttatcttgctgatgattaacatttaggtatttggagtactgtagagttatttcatgacctgtgcaaactacatatgccaagcaaaagtaaagaataagaaagtattacagtttaaataatgtggatagtttaccattcttactgagggtatgcttaggaacaaaggtgaggttggacttctgtgccccttagttgtttttagattctacatgttctcattatgtgattcatgtttcactgtactaagagtctagtatattaagatattattcgtatatcttctctaacggtaagctcactacttcatctggtgcttgactgaagaaatagtgatttgctttaatactggaggaagacaagctgtgtcagtcctgtatattgagagatatgttaagtctccaaaattattttttctttagggattttcaggggtgattttgtcttttgttttagaagcttaagtatcttcccctattgaggaagctataactctgatattataaagatcttctttcctattgaacccatggtctgttttctctgttcttctaccttaaaccaaggccagataatcaaatttctgtggtctctggatgggtatatttggaaatggatgtaatattactttcttcttgggaccaagacctaagtgttgcagggaccccatcttaactacttatttagaggtggagattggggttcaagttggatctacactggacttgtcacatcttaggactgaggctctgtcatcttatagtggtccctcctattgttcctgcctgtcagagcatgacctgttcctttcatctctccaaaggctgtactaaagtcttatttcacattgatgtgcctttttctaaaacccagtttaagaagtagagattccatatttactggcccaattacttcattttgtttcaaaaatcaaagtttaatgatactaatacccaatacattcttgtgggcaagccatcctgctcataattatactgctaataccatggttcttacagataatgacaagcacacttcctatggactctccttatatagtactacccacttatttcagatgctctcctagacacaaacacagtgcaatccatgtgtacaaacagaactcttcatgttctcatttgcctctctacaccctgcctctcttctttaacctcacacatccagctgtctctccaagtattaagaaccccacctcagaaatgcttctccaatctatttttatctctatagctttgtaccattcaaatccatccttgacataacttccagagttagcttccaaaaaaataaatctctttagatcactcccagcttaaaaactttttgactcctatttcctactagataagtcagaatttattgccatggcttataaagccttacatagacccattctattttttttaatatacagtcttatccctaagcatgaacccctccctgtccacgtacatcgtactttctagcattacagaacttctccctgatcttaaaatgttagaagttttcacacctctgcccttgctttgttccttctatttgaattcctatcattttattttctccaaggcaagctcttacttgctattcaatctatctcagagatcacctggatgaagtctttcccagctctgtaatcagagttgttacttctgttttttcatagcatacatctctataaaaggacttatctttgttagtaacttatctgtttacctgattctttcactagtttgagaattatttgaaagttcttacttagccttgaagcatcttaattagcttggtatccttgttgcctaattcattaccaggcatacattagaacttgctgtacactagttgcagggaacaaaactaaaactagaaacagcgtaaagatcaagaattgagcaaataccaaaaccatcctggaagcagaaccagggcaaataaagcattaaatcaccagtgtcaggacagttaccaataagggttcaagtaaagcaagtatagaatcagaagtgtgattgtgaggtcagacaaatcctagaaaaattgaaacccccatgttatgaagactagatgaaataaatattttgctctgataaagcttatacagttgttcgttggtgtttgaaggggattcgtcctaggacatccaccctccatgaataccaaaatccacagatgctcaagtgtcttacaaaaatggtgtaatagccaggaacagtggctcacacttgtaatcccagcattttgaaaggctgaggcaggaagatcacttgagcccgagagtttgagaccagcttaggcaacatggcagaaccttgtctttacaaaaattaaccagtcttggtggtgcatgcctgtagtgccaactacttgagaggcttaagtgagaggatcgcttgagcctgggaggtctgcagtaagctatgtttgtgccactgcactccagcctggctgaccctctgcaagaccctgtctcaaaaaaaaaaaaaaaaaaaaaa

SEQ ID NO: 4970 - DNA, 754 bp, Macaca Fascicularis
  misc_feature (1)...(754): n = A,T,C or G
taagagtgagcgctcatgctccctaaacaacacactgctctttatgttcaatgctgacttgttnnnnnnnncagcagccgagtnnnnagtcccaaggatttatggggaagcacacgcatcccctgggctgctgggaaggccctgctggcgagctcatctgtctcttgtgtctggcccacactgggtgtactgcctccctctttcctcccatactctcttttctcgtggactcgtaatgaggtggcttccatagccgcccccgggcccgtnnnnnnnnnctttatcatctaaatttaaannnnnnnnnnnnnnnnnnnnnnaattacgagaagccagaacttctcgctttgctccctgactgttcttggcgtgtgtgtttccgcctcacaacccggctcctactttccccatctggcattgtcccctggcactgcttttggcttgtcctgctcagtcttcgttcaggnnnnnnnntcctcatcaacgtcccttttgcaggtttttnnnnnnnnnnnnnnnnggataaaagttggnnnnnnnnnnnnnnnntgcaannnnnnnnnnnnnnncccaactccaaagacagatttttacctttcttgttatttttgttcatcttttgggcagggcaaaggttacatgagagacaattactttgggaatgtagatataagatatgttacatggaaatttgcaaccggcgtccgaaagaaaaactgtctttatcttgttgtacaaatacagttttaaagca

SEQ ID NO: 4971 - DNA, 1972 bp, Macaca Fascicularis
tggggcgccaggcgaatcggggtcttgttttcgctggaagagcccagtgttggtggcttcaggtggctgccgccgccgctgctagtgcggtttccgctgctggtgcgaagagaagagacacgcgagcggggagacctccgaggcagcgaggcatcggacatgtgtcagcacatctggggcgcacatccgtcgagcccgaggggagatttgccggaacaattcaaactgcgatattgatcttgggggtgactgtccctggccggctgtcgggtgggagtgcgagtgtgcactcgctcggaagtgtgtgcgcgtgtgtatgtgtgtgtgccgtgtcgggctcccccctgcccccccctgttttcccgtcgagtgatgcacttggaatgagaatcagaggatggaaatagtctgggaggtgctttttcttcttcaagccaatttcatcgtctgcatatcagctcaacagaattcaccaaaaatccatgaaggctggtgggcatacaaggaggtggtccagggaagctttgttccagttccttctttctggggattggtgaactcagcttggaatctttgctctgtggggaaacggcagtcgccagtcaacatagagaccagtcacatgatcttcgacccctttctgacaccccttcgcatcaacacggggggcaggaaggtcagtgggaccatgtacaacactggaagacatgtatcccttcgcctggacaaggagcacttggtcaacatatctggagggcccatgacatacagccaccggctggaggagatccgactacactttgggagtgaggacagccaagggtcggagcacctcctcaatggacaggccttctctggggaggtgcagctcatccactataaccatgagctatatacaaatgtcacagaagctgcgaagagtccaaatggattggtggtagtttctatatttataaaagtttctgattcatcaaatccatttcttaatcgaatgctcaacagagatactatcacaagaataacatataaaaatgatgcatatttactacaggggcttaatatagaggaactatatccagagacctctagtttcatcacttatgatgggtcgatgactatcccaccctgctatgagacagcaagttggatcataatgaacaaacctgtctatataaccaggatgcagatgcattccttgcgcctgctcagccagaaccagccatctcagatctttctgagcatgagtgacaacttcaggcctgtccagccactcaacaaccgctgcatccgcaccaatatcaacttcagtttacaggggaaggactgtccaaacaaccgagcccagaagcttcagtatagagtaaatgaatggctcctcaagtagggaacaaagccaagaagaatcccacctcagtgaaatgctacaactgtgaattgacgtaacctagaatgtcccccttcttgcttctctctccttctttcccccaagcctcattcattcttgggattggccctttcttcatgaaaagtgtctgcaaaaccatggcagaggaatacatctctcacacactcacaaacacacacacaagcacttgcacatacatacacacactctcttacaacctccatcatgggaagtcaagtttcagaaacaaaagtctcattcataaggtcttagaagaaaataaccagttaacctgattacaattttgataccgttttcctgaactaataaatctacccaatgagactttcagcctttgtacatacaaaattcttccaaaagagagagaaaatacagctctgatggcatcaaacggactttgcatcaagtaatttcagatagtgtcctaggatcctttgagggtgctggtagcaggtgagcaggacaaagttgaccaaggacacttatttctagattatgattcttctgtttactcaacaatttaaaaaaaaaaaaaaaaaggccaca

SEQ ID NO: 4972 - DNA, 719 bp, Macaca Fascicularis
  misc_feature (1)...(719): n = A,T,C or G
ggaaataagagcagtcacaacagagtgaaaaatgttaagtaccaatgggaagcagggaattcctggggtaaagtatcacttttctggggctgggctaggcctaaggtnnnnnnnnnnnnnnnnnnnnnnnnnnnnnnnnnnnnnnnnnnnnnnnnnnnnnnnnnnnnnnnnnnnnnctggagaagcaccagcaattgtttttcttttactgttgaatagcctgaggtcccctcgtcccatccagctatcaccacggccaccactgcagccaggggctggctttctcctacttagggaagaaaaagcaactgttcactgctccttgctgcattgatccaggagataattgttgcattcatcctgactgagcctgagccagtttagcaactgctggggagacaaatcccagaaccctgtcccagcgagccaggatggcagtgacacccagacagagtagagacacccagacagagtagaacacccagagcttccaggtggcaaagtacttgtcacagactccctcgccactgctatacaaaaaattctttaaagattataacaaatttttcaaatcattccttagataccttgagattcaggaagggaagcgtgtgtacttaagaatacacaggatcttttggggggcggagaataaaaagttaatccctttgtccgtcagtcacagtctccgttctcgtgctttcacgttctacttaaag

SEQ ID NO: 4973 - DNA, 723 bp, Macaca Fascicularis
  misc_feature (1)...(723): n = A,T,C or G
gccattatataaattgggatcctgtgatggtgggaatcagaagaatatttgcttttatatgcagaaaacatcgaattcagagagttccagaagacagcgaacagtgtgagagtctcatttctatgcacagtgtttctcaggaggatggagctagttagctgttgtctgtagcccaggttttatttctcggaatgattgttgcatttgaatactgtagccatggtgagtgagcagttgaagacttcctttctgcaccttcatagttaagggttcatcttctcacgaaataaagttgtgctgggttgcttcaattctgtggattgcctggaaactaggtaacaaggcccttagatcacaacgaccacgttgcaggtctttggaaatgctgggaaggnnnnnnnnnnnnnnnactgctgacatccttcccgtctatcannnnnnnnnnnnnnnnnnnnnnnnnnnnnnnnnnnnnnnnnncaaatagaaatttctggtatcttttcagtctcctacttttctttctattcatcacttaaatctcattattgtataatgtttcaaattatgacctggattgaaggaagtctgttttgtcagaaagactttgttaggtgaacatcagaatctcaaccaaaacaaagctgaaaaatgaggcagacttnnnnnnnnnnnnnnnngnnnnnnnnnnnnnnnnnnnnnnnggagagccattaggtttatgta

SEQ ID NO: 4974 - DNA, 694 bp, Macaca Fascicularis
  misc_feature (1)...(694): n = A,T,C or G
aggtgaagtggttaaaccaaacggaactcttcatcttaaactacacgttgaaaatcatcccaataattctgtattaactgaattctgaacttttcaggaggtactgtgaggaagagcaggcaccagcagcagaatggagaggtgggcaggggctccagcttccctttgattttttgctgcagactcatcctttttaaatgagacttgttttcccccgtctttgagtcaggtcaaatatgtagattgactttggcaattcttctcaagcactgacactcattaccatctgtgattnnnnnnnnnnnnnnnnnnnnnnnnnnnnnnnnnnnnnnnttatcctaaaacttttaacnnnnnnnnccaaattcagtaaattttggaaataatacaactatttctcatcaattctctatcatcttgaagtcaaatttggattttnnnnnnnnnnnnnnnnnnnnnnnnnnncttgtnnnnnnnnnnnnnnnnnnnnnctcctctgtcctcattcttctctcacccccacacaagccgtccttttctacagtcagtaaggcagctctgtcgtggtagcagatggtcccattattctagggttttactctttgtatgatgaaaagaatgtgttatgaattggtgctgtcagccctgctgtcagaccttcttccacagcaaatgagatgtatgcccaaagaca

SEQ ID NO: 4975 - DNA, 1730 bp, Macaca Fascicularis
gttgcccggcgacgctccggcgctgggtccccgcggcctggctcctcgccgggagaaggtgggcttcgagtcacgtgacccaggccctacgggagggggcgcggtcgggtacccggcaggaggctgcggagaagagaggactgtgggggcgttcgcgtggctcccaggctggcaccccagccctgctgtacagtgggggaaactgaggtctgagtgggcccacagaggaccatgaaggtgcttctcctcacagggctgggggccctgttcttcgcctattattgggatgacaacttcgacccagcctccagggagcgcgagtactgctgacaggggccagcgctggtgtcggtgaggagctggcctatcactacgcgcgtctgggctcccacctggtgctcactgcccacactgaggccctcctgcagaaggtggtagggaactgccggaagctgggcgcccccaaggtcttctacatcgctgcggacatggcctcccctgaggcgcccgagagtgtggtgcagtttgcgctggacaagctgggagggctggactatctcgtgctgaaccacatcggcggcgtcccggccggcacgcgagcccgcaccccccaggcgacgcgctggctcatgcaggctccgcctctgccggtgactcgcgagtgccacctgcaggtaaactttctgagctacgtgcaactgacgtcgcgggcgctgcccagcctgacggacagcaagggctccctggtggtggtgtcctcgctgctcggccgcgtgcccacgtcgttctccactccctactcagcggccaagttcgcgctggacagcttcttcggctccctgcggcgggaactggacgtgcaggacgtgaacgtggcaatcaccatgtgtgtcctgggcctccgagatcgcgcctccgccgctgaggcagtcaggggagtcacgagggtcaaggcggccccggggcccaaggcagccctggccgtgatccgcggcggcgccacgcgcgcagctggcgtcttctacccgtggcgtttccacctgctgtgcttgctccggcgctggctgccgcgcccgcgggcctggtttatccgccaggatctcaacgtcacggccgctgctgcagcctgagcacctgggggtgccccttaacgtcccagacgggaacgctcctctctccaactgtccctggagccagaacactcacagagacacccctgagagggtggccatagcccaagatgaagtcatcaagacagaaaagcaaaaccgagaaaaacgccgggcacctggaaccagttacagctttggaggtgcaggtgccccttgttaggtgcctttgtccgggacctgcaaagcctcacctgtttggcctttattgatgacatgactgcttccattttgcagatgaggaaactgaggctcagagaggtcacgccacccttgagccacccatggacccctctccatctcctgtctgtgtttctaagtccctgatttattttttccactcattgcatctgggattatctcccccaacccctgccagcttcccccagctggggtctctggtactcttcacacctgcagggacgtctacactgttcgtctagctggtggcagggtctgagggggaggaggagggaaagagtgtgttctgggctggacccagcctcctgtttgtgaataaaaactcttcttctcttgcaaaaaaaaaaaaaaaaaaaaaaa

SEQ ID NO: 4976 - DNA, 672 bp, Macaca Fascicularis
  misc_feature (1)...(672): n = A,T,C or G
annncagggaagnnncctggcccaggaatcctccttggggtggaggacgtgggtcactctgagaattctggacttcagacataggttggcccagccacagggtagctgtgcttggctactgagcctgtggtgggcagacagaagcaaaaacagtggtggtgggtgctgtgccagcctccaaacagtggtctggctgggaggccagatactctccatatcacatgtgcaagtgtacacacgcacacacgcatgcatgcacacacacgtacacacacacacatgcatgcacacacacgtacacacacacacatgcatgcacacacacgtacacaaacacacacgcacacacagaggaaccttgaatccatttgcggagctgcttctgacttggtgccagggcagccgtgggaggctgggcagattgtgcaaagttgggaattaaagaggaaaagtcagaggccggagtggtacatgtgggggaggcaaggatccccaggatcccctcggggagcagaaggcataccctccctctcggcaagacagtgttgctctgcaccctcagccctgtgtcaagaagcaggacattaggggaggaggtggcttcaatgtgacagtcagtggcccccacagcccacatctaggggctcctccctcctcttcagcaaccgaagc

SEQ ID NO: 4977 - DNA, 623 bp, Macaca Fascicularis
  misc_feature (1)...(623): n = A,T,C or G
tcatagacgctgcttcancaaannnnnnntctttaaacacgatgaaagcctgtatggccccatcgtgaaacacatttcattttttgatttcttcaagcataagtatcaaataaatatcgatggcactgtggcagcttaccgcctgccatatttgctagttggtgacagtgttgtcctgaagcaggactccatctactatgaacatttttataatgagctgcagccctggaaacactacattccagttaagagcaacctgagcgatctgctagaaaaacttaaatgggcaaaagatcacgatgaagaggccaaaaagatagcaaaagcaggacaagaatttgcaagaaataatctcatgggcgatgacatattctgttattatttcaaacttttccaggaatatgccaatttacaagtgagtgagccccaaatccgagagggcatgaaaagggtacaaccacagactgaggatgacctcttcccttgtacttgccacaggaaaaagaccaaagatgaactctgatatgcaaaataacttctattaaaataatggtgctctgaagactcttcttaactaaaaagaagaattttttaaagtattaattccatggacaatataatat

SEQ ID NO: 4978 - DNA, 749 bp, Macaca Fascicularis
  misc_feature (1)...(749): n = A,T,C or G
tcnnnnnnnnnnnnnnnnnttatctacatatcaacaggctacagaagaaaattcatatgtaatcacatcgtttgatacagaaaaagcatttgacaaaatgcaacacccattcnnnnnnnnnnnnnnnnctgttccctgcccaataactgcataaatgggaataaatttgtgactattgggaattaagaatgnnnnnnnnnnnnnnnngcaatttggcaagtgtctggaagacaggaaatgatggatgaaccaaggtggaggacacgctccaatcnnnnnnnnnnnnnnncttatggagaggcccatgtgacgtggaattgagggaggcctctgcccaaaagctagtgaggaactgaggttcttagtnnnnnnnnnnnnnnnnnnnnnnnnnnnnnnnnnnnnnnnnnngagcttgnnnnnnnnnnnnnnngtcaaggcagccttggctgaaagnnnnnnnnnnnnnnntgaagcaggggcacctaggtaaaccatgctcaaatccctgaccaacagaaacagaaaaaaaaaatacttcttgttataagctgctaaatcttggcataatttggaaggcagatatgagaagnnnnnnnnnnnnnnnnnnnnnnnnnntgaattggtaatagagcaannnnnnnnnnnnnnnnnnnngacatctattatacatgtttcttctttttttatttctcttgtgcctgtatcaacatttcactcctgatacactaaacttcccttcttttaagctc

SEQ ID NO: 4979 - DNA, 191 bp, Macaca Fascicularis
ttttgagagattgaccaaaactttatttgttgtcactgtcaccattgtagatgtacttatttgctcctgaaacccactgggaaacagtagaacaatgagttttccaaaggtaggaacaaagactgagtagagggtatgtctttctgctggaacattctgtttacaggagaaaaaacctggtctgttgtagg

SEQ ID NO: 4980 - DNA, 3959 bp, Macaca Fascicularis
  misc_feature (1)...(3959): n = A,T,C or G
acttgccccacagataccctcgtgattagaggtcttttgctggaggttgactgtgctgtctgttggaaaaatcttcagtccataagaagcattatcaacaagcttgaagaacacatcttaccctgatcctggatgctgctggagttgagaattacacccacttcaccaggataccacagtgaaggagaaacactgaaagagaagcaggctcctagaaatgcctccaaaccatccagcagcaccaacaggctgagggattttaaagagacagtcagcaatatgatccataacagaccatccctggcttctcagaccaatgtaggctcccactgtgggggcaggggaggagaccagcctgacaaaaaacctcctaagaccctacctttacactctcgtgactgggaaatagagagtaccagcagtgagtcaaaatccagttcttccagcaagtatcgtccaacatggagaccaaaacgagaatctctgaatattgacagtatctttagtaaggacaaaaggaagcactgtggctatacccagcttagccccttttctgaggattcagctaaagaatttataccagatgaaccaagcaagccaccttcttatgacattaaatttggtggaccaagcccccagcacaagcactggggcccagcacggccaggctctcaccttttagagcagcacccccgactaatccagcgaatggaatctggctatgaaagcagtgagaggaacagcagcagccccgtcagcctggatgcagccctgcctgagagctcaaatgtctacagggatccaagtgctaagagatcagctgggttggttccttcctggcgtcatatcccaaagtcgcacagtagtagcatcctggaggtggactccacagcatccatgggtggctggacaaagagtcagcctttctcaggtgaggagatatcttctaaaagtgaactggatgaattgcaggaagaggtggccaggagggcgcaggaacaggaacttcgaagaaaacgggagaaagaattagaggcagcgaaagggtttaaccctcatcctagccgcttcatggatttggatgaactgcagaatcaggggaggagtgacggctttgagaggtccctgcaagaggcagagtcagtatttgaagagtcactgcatctggaacagaaaggagactgtgctgcagctttggctctctgtaatgaagctatcttgaacagcctatcccgctccaagtattgttaagccaagaggcccaactggaacccggcacggatacagagtttggggccagttctttcttccattcacctgcttcctgccatgagtcacactcatcactatctccagtgtcatctgccccacagcacagctcccccagtagatctgccttgaagcttctgacttcggttgaagtagacaacattgaaccctctgcattccacaggcaaggtttacctaaaacaccaggatggactgagaagaattctcctcatagttgggagccattggatgccccagagggtaagctgcaaggctctaggtgtgacaacagcagttgcagcaagctacctccacaagaaggaagaggcattgctcaagaacagctattccaagaaaagagggaccctgctaataacccctccctggtgatgcctggaatagccacctctgagaggggagatgaacatagcctaggctgtagtccttcaaattcatcagctcagcccagccttcccctgtatagaacctgccaccccatactgcctgttgcttcttcatctgtgcttcgctgtcctgatcctgtgcagaaaactaaccaatgcctccaaggccaaagcctcaaaacttcattgactttaaaagtggacagaggcagtgaggagccctacaggccagagtttcccagcacgaaggggcttgtccgttctctggctgagcagttccagaggatgcagggtgtctccatgagagatagtacaggtttcaaggatataagtttgtcaggtagtctaaggaagaactcttccccttctgattctaagcctcctttctcacagagtcaagagaaaggccactggccatgggcaaagcaacaatcctctctggagagtggggacaaaccactttcctgggaagagtccactgaacattcttctcttgccttaaactctgggttgcctaatggtgaaacttctaggggaggacagcccaggttggcagagccagacatataccaagaggagccgttccaagtgagagatgctaggtctaaggatctgggcagcagtgctgacttggggacttccttgcctttggattcctgggtgaatgtcacaaggttctgtgattctcagcctaaacatgcggcctctaggccaggaatgaagtcctcccctcatgattcccatatgtgtgtaacctatccagagagaaatcacatccttttgcatccacattggaaccaaggcacagagcaggagacctcagaattggagtctctgtatcaggccagtcttcacgcttcacaacttggctgttctggatgggggcagcaggatacagcctggcacccacttagccaaacaggctctgcagatggcatggggaggaggttgcactcagcccctgatcctggtctctcaaagactccaacagcagaaatggagcagagtctccatgaagccagaacagtgtgtacttctcaggctacaccttgccgaggcctcagcagggagtgtggggaggatgagcagtacagtgcagagaacttacgtcgcatctcacgcagtctcagtggcaccgttgtctcagagagggaggaagctccagtttcttcccacagttttgattcatcaaacgtgaggaagcctttggaaaccgggcaccgttgttccagctcctcttccctccctgtcatccatgacccttctgtgtttctcctcggtccccaactctaccctccccaaccacagttcctgtccccagatgtcctgatgcccagcgtggcaggggagccccatagactcccaggaacttcgaggagtgtccagcagtttctggctatgtgtgacaggggtgaaacttcccaaggggccaagtacacaggaaggactttgaattaccagagcctcccccatcgttccagaacagacacctcctgggcaccctggtcagagactaaccagcatattgggaccagattcctgactactccagggtgcaatcctcagctaacctacactgccacactaccagaaaaaagcaagggccttcaggttcctcacgctcagtcctggggtgatctttcccattcaccctcccaccctcccattgttcatcctgtgtacccaccatctagcagtcttcatgtaccccggaggtcagattggaattcagatcctgttccagggtcccgaacccctggtcctcgaagagtagatatgcccccagatgacgactggaggcaaagcagttatgcctcccgctctggacacaggaggacagtgggagaagggtttctgtttgttctatcagatgcctccagaagagagcagatcagggctagagtcctgcagcacagtcgatggtaaaggttactcctttcctttcctggagctacacctttctatgtaaaactgtactgtgggccaggcgcgnnnnnnnnnnnnnnnnnnnnnnnnnnnnnnnnnnnnnnnnnnnnnnnnnnnnnnnnnnnnnnnnnnnnnnnnnnnnnnnnnnnnnnnnnnnnnnnnnnnnnnnnnnnnnnnnnnnnnnnnnnnnnnnnnnnnnnnnnnnnnnnnnnnnnnnnnnnnnnnnnnnnnnnnnnnnnnnnnnnnnnnnnnnnnnnnnnnnnnnnnnnnnnnnnnnnnnnnnnnnnnnnnnnnnnnnnnnnnnnnnnnnnnnnnnnnnnnnnnnnnnnnnnnnnnnnnnnnnaaaaaaaaaaaaaaaaa

SEQ ID NO: 4981 - DNA, 825 bp, Macaca Fascicularis
  misc_feature (1)...(825): n = A,T,C or G
acccagtcctannnnnnnnnnnnnnnnnnnnnnnnnnnnnnnngtggggcgaggaagtnnnntcccaacagaggtcccagcctatggccccgggcccaggtgggggtcgcctgcttccttccaggacagggtcctgcagtggccaatggtgccagagggcaggtggcccactttcgccatcagggagggtgactggccccatccctactgccaccccagccccaccnnnnnnnnnnnnnnngaccagctcgtgaggtggtgcccggggtgggcactgctgcttaacgcaagccacacctggggcagnnnnnnnnnnnnnnnnnnnnnnnnnaacagaggccaggcccctggtgaggcccaagaccccagtgccaggatgcaggcagcctctggcgcagctctttccacaacctggttcctggatgtcctgtttgctccacacccatctacagggaggatgtgagggggttctgcctcctggggccgggtcccccctcgggaggggggtgttaggtgggaccatccgagaaagaacagaagaccaagggcaatcggggtctagaagggagggcgctggccctgctgggtgctgcggagcccccactgtttcccactcagccttgcggtcccgaggagtgacgggcttcctcccatcttctgtccttgtccagtcatgtaaataatgtgctttttccgtccctgccccccgtcttttttttaaaaccgaccatggttcctcagctaactgcattccctacctaggcagactgtcctatgcctcgagcttccaaacgagactccgatcacgacacagccaccgtattt

SEQ ID NO: 4982 - DNA, 716 bp, Macaca Fascicularis
  misc_feature (1)...(716): n = A,T,C or G
tcatcagtatgctggtgacatatgatggatgtcaggaatactgttgtaagaaagggattgttcagtctacctagaacgtatgggaaagctgcaagaccatttacatatcagtataaaactcctttattttattaaaatatgagagttaacttcaatttattaagagtatgtattggtcctttaaattattaaaggtttacatttgataggattaatggatttggtagtgaaatatttttatatatataaattttgggttttttattttgagcactattgggaaaaataagcaaaattgaaatgcatggtctttcagtgcaaccatacaatttttattcactttgtaatagaatggacaaaaaaactaaggtttatatgttaaactaataaaatggtacagggtaaattatatacatatatgtatgaatgtatatatacttagattaagaaaaaaaaatgactcacattcctgtaatataaaggtccattgctagttgaaaagtgacctcttttctctgtacatagtgaagcctgtacgtatggagtcttaatctgtacagaaagaaatgtattattgattggtctttctcctgctgggaagataatagaatagcttattcttacaacaattgtatgatcagggatgagttagagtatttctttcgtctttgctcaaagcnnatacatctnnnannnnacnnngcatttcaatttgc

SEQ ID NO: 4983 - DNA, 640 bp, Macaca Fascicularis
  misc_feature (1)...(640): n = A,T,C or G
anctnnnnnnnnnnnnnagggcactgaggagtgaaagcgcctagggctggagaatagcgctgagttgggtttgtgactcttccctctcccnnnnnnnnnnnnnngtgactccccagcccctgccnnnnnnnnnnnnnnnnnnnnnnnnnnnnnnnnnnnnnnntgatcttggccccttnnnnnnnnnnnnnnnnnnnnnnnnnnnnnnnnnnnnnnnnnnnnnnnnnnnnnnnnnnnnnnnnnnnnnnnnnnnnnnnnnnnnnnnnnnnnnnnnnnnnnnnnnnnnnnnnnnnnnnnnnnnnnnnnnnnnnnnnnnnnnnnnnnnnnnnnnnnnnnnnnnccacagaactgannnnnnnnnnnnntccccaccccctcctcaggctcctgcgagcacacccccaccctcnnnnnnnnnnnnnnnnnnnnnnnnnnnnnnnnnnnnnnnnnnnnnnttttccccttcctgccannnnnnnnnnnnnnnnnnnnnnnnnnnnnnnnnnnnnnnnnnnnnnnnnnnnnnnnnnnnnnnnnnnnnnnnnnnnnnnnnnnnnnnnnnnntactnnnnnnnnnnnnnnnnnnnnnnntgtttttattaactgaattatgtttttttcatggacctnaaattttttt

SEQ ID NO: 4984 - DNA, 735 bp, Macaca Fascicularis
  misc_feature (1)...(735): n = A,T,C or G
gatagtgatggtaannnnnnnnnnnncattttgttcnnnnnnncnaaacaagccagcatctgatcaaaagtattacatcaaatcttttcttaaactatcgaaaggtgctttgatgattttctcctttggtnnnnnnnnnnnnnnnnnnnnnnnnnnnnnnnnnnnnnnnnnnnnnnntcacttttctgtggtaatactactgatatttgcttttctatataaagaaatgttgcctaagactgtctggtatttgttttcaaggnnnnnnnnnnntgaatgttaatgttgtcagtgtatgtatgaatatgaaagtgctttgttttgtttgttgctgttttttgcttgtgtgttttttaaattttttgttcttatcagtagtcttgtgttagcactgggtaagcttaaatggtcctttagccaatcaaacattaaggactatggggttcttttttttttatttaacatgtcattgtgcatctattaaatcttgatcagggtttcaagaatgactgcagtgggttttggaaacagacttatcattattgatttgaggtttcccagagatatagttcacagttaagtgttgcgctctaatacaactgaccatttaaaannnnnnnnnnnnnnnnnnttttgtaacaatgtcagttgttaaaccttgacatttcaattaaaacatgaattgtagttataactnnaatgnaaaattnnnacagnntgtatnnngagttaaat

SEQ ID NO: 4985 - DNA, 740 bp, Macaca Fascicularis
  misc_feature (1)...(740): n = A,T,C or G
gctgcaggccccagtnnnnnnnnnctgtgtgctgccagccccannngctgccgccccagctgnngcatctccagctgctgccgcccctcttgctgtgaatccagctgctgccgcccctgctgctgcctgcgtccagtctgtggccgagtctcctgccacaccacttgctatcgcccaacctgtgtcatctccacctgcccccgccccttgtgctgcgcctcctcttgctgctgagccccctgccctggctcacctcccccttcaccgctggcccacagatgtagacccttcttctgtgtggctatgaggacacatggagtggggttgatgtcattcagcagggttgtttccaatgagcccatcaccatcccgctgactctgtgagaacattctggttcattgtaaactccctcccttgctttctttttcttccagtcatggcaccaaatgtgaattaatttgtaaatcactagctaagaaattattccaatcctctaaattcctcattttttaaatcattttgagccgatagagtatccttcccaatgaggtagacattatctccctatcaaacatattatttgtctgtcagccattcagtcattctttcctcttgcaaaggtaggaggctccgcctcccatgctctcctgctttctccctgctctctctttgcctttctgtttgatcacgtttgccagcatttttctattttattagttctttattgtgttcacaaaat

SEQ ID NO: 4986 - DNA, 708 bp, Macaca Fascicularis
  misc_feature (1)...(708): n = A,T,C or G
agctgcgctgggagagggttgggaggcagcagagcatgggtgacagtgggagtacatgacttccttggagcctgggcctttgtgggtcccaggtggtcaggcaactggagtaggagtggaaannnnnnnnnnnnnnnnnnnnnnnnncctggctgtgcctactccaggccaagcctgggctgcagtccttgctgtgttccccccagggtcctgggggagggatcagggtgctgggggtttcctaggacaggggtcttcccccttgagacaccaagctctggctctggaagagctctctcctgaagtggggagtctggagggggctgggtgggtgcaggtaaagccagattctctctggaagggaattttctatgaatggatgatttccaggctcagggtgggctgtgtgttagttctgggcaaatccctcaccaagacccctccctcccaagccctcaaagaaacgaggcaaagcccttccctgcaagaccccttgtggacgtttctgcatctacctgatttttagccccatccggggagactttataccccatgattccatcctgccccaccgttgctgttgtctgccagctgggtctagcatcacagggaaggggggtttatactcacggaaagactactnnnnnnnnnnnnnnnnnnnnnnnnnnctgtactgttgtaaatatcatgccctttatatcctgtata

SEQ ID NO: 4987 - DNA, 448 bp, Macaca Fascicularis
  misc_feature (1)...(448): n = A,T,C or G
gtatattgctaactcttgcacatcaccagaaactctggagtttgaggnnnnnnnnnnnnnnnnnnnnnnnnnnttccaatggaaaaatgtatttcaccatacaggactgtagagtccagggaagtcataataccagaaacagaactccagtttcattctcacccnnnnnnnnnnnnnnnnnnntttgtttttttctcctggggttgccaagagagtgtctataaaatcattaggaacaaacaaacaaaaaaaaaatacacaagattagccctgatattttaatggaaatacggaccaagtttacaacatttnnnnnnnnnnnnnnnnnnnnnnnnnnnnnnnnnnnnnnnnnnnnnnnnnnnnnnnnnnnnnnnnnnnnnnnnnnnncatataatacaggttgggtttagagcttggagctcagatgtcagacagcaggaggaataaa

SEQ ID NO: 4988 - DNA, 746 bp, Macaca Fascicularis
  misc_feature (1)...(746): n = A,T,C or G
tagactgnagagggtgtgtaaacttagttctnnntgatnnnnnttcctgtttccatctgcgtgggatataccagagtttaccacaagtgttttgacctgatacattcctgagctttcactctgctgcttctcccaggcctcttttacaatggcaggagatgtggcatgctcttgccaagttttcacatcatttcctggctagttcatgtcattaagtgggtacatcctaacatatacatttggtcaagtttgcagaaaaggactgaagattgactgccaagctagtttgggtgaagttcactccagcaagtctcaggcaacaatggagtggtttggtttggtttggtttccttttaacttactttttgttattttcttctccacctgtgtggtatattttttaaacagaattttatttttaaaataaaaggttctttacaagatgataccttaattacactcctgcaacacagccattattttattgtctagctccagttatctgtagtttatgtaatgtaattgacaggatggctgctgcagaatgctgggtgacacagggattgttatactgctgtttttccctgaattttttcctttgaattccaactgtggaccttttatatgtgccttcactttagctgtttgccttaatctctacagccttgctctccagggtggttaataaaatgcaacacttggcattttttatgttttaagaaaannnngtattttatttataataa

SEQ ID NO: 4989 - DNA, 731 bp, Macaca Fascicularis
  misc_feature (1)...(731): n = A,T,C or G
aaatgattgagnnnnnnnnnnnnnnnnnnnnnntgatcaaggagggagcaaggcaaaccaatttgttctgtgcaacaaactcaaaatgtggaccagttccctcagccctcattaaactaattannnnnnnnnnnnnnntgcttctactccatggtgaactgaagcagagtcaagttgatgaagttaagcacgaccatgttcttgagcagctgaattggctgccaagagtccaagccatctggcccaacatatgcactgggcattgggtaagggactccagaagcagcagctagaaagagaaaaaggctctcttcagtccccatgatgcttctttcctcttaatgtctcaaaataaaaccagaaagaggaataaaatgattaagtgcttgaggccaaatgagttcccttgattcaaataaccctgattcatagacagagacgtcccgatgtcttggtttcaatcaaagccctctctctctgtctctctctcttttgctctctcattcccaggcactcttttttggtttgtgggtccaggagatgggactggataggagaggaaacaggcttgagtttggataatttgtgtaagatgctgctgaacacatctcgtcatgtgcagtccccaggtatctgatgatgttctgaaatggatagattgtttcagagttattttgtgtgctttaaaaaaatcccatttatgcaatttacttggaatttgcttagtcttt

SEQ ID NO: 4990 - DNA, 742 bp, Macaca Fascicularis
  misc_feature (1)...(742): n = A,T,C or G
cagagcagcagnnnnntcacggcggccatcgtgcccctcatgggggtcggggtgatcagtctggaccgggcgtacccnnncntactgggctccaacatcggcaccaccaccacggccctgctggccgccctggccagccccgcagacaggatgctcagcgccctgcaggtcgccctcatccacttcttcttcaacctggccggcatcctgctgtggtacctggtgcctgcactgcggttgcccatcccgctggccaggcacttcggggcggtgactgcccgttaccgctgggtggccggggtctacctgctgctnnnnnnnnnnnnnnnncccctggcggccttcgggctctccctggcagggggcacggtgctggctgctgtcgggggtcccctggtggggctggtgctcctcgtcatcctggtcactgtgctacagcggcaccggccggcctggttgcctgcccgcctgcgctcttgggcctggctccccctctggcttcactctctggagccctgggaccgcctggtgacccgctgctgcccctgcaatgtctgcagccccccgaaggccaccaccaaagaggcccactgctacgagaaccctgaggtcttggcctcccagcagttgtgaggggcagtcgctgcgcagaccaccccaccctccccggctgggagggctctggagggccttgggggaggggtccccgtggcagctgacctccggtcacctgcttcccctt

SEQ ID NO: 4991 - DNA, 657 bp, Macaca Fascicularis
  misc_feature (1)...(657): n = A,T,C or G
cagcactnnngcagtcatccttgtactttacgtgnttacgcttttatttctgaataacagattattagaatttgtattgtggggtcaaaggacacctatggaaagtgtacccattttactcataaatgttacataagagtatctattgaccgggtgcggtggctcacgcctnnnnnnnnnnnnnnntgggaggctgaggcgggcagatcgcaaggtcatnnnnnnnnnnnnnnnnnnnnnnnnnnnnnnnnnnnnnnnnnnnnnnnnnnnnnnnnnnnnnnnnnnnnnnnnnnnnnnnnnnnnnnnnnnnnnnnnnnnnnnnnnnnnnnnnnnnnnnnnnnnnnnnnnnnnnnnnnnnnnnnnnnnnnnnnnnnnnnnnnnnnnnnnnnnnnnnnnnnnnnnnnnnnnnnnnnnnnnnnnnnnnncaaaaaaaaaaaaaaaagcgtacctatttctgaatagacaaattcatacaaacaaattcaatgattggttctcaggggtggtaaagtgtggagtgactgtcattgtacacatggtttcttttggggatgatgacaacgttctcaagtnnnnnnnnnnnnnnnnnnnnnnnnnnnnnnnnnnnnnnnnnnnnnnnnnnnnnnnnnctgaaagggcgaattcattactggtatg

SEQ ID NO: 4992 - DNA, 1429 bp, Macaca Fascicularis
  misc_feature (1)...(1429): n = A,T,C or G
agcagagatacacgtgccatgtgcagcacaannnatnnnnagagcccctcacnnncagatgggagccatcttcccagtccaccatccccattgtgggcattgttgctggcctggctgtcctagcagttgtggtcaccggagctgtggtcgctgctgtgatgtggaggaggaagagctcaggtggaaaaggaggtagctactctcaggctgcgtgtaagtggtgggggtgggagtgtggaggagctcacccatcccgtaattcctcctgtcccatgtctcctgcgggctctgaccagctcctgtttttgttctactccagccagcgacagtgctcagggctctgatgtgtctctcagggcttgaaaagcctgagacaactgtcttgtgtggggctgnnnnnnnnnnnnnnnnnnnnnnnnctccttttgtgacttcaggatactctggcatctctttctgcaaaggcatctgaatgtgtctgtgtccctgtcagcataatgtgaggaggtggagagacagcccacccccgtgtccaccgtgacccctgttcccatgctgaccagtgtttcatccccagtcatctttcctgttccagagaggtagggctggatgtctccatctcagtctcaactttatgtgcactgagctgcaacttcttacttccctactgaaaataagaatctaaatataaatttgttttctcaaatatttgctatgagaggttgatggattaattaaataagtcaattcctagaatctgagagaacaaataaagacctgagaaccttccagaatccacatgttccctgtgttgagtctgttgcaggtgggggtggagaaggctgtgaggagcccagtgtggactgggcctgtacctaattgctgttcagttcttcgtgggctttatgtggtcagtcctcagctgggtcaccttcactgctccgtcgtccttgtcccttcagtggaaacttgtcccgcgggagctgtgaccacagaggctcagacatagcccagggcggcccctgcacacggggtctctgtgcattctgagacaaattttcagagccattcacctcctcccctgcttctagagcttctgttctgctctgctctcctgccctctctccctgccctggttctagnnnnnnnnnnnnnnnnnnnaatcccaactcatgaatctataaagcagagtctaatttagacttacatttgtctctggaattggacccatcatcaaggactgctctttcctgaagagagaacctgnnnnnnnnnnnnnnnntgctggggtggggggcacggggggcgttgctgtaaaaagagggatgggggagggaggacacacaagcagcactgctgagaaaaacataggcggcctctatctcagtgtgaggggaccttgtgctgtagctgccacaaaacagcattt

SEQ ID NO: 4993 - DNA, 2085 bp, Macaca Fascicularis
gtgcaagacgcctggggctaacaggagcaggggggcctcctgcccctgccccacacctctaccacctctgttccagcggaatcagatgcaagaatcagagggcctggactgttgactctgggagcaattatcaccagggccatgaggttcaaaagattcctcaccttggagaaataaagggtaatcactccttagagaggatgtcgaaattggaaagcagagcaggagagcatgggattggtctctgcccaggagttgccctgcaggatttccaggccctggcaaaccaggtgggatcagaaagacctgtgcacactccaggagtccccagtactctactgatcactccctctgccaggtaccgcaggctctgcaagcgtgatttcctgtcctgctcatggcaactctaagagggagagaccactgcagatgaggagggggcatcttatcaagactcagccaccaaagatgccccatctggcatcaggttcacaaggtctgggttcctggggaagctgggtttgcttgctctgaggctgtggttctcaaaccatggttccggcacactgacatcactttttcaaaatgcagattctcggactcccttcagacctactggattagaatgtctgggggtggagctcaaccgtctgtgcttcaaggagcactccagatgatgtggatgcacccccaagtttgggaactgctacccaaaggacacctttgtgtcggcccataaaagaaatctctaggaaaagtccaaatgcccccactgcacaccttcctgtagatgcaatctgtctcttgattccagctccagccttacccttctagcactcaccccaggctgctctgaggtctccgcgtcatctttgggaatgctcgccctctccctgtatctggcttttggaaggaatttttatatctttatatgtgtgtttccccctttttacaggaagagagtgggtacctcctgtttgtaccccccaggactctgcccaagggtgctcagccctgtgcctgccagggccccaggggtccagcggttgtcacacactgcctgtgcagaaaccagggataattgattaagcactagccttaattgtggctgcactgcctgaaagccagcagccaattccagctgcttttcctcgtctgcatcatgggcctccagctcctttgaatttctttaaattatcaaaataataactcacaagtcctttgcaccagtcattctgaagggatataagaacaaagaggaaacaaacaggttgactcctagtctctggaggccgtcgggaaatctggtgatactgactattcgtggggccccacaaagaaatgaaggctcctgagttctagtcctgctgccactgaatctttatctgctgacctaggcctggtcattctgagccccgtgattaagattttctggttacaaaatagggaggattccatcatttagtaacaggtattttttgagcttagaggaagccaggtgctgtcctgggtaccacatgtcacatctgagagaccttaactctttagaagcgtgctctccattgtgtgttgagagctggctgaaaccagaaggtgccatggacatgcaggaggcaaagggaggagcacagggcagatttccctgggctggtttttagggaatgagtgggcattctgaagatggaacagagagggaacagactagtttaaggcatagcctgtgcagagccagaggtgggaaggacctggattgtgtggaggcagtgaggtgctcagtttggctgaagctgagtagggacatggtgggaagaaggtggagctggagggacagtccctcgcagtgctggccaccttacatcaagagacctccgcgacaccagcagtgacttaatcgattgctcacagtggcagagtaaccatcagaatcaggatttcaagcctttccagtaatcggtcagggtgaaatataacctgctcaccagtgagtgatccagaagggacagaaacagagatagggtggaaaaggtcctcaagcattaaaaataaaactcgtcttctgtcctgtaggaaaaaaaaaaaaaaaaa

SEQ ID NO: 4994 - DNA, 734 bp, Macaca Fascicularis
  misc_feature (1)...(734): n = A,T,C or G
gctgaggctgagaagggtggagcttggccctnnnnnnnnnnnnnnnnnnnnnnnnngcttctagggatgctctgnnnnnnnnnnnnnnnnnnnnnnnnnnnnnnnnnnnnnnnnntgnnnnnnnnnngaccacagccactcgcatccgtatagcactttaaagtttctgcagtcctttgacacataggatctcattgagcctcacatnnnnnnnnnnnnnnnnnnnaggaaaccgagagaagtggcccaaggtcacgcagctnnnnnnnnnnnnnnnnnnnttgatcttgtacacatgttcttttattccttcttttttcatcctttcatttcccactacccacaaagagtttataaacactgttctcagaagagtcacagtttggggtgagatctggaaatcgagaaatgggtgtccactcttttctttcattagctaggatctactagatgcattatactccatacctgcttttcccgtggccgccctacggaaaatcccatccacagaggccggggctacccaagcccctccaggtgagctgggnnnnnnnnnnnnnnnnnnnnnnnnnnnnagccagctatggtagggcctcctcaccccgtaccccacagctagacagtgtcagcactcatctcctcctccctacatttctggagctttttttttcttccnnnngtgacctttgtggtcttctgtgattatttatgctgcctcnnnnaggatagaatga

SEQ ID NO: 4995 - DNA, 764 bp, Macaca Fascicularis
  misc_feature (1)...(764): n = A,T,C or G
ctggagtgcactagnnnnnnnnnnnnnnnnnnnnnnnnnnnnnnnnnnnnnnnnnnnnnnnnnnnnnnagcctcccaagtagctcagactacaggggcatgccatcacacctggccaatttttacgtatgttgtagagatgggttttccctgtattcccgaggctggccttgaactcctgtcctcaagtcctcctgcctcggcctcccgaagtgttcagattacaggcgtgaggcgccatgcccaacctgcttttgcattttagtaacacgaattgtaatgttaactttttaaattatgaaaccctctaaaatataaaattatttgtaaccccactgtcctttcaggcttctataaatgaatatacatttaaaatgtgggagtttagcttaattgatttgttttccatagaaactaggttctatggttagatagacttgtttcacttaaagatctgatttgtgtaggacaaatccacatacataatcatgccagtctgttctctgcatgacataattttccagcaatagctgtgtgggttttgtaatcgtatcctctagccagttcaagattttgcaacactatgtgattctttgccccgtagttcagtcttgttgaatatgacacaggtgtttaccttcctgttcttgcatctagtttcattctaataatattctctgttgaannnnnnnnnnnnnnntnnnnnnnnnnnnnnntggtattatcatctaacataaagcttatcttataataaagtgtgacaaa

SEQ ID NO: 4996 - DNA, 734 bp, Macaca Fascicularis
tgaaatgctacaccaatgcttgttggattcatgaggtagccagaccaatgtgttgtttttctttattttttttttttaaagcttcccttgagagaataaatggtaatggagagaactatttaacaaggtcctggtttctcttgcaacacagtagctaaacttgcctgcttgtatgtgcatttttgtagggatcggcttggtagacagtattagcagagaaacgacaccttgatcttggtttgcaagcccgtctcccatcagtcctagattaggccctgttcagccatgcaggggtgttggtttatgcgtgctgcagcagtgggcataatataatttacccagttgacaaaggtgtgtaccaagtgaatttaaataattggtgtggattggccagtagctaagaagtgggcttttaaagagtgttgaagattgaaaggttttttgtttttttttttttttaaaaaggaaaaaccattgattgtagataatgaaaagatagggtttgccctcttcatgtctactctccttccaaatagttatatccaaaactgtttttccctctcccctgccttgtcccccctattaaaatagaaatggggattaatgtcccactcctgaatacatgtaaaatttgtacaaaaatatcttctatgaaaatgatttgtaatctgtagacttattacctgggagatgtcttgatgtaaaatcccatcctttgggttgtgggttttttg

SEQ ID NO: 4997 - DNA, 704 bp, Macaca Fascicularis
  misc_feature (1)...(704): n = A,T,C or G
gcagatagagnnnnngaggaaggactgcaccgatgcagccacgatggtgagcaccagngtnnngtcttcatgtnnnngcccctcannngagcctgggaacagtgtgctgtcgctcagggtggcagagagacggtgatgagagcgtggatgcagaggtattttgcgcgctcagaagctgggctcgaatcaggcagtgttgtcatttatataaatgcatcacatgagcagtaacgtccaaccgaaggggtggctgagggcccctgcgcacatccagcgtcttgttgccccagcccctgttagtgtgctgaagccccgttttctcttctgtctttatagtttgcannnnnnnnccccactacggctcgcgcgctggccgcccagggnnnnnnnnnnnnnnnnnnnnnngagagccccacgccacaagccctggccactggcatcaggaaggcactccagccccatggctgctgctgagtcagccacccgtcgcttgccccatgctgcctccctgggctgggctggctctggatggagctgggcattggcaagggctctcaggagatgctgccatcagactcttgcttcaagcgcgnnnnnnnnnnnnnnnnnnnnnnggatcaggagatgacctggggctggcctcaggcccacgtgcacgtgaccaccctctgtggaagccagcttgaactctagccctgtgagag

SEQ ID NO: 4998 - DNA, 740 bp, Macaca Fascicularis
  misc_feature (1)...(740): n = A,T,C or G
gctgagagannnnnnnnnnnnnnnnnnatgcatccactctagacttncnnncagccacagggaactgcacacacnnnnnnnnnnnnnnnnnnnnnnnnnnnnnnnttctggccccaacccttgactcaacggggacaactccagaaggtcattccagatccagagatccccatcgaactgaaggatcactgggnnnnnnnnnnnttnnnnnnnnnnntcttcctctgcccagccctgccctcactccccagtgaatcctcaatcttccatctgtctctccagagaattgattctaagacatgttaggtatataaggggtnnnnnnnnnnnttcagccacaagtcacccctcaatagccccagagtatatagaatagaaattctgcacatgtcgggggaatggacaaggacttagtaaaaaggcacacctcagcaaagaacagctcttttgnnnnnnnnnnnnnnngggtggggagggaaaatgtgaaacacattagcaataagttcaacctcatcttgtactaaacgaggacacactcagggagaagacctgtgtgtgcagagcttgtgggtggagcttcatcccgatgtccctcctcaactgacttaggaagacagagtctttaccccaagtcactacctcagttacctctgaggggnnttcaggagatgtcttgattccccnntgtactctgaatnnnnnnnnnnnnnnnnnnnnnnnnnnnntaagcattcttttct

SEQ ID NO: 4999 - DNA, 2173 bp, Macaca Fascicularis
  misc_feature (1)...(2173): n = A,T,C or G
tagttaaaaatatccacagggattttttttttcccctacagatttaggagataagatctggtctttgatcttgagaatctgaggggtgaaatgtacagatgctgcctcctcagatctgctaccttagattggatttagaatagactaagcatccatccagagagacacacacacacacacacacacacacacacacacacacacacttcccttaggagagcccttaacccttaaaattcttggttaacaccccagggctgctgggcataggaatggcctgagacttgtttgcttcagccatgacttttgtttcccatgttgaacaccatctccaggtgcccaggatggtggctttgcctgcagggtattcccacaacatcccctcacagcctcctctggcaccgatctggctgaactctacagagcagccgtggggataaactggtgtggcactgccacctagtgactgcccgccatgctgttctttgactctgaggtgctgtgcatcaactggctgctacccatcatggaaaatcatggtgggggcttctaaaaatagaatccgccaggccaatgtcgacatgctttctctgctatcagcagagcctggcacgcatcagacatggattagattaagtgtttttgaaaaagtggttttttgggtaagggaatctttgggcctggtcgagcgtggctccatctgtctgctggggttccagtttcctcttggaggagctcacagtgtgcacaggatgcctggcatgcagcaggaactgagtgaatagaggttgccccgcaagatttaaatacccactggtctggaagttagaaaaggaacaggaggaaagagaaacttggtcagaaatgctagtcctggttaaaacattgttctggattttgatattttttgatttcccggaaagtatcaggggcttgagaatataattctcttcagacttttttgccaaattccaagattttctagaagtgaatactttccagatgtgttgatatgaagccagctctagattttctgatggccgttactagagtcccagctgcaccgaagctctaggccagtggttcagaacaggagtaattagcacccccaggggagttatggaaattagtggagaattttttttcttgttgctgccttggggttagggacgctgtgtatgtgttacgcatttaacaaaacactgttctgtatcgcacttgacttcagattgacctactggatattatatgtatcaaagaactgtttataattttcttagcttagacctaaattcattttaaataaggacatatttttgctcagtagtaatcaacatttaattttcaaatgtaattttctaataatatataaattggaggaaattattgataccatctgtgttcttataggtttttaacatagtagagaaagttagataggtatgagatttgagacttttattgacagatgagtcattgctgaagtcatttcttccaatatgaaatgtaaatgtatagtgaataatagagttagaaaacaaaacctctttgtcatcttagggaacatatcagggaaacatgataaatgtaattcttcaagtttgaaaatttgtgtatgttctattattcccttctttttcattgggactttgaactttattttaaagtaagcttatgctcttagaacatagccactgatggtctggagacaaaaaagtaagttgtctatatcccaagtgtgaatgaagcgctcattagccaaggttaatgcatgaaaagaaaccagaccttttacagaaccatgcccctccaaacatacgcgcgcgcgcgcgcgnnnnnnnnnnnnnnnnnnnnnnnnnnnnnnnnnnnnnnnnnnnnnnnnnnnnaaagtggttagtttttacatttttctcaatgaaaagaagagaggaaaacattccaaaagtgtaaagttaaaggagcaaaataaaatcaagtaaaaatactcactttggcattttagagtcaataaagaattacataatttataaaaattcaaggccaggcgcgnnnnnnnnnnnnnnnnnnnnnnnnnnnnnnnnnnnnnnnnnnnnnnnnnnnnnnnnnnnnnnnnnnnnnnnnnnnnnnnnnnnnnnnnnnnnnnnnnnnnnnnnnnnnnnnnnnnnnnnnaaaa

SEQ ID NO: 5000 - DNA, 1575 bp, Macaca Fascicularis
gatttgcttcctcctgtgagtggctgcgggattgcacctgtgaagcggagacaacctgctaggatcttggtaggcgtacaccgctcactcccactcaggcgccgacgactcgggcttgtctccgttgctcatccaagtttgtcttgagactgggctttgagctggcactgcagtgaaacgccgcagatgaggaagtgcccaagttttccttcgggaactgctcgtttagaggagtcaggagtagaagtcatcgttatatcccaaatttagaagccacttatcttgggagcgttccgagtctaaaaagcaagtaacttatgtcaatttactaagtgtgggaaagtgacccacaacttcaaatatccgcctcagagtaaacctgaggcatttggggacaagtgccagacactccgctgcctgtcatgcacggcagagcttacctcttgctgcaaagagacttctatgatctcaaggagaacaattataagggcatcactgctaggcctgtaagtgaagacatgatggaatgggaagtcgaaattgaaggtctacagaattcagtctggcagggtttagtcttccaactgacaatacattttacatcggagtacaactatgctcctccagttgtgaaatttgtaacaattccttttcacccaaatgtagacccacacactggtcagccctgtatagactttttggacaaccctaagaagtggaatacaaactatacattgagcagcatcttacttgccctacaggttatgctttccaatccggtgctagagaatccagtgaatttggaagcagccagaatactgactaaagatgaatctctgtacagaacaattctaaaacttttcaaccggccattacaaatgaaagatgacagccaggagttacctaaagacccacataaatgtatcggaccaactaaaacaacctcatttagtgattactaccaggcatggtccagaatagctacatcaaaagccacagaatactacagaactgcattgctcaaagatccaaatttcattggacagtattacaaatggaagaaaatggatctacagcatcataaagaatggaatttaaagtattctgttatcaagtgttggcttgctagaaaaaatagaatgcctgatgaagtcagacactcaatggaaggaattaagctctgcccaactcaaattcccaccacagatgaaatttttcttgagtcaccaactgcaataaatagcgtcacaaacatttacgaaacagaagaggaggggtggaagagtgacacttcattatatgaaaataacacagatgagccctgggaagaggaagtggaagatctaatctcctggatcaacactctcaatacaaatactttagaagattaagcagaacattatcaggttaaaaaactgaacagcctccaccatagcccagtgttgtggagcaattttggaagactctcagaacttggatttcatttttttcaggctgttctcacccgctcactgcaagtacaagcaagtacaaattagaaatataagtacaaatcagtaaaaaaaaaaaaaaaaa

SEQ ID NO: 5001 - DNA, 411 bp, Macaca Fascicularis
gcctcctccccaccccacctccctcacttcactgcattccagatgggacgtgttccatagccttgctggggaagggcccactgccaactccctctgccccagccccaccattggccacctccctttgggaactagggggctgctggtgggaaatgggagccaggggagatgtgtgcattcctttgtctccctgtaaatgtgggactacaagaagaggaggagctgcctgagtggtacttcctcttcctggtaatcccctggcccagcctcatggcagaatataagtatttttaggctatttctgtaatatggcttctggtcacgatccctggtagctgaattcccaaaccctgcattgtacagcccccactcccctcaccacctaataaaggaatagttaacactcaaaaa

SEQ ID NO: 5002 - DNA, 681 bp, Macaca Fascicularis
  misc_feature (1)...(681): n = A,T,C or G
taccacnnnnccaaatctctggaagtnntgccagggaaagcctccnnnnnnnnnnnnnnnnntccaagcaaactggctttgccctctctctgccatccttgtcctccagagacggtaccacctgtagcatagaaaaacaccaccacnnnnnnnnnnnnnnncgacgcagcaaaccaggccggctgtttgctgccaaattccttcctctnnnnnnnnnnnnnnnnnnnnnnnnnnnnnnnnnnnntgtggtgttgtcaggagccaaagcaaaaggaaacaattcaatgctgttgggttcgattctgagagtagatttttccagacatgtctttcaggtgaccctcaactacctcaggtttgaaggccctaaatgaaactgattaccactcacaggggcaaaccgaggggggttcggttacatcttggtgataatgcaattgtctcaaactgataacaaactctttcacatttcggtttgcaggggtagggtcgggtttgtttttcttctcttctgtgtttaccctttcccccgggtttccagtagggtagttccttgaaatgaatttcatttttcactgagtgcctaccttcccagggcaggtggccactggcttctgtttccctccaacaatacttttattatggtattaagacctttctttgtataatacattgcatctg

SEQ ID NO: 5003 - DNA, 1851 bp, Macaca Fascicularis
aagacacataggtagagatctaagaatgaattggagttctctagataaaggggatgtaaggggcaaaggggagcagactggctgaagaacatttttgttaaaatccttttttttgttttgaagaaataagacttttgtcctaaaattccacggcagagcttccagggctataatagggattaaggtattctacaacagatgaacaaatcttttagggacagactgaattgaaggaggccaggagtcggaaatgcccctcattgttctttttggtgactaggatacaaagttgtgttcggcacaaagtactctcctctgcttctacctccgggaaccccgttacctcccagcccacacaccaccgccccaaatttgggtggggagaaggcaaagttttgagtatccgaggagcccaggaggaggagcccacagacccccagctgatgcggctggacaacatgctgttagcggaaggcgtggcggggcctgagaagggcggagggtcggcggcagcagcggcagctgcggcggcttctggaggggcaggttcagacaactcagtggaacattcagattacagagccaaactctcacagatcagacaaatctaccatacggagctggagaaatacgagcaggcctgcaacgagttcaccacccacgtgatgaatctcctgcgagagcaaagccggaccaggcctatctccccaaaggagattgagcggatggtcagcatcatccaccgcaagttcagctccatccagatgcagctcaagcagagcacgtgcgaggccgtgatgatcctgcgttcccgatttctggatgcgcggcggaagagacggaatttcaacaagcaagcgacagaaatcctgaatgaatatttctattcccatctcagcaacccttaccccagtgaggaagccaaagaggagttagccaagaagtgtggcatcacagtctcccaggtatcaaactggtttggaaataagcgaatccggtacaagaagaacataggtaaatttcaagagggagccaatatttatgctgccaaaacagctgtcactgctaccaatgtgtcagcccatggaagccaagctaactcaccctcaactcccaactcagctggttcttccagttcttttaacatgtcaaactctggagatttgttcatgagcgtgcagtcactcaatggggattcttaccaaggggcccaggttggagccaacgtgcaatcacaggtggatacccttcgccatgttatcagccagacaggaggatacagtgatggactcgcagccagtcagatgtacagtccgcagggcatcagtgctaatggaggttggcaggatgctactaccccttcatcagtgacctcccctacagaaggccctggcagtgttcactctgatacctccaactgatctcccagcaatcgcatcccggctgaccctgtgccccagttggggcaggggcaggagggagggtttctctcccaacgctgaagcggtcagactggaggtcgaagcaatcagcaaacacaataagagtctccttctcttctcttctttgggatgctatttcagccaatctggacacttctttaaactctcttcccttttttttttttttctgggtagaagccacccttccctgcctccagctgtcagcctggttttcgtcatcttccctgcccctgtgcctctgtcctagactcccggggtccccgtcctctctcatatcactgaaggatattttcaacaattagatgaatttaaagaggaaaaaaattacaaagaaaataataaaagtgtttgtacgttttaaaaaaaaaaaaaaaaaaaaaaaaaaaaa

SEQ ID NO: 5004 - DNA, 198 bp, Macaca Fascicularis
gaatctcaaggtacaaaatgtcacttgctgtgatctgtgatgttttttttttggcctcctgtgcgcccctgggtagtcctgttctgtctgcccaggagcctttggatgtcactgctagctgagcatgacaatgacatgacccaatcacacaattctgtgtctctgctcctctacggggtcctggtgtatcctgaaaca

SEQ ID NO: 5005 - DNA, 666 bp, Macaca Fascicularis
  misc_feature (1)...(666): n = A,T,C or G
agtatgtgtatctttcctagggtattcataaagccctgggcttcccnnnnnnnnnnnnnnnnnnnnnnnnnnnnnnnnnnnnnnnnnnnnnnnnnnnnnnnnnnnnnnnnnnnnnntctccaaggatgagggctcccatttcccctgcactgagcacagtgcctggcccatgcccaatagggggttgttgnnnnnnnnnnnnnnnnnnnnnnnnnnnnnnnnnnnnnnnnnnnnnnnnnnnnnnnnnnnnnnnnnnnnnnnnnnnnnnnnnnnnnnnnnnnnnnnnnnnnnnnnatggataggtagatggatggacagatgatcaatagaccctggatggctggatgatgggtggatgggtggacagatggatagatgggtggtgggtggacagatgaacagacagtagatgccaaggggggaggggcannnnnnnnnnnnnnnncctgccccgcgccccggtcctcacctccctgctgaagttcacttggtacagcagctcgatccccagcaggatgctgnnnnnnnnnnnnnnnttggacacgttcaggtgcttctccagnnnnnnnnnnnnnnnggaattcagcatccgcccatcaaccaggtggttctggaaggcctgggagtactgggacaggccgatgtcattcagccaggccttggcca

SEQ ID NO: 5006 - DNA, 732 bp, Macaca Fascicularis
  misc_feature (1)...(732): n = A,T,C or G
tccacgcttgatccagagatnttcagggcaagggagaactgggaactttcatcttaaaacgactagacaacacacacacacacataaccttaaaaaagagagagaaaaataaacaatctttgaagaatttctgaaactgtttacaaggaattttgaaaaacagggatgtttaaatgatgccggctctgtttttctgtaaataaatttgcatattttgtaggacttttaattgtaatgatagagaaaaaaacaaggaaaactatttaatgaaagcacgatatttatctttggtaaatgactttagagcagttaaagacattgcttaaaaaactcagaatcagaaaaacactgaattatttaagaacacatatattttaaagtataacatatttattataatttatttgcacccttgggaagattgctttggcattctgcctcgattccttcacannnnnnnnnnnnnnnnctggaggccgggggttctcagacctaccattgtttccctttagaagaacaaatttccagttcctctagggcctcctgcctttcctttctttctgtcaattttgttgttgttgttgtttttcattttctttttttctcttnactnctcccttctaggatgtccagatgtcaaaaaaaaaccaaaaaccaaaaaancaaaaaaaaagaaaaaaaaagaaaacagctgcagttcagtacnnntgctcttcttcacactcaactccc

SEQ ID NO: 5007 - DNA, 763 bp, Macaca Fascicularis
  misc_feature (1)...(763): n = A,T,C or G
acacgcagccgagcnnnnnnnnnnnnnactagttcctggactatgggaacnnntgactcgcccaatgccacagacgatgcagctgatgagnnnnnnnnnnnnnnnnnnnnnnnnnnnncccaagtgcccagtcagcgagtggtgccgagggagaggaaacgatcccgggccaaccggaaatctttgcgaagaacgttgnnnnnnnnnnnnnnnncggaagaagccagagccctgggcttggttggcacctcagagttgcagctgtgacactcatggggtactcccaggagtgtgctgagcagaaggcaagctcttgctggatgaaacctctccaggtggggttggggagacttgacattaacatccaacagtttgaaaagggagagctcaattcccagtgtcaccccatggcttgtgttgcctgctacgcattgacttggatctccaggagtcccctgcacatactttctccatcgtgtcagctgtgtttttcttgattccatgacacccggttttattagttccaaagtgtgacaccttttctgggcaaggaacagcccctttaaggagcaaatcacttctgtcacagttattacgataatatgaggcaatctgattagcttcacagactgagtctccacaacaccaaaatatcgagatgtaaaccccaaacttgtacacaaaagaaagcacagattgtttaccagttgtggattttagatgtaccaaatgtttatacaaatacataaatgtacaccatgtt

SEQ ID NO: 5008 - DNA, 712 bp, Macaca Fascicularis
  misc_feature (1)...(712): n = A,T,C or G
atatgaaatcatnnnnnnnnnnnnnnngctnnnctgagttacttttaattttgccttctggttacggtttgggatttccttctgtttggttttcagatccnnnnnnnnnnnnnnnnnngagtgcaagtaattactatannnnnnnnnnnnnnnnnntatttctgcctagatctgataaaacattttcttgttttagttataaaaattcaaacaaaagtgttacaaagatacttagtatagctccttaatcataacctgagacttgggatgaaatttaaaccacagagatggtttactttgcggatcataaggctttttatactcttgttatcaaaatggcttatttttnnnnnnnnnnnnnnnnnnnagtcaagagaaaagctttnnnnnnnnnnnnnnnntttcttctcccacacagttcttgatttnnnnnnnnnnnnnnnnnnnnnnnnnnnnnnnattcattgccaaggttccaaattatcaaattcaagtgaatttatttgtgtgttgtttacttattaaaaaaagataacnnnnnnnnnnnnnnnnnnnnnnnnnnnnnnnnnnnnnnnnnnnnnnntggtcttctacacatttatatctatagatatctatcgatcgtctttctattctgtctgtttcatgactgaataatgnnaaaccnnnnnnngcaactggtatcatcaaagatactcattttttaataacc

SEQ ID NO: 5009 - DNA, 710 bp, Macaca Fascicularis
  misc_feature (1)...(710): n = A,T,C or G
acagtataataaaaacattgcatctccccacnnnnnnnntgcatatgtatttttcctgctaaaattggtttctataattgagtaaatagcaaatatatgaagcaatgtccctaaattttataaagaaattatatttaatgcacatctcaattttcatttttatttttgaccttttataaaatattttcatgttgctataagtaaatgatgatgccaccccatgttgactatggtttttctagaaagcaactatgctgctaatcatagaggaacatagaagggtcccagaatctttagtgctgattttaacaactgatgcaacattaaaaatgtgttagtgtgctgtgcaattggttttcaattcatattaatcttaatgatagaaaacaatgtgttagtaattattttggttgtttgccattagtaaattgatagaaaaattannnnnnnnnnnnnnnnnnnnnnnnnnngccttatattaacatcttataatacaatagtttaagactaagggaaacagatggagctgtttattgagacaaatggtgaggaattatcatgtgttcattcccattttagagcgtgaaagtcnnnnnnnnnnntatataaagtcactttaaatattatctatatttgtaacagaagtagtgtacagatattttattacagcatttttgtgtaaatgcagaattaaagtgaataaataagaa

SEQ ID NO: 5010 - DNA, 689 bp, Macaca Fascicularis
  misc_feature (1)...(689): n = A,T,C or G
agtgagtgtgtgtgattactagcttcgtgaatacctgacctctccactctgaagtaggaggaacaggcctgtctggatcacttctctgtccctaaccaagcctgtgtcatttagggaaactgtacagagcagtgttgccttttttttttttttttctgnnnnnnnnnnnnnnnnnnnnnnnnnnnnnnnnnnnnnnnnnnnnnnnnnnnnnnnnnnnnnnnnnnnnnnnnnnnnnnnnnnnnnnnnnnnnnnnnnnnnnnnnnnnnnnnnnnnnnnnnnnnnnnnnnnnnnnnnnnnnnnnnnnnnnnnnnnnnnnnnnnnnnnnnnnnnnnnnnnnnnnnnnnnnnnnnnnnnnnnnnnnnnnnnnnnnnnnnnnnnnnnnnnnnnnnnnnnnnnnnnnnnnnnnnnnnnnnnnnnnnnnnnnnnnntgcgccaagccacagtgcaatatttctaaccagtgatcagggtaaagaggatgcgtgtccaccatcccagccctgagcagcctgcctgtgcatcccccatcccagccagggcttggagcagccttggtcactactgtgtcccctgcattgtaacacatccaggcacaagaatagccgcccagtgagtgccaagtgagtgaaacagcctgcttggagcctgcctctttcccaaactgctcattatcctgttaccccacccag

SEQ ID NO: 5011 - DNA, 726 bp, Macaca Fascicularis
  misc_feature (1)...(726): n = A,T,C or G
gatttttttttnnagggctactatggttgatcttgcaactctgtaaatatgtatgtagacacttttaaaagcacgtatttatgtccctgactgtaaatgccccatttttaaagttttataacttgtgttatttaatgagtcagtcaatcggctgcagtatggggtctgataaggatctagaaaaagggtctcatgtggaccctcacatgggcagaaaaatggtgatcannnnnnnnnnnnnnngttttcctgtttcccacccagctnnnnnnnnnnnnncgctttaaattttcataaactgtaatcctttcactggctcnnnnnnntaaccctcannnnnnnnnnnnnnnnnnnnngttccttatcctaatgatacgcttttgtcccgtnnnnnnnnnnnnnnnnnnnnnnnnnnnnnnnctctcagttcttgaggggctcccccttcagcagtgaggaaagctcacaaaccccaaacctggcaagtcacctgcagcccatggtgagcgctggccatccagcactcactggccatccaggctgaggccttggggtcactccttttttgcatgtgcaaatgtgctggtcacccttcnnnnnnnnnnnnnnnnnnnnnnnnnnnnnnnnnnnnnnaaaagtggggatggctttgtaaaagtggcgtttcctggtnnnnnnnnnnnnnnnnnnnnncagctctgtatctgccatgtgaagagaaataac

SEQ ID NO: 5012 - DNA, 650 bp, Macaca Fascicularis
  misc_feature (1)...(650): n = A,T,C or G
cagctcagtgcaaacctactgcatgcaccacatctatccaggcctgtgggactcgggggctcatgctgcctgctgcaccgtgaggaataaagtcctntgcctctcgccgagtcttgtgtcttccaccaatatccatgaaactgtaacaggcgaatgcatcagcttctaaggcgggagaaatcaaagcccatacctgacagtattgttattcctctgttaaaagatgaagctggaagcatagagagattaaataactttgccaaagtcacataaagtaggaagtggcagaaccaggatgcaaacccaggcagttgctcccaagtctgtgcctttaacctctgactgctagtgtttctaagtgctgctcttgtagaaaccccacagaaatcagagccagcactgcactcctatctctggctgcctctctgcctcttgtaggctcctcttcctccagctctcttttaaaccttgttattcctctagggctcagctgtaggccaccttcttcccatactccactgaaaagatcactgttgagaccaatgtctgcctgtaagctaatgactcttaaatccaaactggagttcatagagctttcctagagtctagactaacatccagctgcagacccataggctcctaaaattcaa

SEQ ID NO: 5013 - DNA, 764 bp, Macaca Fascicularis
ttattgacatttactatgtgccaggcactgctctacacatttaatctcatttaatcctcatttttacagttgaggaacctgaggactttttgtctacctgcaaagtgctacttacgcaaattccctgactccaggagctgggcaacattagacaaaacaggagaatgaaaaaagcatgacaggtctttctcctgtcaacactgctaaatgttgtgtgcagccgtatcattcacacaaaacttaagccatctcttctcctttaaattacagacccagctatataaagaaatggatgggaatgattttaagattgtagtccaacatgttctacctcactcaaagacccctactcccaacctgtctgctctcctgaatgggtagcactgaacccaccagtcctgggtagagctgacttgatcctcaaatgctaaacatatgattggggtaggccctgcggcctataaattgacacaggatttaagcttgggtacattccgattctagcctggagttgctgctccaccccttggaccagactagagcctcaacccggggtgagtttgctgcccaggcaacatctggagacatttttggttgttacactgaggagggagatgaggaaacagcatatattgtttagagactaagaatgctactaaacatcctacaatgcacaagactactccccagaattattccacccaaaatgtcaacgtgccaaggttgaagaaccctgatcctttggaagtatctcctctctctgt

SEQ ID NO: 5014 - DNA, 2712 bp, Macaca Fascicularis
aaaaaggagccgcggccactgctcgccctacctctgcgccccggggcgggcgcgccggtaaaaatggcggaatgggggtagtcggcgctggacctgaagcgatggggcacgcaggtggggctgttgtcggagccccctgacgtgggcgccgggcttctctaggtgatttgatctggcgacctcaggccggcgcctgaggtcagactacggagcccgcgggtcgccaacggcctcgccgagagccggaggcaatggatgaacagagcgtggagagcattgctgaggttttccgatgtttcatttgtatggagaaattgcgggatgcacgcctgtgtcctcattgctccaagctgtgttgtttcagctgtattaggcgctggctgacagagcagagagctcaatgtcctcattgccgtgctccactccagctacgagaactagtaaattgtcgttgggcagaagaagtaacacaacagcttgatactcttcaactctgcagtctcaccaaacatgaagaaaatgaaaaggacaaatgtgaaaatcaccatgaatatcgtgtagagatggttcaccagtcctgtaatgatcctacaaaaaatatcattcgagaatttgcatctgactttgaagttggagaatgctggggctataatagatttttccgtttggacttacttgcaaatgaaggatacttgaatccacaaaatgataccgtgattttaaggtttcaggtacgttcaccaactttctttcaaaaatcccgggaccagcattggtacattactcagttggaagctgcacagactagttatatccaacaaataaacaaccttaaagagagacttactattgagctatctcgaactcagaagtcaagagatttgtcaccaccagataaccatcttagcccccaaaatgatgatgttccggagacacgagctaagaagtctgcgtgctctgacatgcttcttgagggtggtcctactacagcttctataagagaggccaaagaggatgaagaagaggaggagaagattcagaatgaagattatcatcacgagctttcagatggagatctggatctggatcttgtttatgaggatgaagtaaatcagctagatggcagcagttcctctgctagttccacagcaacaagtaatacagaagaaaatgatattgatgaagaaactatgtctggagaaaatgatgtggaatataacaacatggaattagaagagggagaactcatggaagatgcagctgcaggacctgcaggtagtaaccatggctatgtgggttccggtagtagaatatcaagaagaacacatttatgctctgctgctaccagtagtttactagacattgatccattaattttaatacatttgttggaccttaaggaccggagcagtatagaaaatttgtggggcttacaacctcgcccacctgcttcacttctgcagcccacagcatcatattctcgaaaagataaagaccaaaggaagcagcaggcaatgtggcgagtgccctctgatttaaagatgttaaaaagactcaaaactcaaatggccgaagttcgatgtatgaaaactgatgtaaagaatacactttcagaaataaaaagcagcattgccgcttctggagacatgcagacaagccttttttctgctgaccaggcagctctggctgcatgtggaactgaaaactctggcagattacaggatttgggaatggaactcctggcaaaatcatcagttgccagttgttacatacgaaactccacaaataagaagagtaattcgcccaagccagctcgatccagtgtagcaggtagtctatcacttcgaagagcagtggaccctggagagagtagtcgttcaaagggagactgtcagactctgtctgaaggctccccaggaagctctcagtctgggagcaggcacagttctccccgagccttgatacatggcagtattggtgatattctgccaaaaactgaagaccggcagtgtaaagctttggattcagatgctgttgtggttgcagttttcagtggcttgcctgctgttgagaaaaggagaaaaatggtcaccttgggggctaatgctaaaggaggtcatctggaaggactgcagatgactgatttggaaaataattctgaaactggagagttacagcctgtactacctgaaggagcttcagctgcccctgaagaaggaatgagtagcgacagtgacattgaatgtgacactgagaatgaggagcaggaagagcacaccagcgtgggcgggtttcacgactctttcatggccatgacacagcccccggatgaagatacacattccagttttcctgatggtgaacaaataggccctgaagatctcagcttcaatccagatgaaaacagtggaagataatttgatttgaaactgacactgcacctgatgggttaacaagatttaggcttcagaaagtgacagctatgagtgaggaccatgtgtggggcaaagcctcagaatgatgaaggttccagtgctatagttggggccatgttgactcctttccaaccatttgtcacagacttgagaagaagaaatgacttcaaaatcaagagaaaacaaatactgaaagtctctacttacatccgaatttttaaaaataaaatctgtagattaacaatgtgaaaaaaaaaaaaaaaaaaaaaaaaaaaaa

SEQ ID NO: 5015 - DNA, 471 bp, Macaca Fascicularis
gctgtgctggctgctgagccagagcttcttcctgtggggctcggggagatcccacgagtcagttctctcgaaggtctttcagacacgtgtggttaccagtgaccctactctcttggcagagtccaccctgtgtccaccctggggttgaaggagacccccgggggaacggagagcatacagccaccatgccggcctgtcgggaaggagcagcgtcacccaggggaggaccccttcgcggtgtggacgtggcactgcggcctggtgacatgcgcttttcaagctgacgggaccagcaatgtcacctctggggtctcagctcccgaagataggcccactgcggagggccgtgtgcctaggagcgtgtgcggctgtggtccaggccctactctgctgctggcagcccatgtgagagttcttctgggctgtctgcccgcccggacctcacccactctcttgcgtggatatgactag

SEQ ID NO: 5016 - DNA, 1802 bp, Macaca Fascicularis
ctcaaatgacattttaccagctgttttttctgagttgctgtaattatgcctacagactgagcaataaaggagactgattttggctttaacattgcaatgcattagcttaagacagaattagaaactaatatttgtctttcacaagtgatgatctcacaatgtgaaagagaacaaagatctgcagctggtaaaatttaagatctcactgtttaaatggctagattactacagatgaataatacttgtccaaagtcactactgtcacgatgtataagagacagaatttatgacgttgagttagcagcagatgtaaaacagaatgtatcttctttgctttttgtcttttctgtagttttggatggtactcattatgtgcataactaacactgtttactgtatgcttctgtctgatcaagtgcatgtttttttaaaaagttactgtttgcctgcctaaagttaaatgttataaatttaaacctgttcatgtaatttatcagtttgttgagcatgtgttcacaccctgtcacatgattatttcctctactcagaatgctgcttacaaacacaatacagttaaccttggcatgctgccctatggaggtatttcagcaatgcatgcaggcagaagcatgactttaaacttgcagactaagtctaaatttgatcatcaagaactacctcttcagaaagtaagtatggactgccctacatgtgtcagcataccaaagccaattaatgttgtttgttcacttaatgtgtttaggctgtacatacaaccctgcttactataggctcctatgagtccaaaaagcacaagggcaaataatgtagagcctgaactcttagccgctaaatgaatatttgtagctggactgattatcaggttcctgctttttggattgagctttgctttttggattgagcaggtacatggctttttgtgttgcttcaaggttcatttttcttattattcatttccttttttcttcctttgtttttctttattttgtgtttatatatatatatgttttctacttttttggagatagtcctatcgtctcctggtgatgcattctgagaacagagctcaaaattattattggatttcaattgattcttttggaaaagacatagaatcctaaattaggaggagaattaagtagctggtacttataagtgcttcttcagcccatttttttgcaggaaatataacccaaaagaaaaatatgagaaacaagtttgtggcttaggaaactaggttagtggaaaagtagcaagtttgcatggtattagatgaaaatgtaggaacactgaaagggaatatactgaatgaggaaacatttccattgttaaaggaacatttctgtttgtttaattcagccaaaactgagaatgcacattttacttgtagatcaattaatgccttctgtcttagttacattttagtggaaaccaatgagtcattttcacagtatgtcattatgcctatatatttatatagtcattagcttagtaagtttttatgaaaaaagcaatgcaaagtagggataacagagtgacagtaacttctaaacacttctctcttaataaaatgaatgaacattatgactcaccccatcaaaatgagggtcataagacctcaaattcctgttttattgttaatctagttttttaataacattcccaaactgcagatagtttggttcatactgtgagtagaataacaaaatcaagaagacatttatagccacagcttttttatcactcaccataactttaaaaaaaaaaaaaaaaaggccaca

SEQ ID NO: 5017 - DNA, 292 bp, Macaca Fascicularis
cagctgtctgccctctttggtcgccctgcctagttagaagagttgtgaccccagccatgaagaccctcgtcatccttgttgccattattctggtggccgtgcaggcccaggatgagccacttctggcatgaactgacgaggatactgcagcccaggagcagattccaacagccaacccagaagtggttgtttccctcgcctgggatgaaagctgggctccaaaggattcagtcccaggcttaaggaaaaacatggcgtcctattgcagaataccagcgtgcttagcaggaga

SEQ ID NO: 5018 - DNA, 741 bp, Macaca Fascicularis
  misc_feature (1)...(741): n = A,T,C or G
tcataaataacataataaatgtataagtaaactcctaaaagaaaaaaaaactgagaagaccctaaaatgggtatattatatatccataatatagtgataattttgtattgcgatataaatgcacccgtaattcttaaaatctgtcaacttgcctcgtacttgacatcagtctttcagtatgcctcaccatatgtattgaaaatctggacttgaggctcaacaattattttaccagccctgtattccttaagccaggggtccccaacccccgagctgtggactggtactggtccgtggcctgttaggaactgggtggcaaagcagaaggtgaagggctggcgagccagaattgccacctgagctccgcctcctgtcagatcagctgcagcgtgagattctcataggagtgtgaaccctggtgtgaattgtgcacgtgagggatctaggttccgtggtccttatgagcacctaaggcctgatgatctgaggtggaacagtttcatcttgaaattacgctccaccccaccccgccctgtctgtggaaaggtggtcttccacaaaaccggtccctggtgcaaaaaggttggggaccactgccttaaaccatctacttaagtaacataacagtaggttgaatttgttgaaaaactctttggcaatgtataagcaattaacaaaaacaatgctgcgtcgccagtgtctctttgtttcttgcaccttttgaannnctgtgtaccaatg

SEQ ID NO: 5019 - DNA, 739 bp, Macaca Fascicularis
ttaaagagttagatccccacaatagatagtattgtggaaactgaagagtagccactggcctactgatagactgaaactgattttgttattcttacgttctccagtctgcactctgctgtgctgtctgtgctcagactagatgtgcatgccgtttcccttgcaggtgtgttctgcagctctggttttgggggacagctcttttttaagtaagattaaaaaataaaaaatatataaaatttatatagaataaatatttccattcattagagttgttaaaaggagactgaattaatattttatataaagattttgttacattatgggaggttctatcctattctgaattggagagtatatatatatatatatttttaataaactttattaaggtgaaataatttcaagtttacacgagtaacaaatatttgagtaaaaaaggcaaaagtttaaatttggaatgctgtatatattagagaatatgaggaatcatggtgtgaccaactgtataaggaagattcatatgaaggtcttaggggaaaaataattctgaagggtgaaaaaaaaatctctcccatggagattcttcacattatatggtttgacataagggtttataaggttgtttgtccaactaatgaaaatgcgcttaataaaaaattctggccttgggtgagaattcgctttttaccgcattgccgctttcacgtacatacatgagtgcatgcatctataaacgtgt

SEQ ID NO: 5020 - DNA, 766 bp, Macaca Fascicularis
  misc_feature (1)...(766): n = A,T,C or G
acatgactcgcaccccgtgggctgcccgcgaactcacnnnnnnnncagatgatgctgtgtttcgcnnnnnnnnnnnnnnnnnnnnnnnnnnnnnnnnnnnnnnnnnngacaccagccgccgaccctgccacagccaggacttctcnnnnnnnnnnnnnnnnnnnnnnnnnnnnnnnnggcacacagtccccgggagcatgaatgacttcagctacctacacaccaactgcnnnnnnnnnnnngtggagctgtcctgtgacaagttccctcatgagaatgaactgccccaggagtgggagaacaacaaagacgccctcctcacctacctggagcaggtgcgcatgggcattgcaggagtggtgcgggacaaggacannnnnnnnnnnnnnnnnnnnnnnnnnnnnnnnnnnnnnnnnnnnnnnnnnnnnnnnacaacggcgtggggcgnnnnnnnnnnnnnnntgctgaccccannnnnnnnnnnnnnnnnnnnnnnnnnnnnnnnnnnnnnnnnnnnnnnnnnnnnctgtcgggtcacctttgaagagggccccttcccctgcaatttcgtgctcaccaagactcccaaacagagactgcgcgagctgctggcagctggggccaaggtgcccccagaccttcgcaggcgcctggagcggctaaggggacagaaggatnnnnnnnnnnngtttaagagccctagggcaggctggacctgtcaagacgggaaggggaagagtagagagggagggacaaaggaggaaaa

SEQ ID NO: 5021 - DNA, 1714 bp, Macaca Fascicularis
  misc_feature (1)...(1714): n = A,T,C or G
gcagcagccaagatnntcagtaaagcctttgacagtggcannnnccccatggagtttgtgaacaagatgaagaaggaagggaaactgatcatgnnnnnnnnnnnnnnnnnnnnnnnnnnnnnnnnnccagacatgnnnnnnnnnnnnnnnnnnnannnnnnnnnnnnnnnnnnnnnnnncactcctctgctcgattatgcactggaagtagagaagattaccacctcgaagaagccaaatcttatcctgaacgtagatggtctcatcggagtcgcattnnnnnnnnngcttagaaactgtgggtcctttactcgggaggaagctgatgaatacattgacattggagccctcaatggcatctttgtgctgggaaggagtatgggcttcattggacactatcttgatcagaagaggctgaagcaggggctgtatcgtcatccatgggacgatatttcatatgttcttccggaacacatgagcatgtaacagagccaggaaccctactgcagtaaaccgaagacaagaactccccccgcaaggaaaaagtgtanacagacagctgcagtggnnnnngcttattagcaaggggcctggaatgtaaatagccactggggtataggcaccgaagaccaacatccacaagctaacaccccttcagcccacacaaagaagcttcatatttttttttataagcatagaaataaaaaccaagccaatacttgtgactttactctgctacctgctatatttatttcatggaagcatctaagtactgtcaggnnnnnnnnnnnnnnnnnnnnnnnnnnnnnnnnnnnnnnnnnntttttccattagttaaacatttttttctcccttggaggaagggaatgaaacannnnnnnnnnnnnnntactatacatttaaagcaccccagtgtcttttttttttacttccctttcttcttccttatataacatgaagaacattgtattaatctgatttttgaagatctttttgtatgttatgtgttaaggacttgtttggtatcccactgaaatgttctgtgttgcagaccagagtctgcttatgtcagggggatgggaccattgcatccttagccattgtcacaaaatatgtggagtagtaacttaatatgtaaagctgtaacatacatttaaaatggaaatgcaaaaagctgtgaaatgtcttgtgtcttatgttctctgtnnnnnnnnnnnnnnnttgtctgtctgtaactgaagtgtggatccagggactcctaactacttttcatctgtaatccacaaagattctgggcagctgccacctcagtctcttctctgtattatcatagtctggtttaaataaactatatagttatcaatgaaggcatactgctggctcctggcatccacatcctttgatctgtatttctttgtaactatacttttttccagacagggtcnnnnnnnnnnnncccagggctgaagtacagtgtcaccatcacagctcactgcagcctccatctcctgggctcaagcaatcctcccacgtcagcctcccaagtagctaggactacaggagcgcaccaccactctaggctaacttgtattttttgtggactcaagcaatccatcctccttggcctcccaaagtgctgttacaggcgtgagccactgtgccnnnnnnnnnnnnnnnnnatactttcagtatatgtggttttaaaagtgctcat

SEQ ID NO: 5022 - DNA, 725 bp, Macaca Fascicularis
  misc_feature (1)...(725): n = A,T,C or G
accccgcaccccaccgtttggggtgagaagcagaatctgtgcttccccagtctccttgccccagacaaccagcatgtaggaccctttctgcttcaccatcccccttcctgtcccctttggggtacttgggggagactctggctcccaggatctgttccccatttcagtgccttcctaggacacaggggaccccttgattttccccaggctttctgtgcccagggctctgtccctggcagtgaggttgcagtgagtgaaggagagatgatctgttctcccctccccttcccctgcccatctccagcatcttcttccccttccctggccctgcagggccttcttcagctccctttggttggtccctggccatccctcctgtcctggatcccttctccctaactgnnnnnnnnnnnnnnnnnnnnnnnccttcgtccctgatcctcaagtggttccctcccgtctcagctcagcggatcccccagagtggaggaggnnnnnnnnnnnnnnnnnnnnnnnccannnnnnnnnnnnnnnnnnnnnnnnnnnnnnnnnnnnnnnnnnnnnnnnnnnnnnnnnnnnnnnnnnnnnnnnnnnnnnnnnnntgtgccctgcttgcaggcgagcagggctccctcatgtagcccggccttccccctgctgggggtccgccacatcactgctctttctcacagtctgcctctgatgagggtgaattgctatgacat

SEQ ID NO: 5023 - DNA, 1177 bp, Macaca Fascicularis
  misc_feature (1)...(1177): n = A,T,C or G
ctgacgagactccccatcacagcgaacnctgtnnntacatatatttgatgtgcatcagcggaggagaacactggtttggccctgnnnnnnnnnnnnnnnnnnnnatacctnnnnnnnnnnnnnnnnnnnnnnnnnnnnnnnnnactggaaatccttccacaaaagtcagcctaaagaagctatggtatcatatgttaaactaagctttcaaaacccttagtgaaataacaggtgactgctttcaagcagcagtcgacatgtaaatgaaggtgttcttagaattcgcattttaccagctcagcgcacctccacgtcaaatgaaatgctctgtatgnnnnnnnnnnnnnnnnnnnnnnnccccaaaggttaattggctctccttgctcacacagatcatctcataaccaccaccccccgcccccgggtcatgaaaatcacagaacttaatacgcacactgaaccctagatctcaggcttcctgacctaccacgagtggccccttgctggccaccctatagggtcctccttccctggcagccccnnnnnnnnnnnnnnnnnctgattctcccaatctgcagtgggagagctttgctgaattccaccccaaagtcaaacatgggcaagaggtgannnnnnnnnnnnnnnnnnnnnnnnnnntttgtctgtgattttaaactaactgtgtatgtattgatgtttggaagattgtttgaattttaaagtggtaatagtacttaatgttagccagtattgttcattnnnnnnnnnnnnnnnnnnnnnnnnnnnnnnnnttttacctaacgctttactgattctcnnnnnnnnnnnnnnnnnnttgatttgcactccgttcatttctgacacggttttgctgcctcctacctttctaagcgtcatgcaaattcgagaacggagaaggacgctgctggtccctgagcagtgcggagagggcggcaggtggactccagcgcagcttgaggggctgaggacggaggctgcagcgtctgtgtcgttctactgagcacgcttctctgcctcgctcctgacnnnnnnnnnnnnnnnnnnnntcagcagttatgtttacacatcatttttatgttcctgctttgtaattcatgtttgagatgggtggccactgtacagatatttattacgctttccagactttctgaataga

SEQ ID NO: 5024 - DNA, 671 bp, Macaca Fascicularis
  misc_feature (1)...(671): n = A,T,C or G
actagnnnnnnnnnnnnnnnnngtttctcagtgtttcattctnnnnnnnnnnnnnnnnnnnnnnnnnnnnnnnngtagggatgatgcccgcgcggagctgacccttcttgccttgtttttccaagctggagaagaagcaggcgctcccnnnnnnnnnnnnnnnnnnnnnnnnnnnnnnnnnnnnnnnnnnnnntgnnnnnnnnnnnnnnnnnnnnnncgtgcagctgaccccagacgatgaggatgccataaagaggatcgaccagtcggagttcgaaggcttcgagtacatcaacccattactgctgtccaccgaggagtcggtgtgaggnnnnnnnnnnnnnnnnnnnnnnnnnnnnnnnnnnnnctttaactgtatccttaaccaccgcatatgcatgccaggctgggcacggctccgagggcagccagggacagacgcttgcgccgagaccacggagggaagtgtcggcaggcgctgctggnnnnnnnnnnnnnnnnnnnnnnnnnnnnnnnnnnnnnnnnnnnnnnnnnnnnnnnnnnnnnnnnnnngcctgtgtcgcggtggccgcggggaccctgctgaggggctgtcatgcagtttccaaggtgcacatttnnnnnnnnnnnnnnnnncgatgcactgacctgccccgccaggaaagggagcg

SEQ ID NO: 5025 - DNA, 786 bp, Macaca Fascicularis
  misc_feature (1)...(786): n = A,T,C or G
agtgtataaacnnnnnnnnnnnnnnnnnnnnnnnnnnnnnnnnnncatcccaattatcaatgggctgtcagattgnnnnnntcctatccagatcctggctgattacctcacgctccaggaacactatagctctctgaaaggtcttaccctcagctggatcggggatgggnnnnnnnnnnnnnnnnnnnnnnnnnnnnnnnnnnnnnnnnnnnnnnnnnnnnnnnnnnnnnnnnnnnnnnnnnnnnnnnngccggatcctagtgtaaccaagttggcagagcagtatgccaaagagaatnnnnnnnnnnnnnnnnnnnnnnnngnnnnnnnnnnnnnnnnnnnnggaggcaatgtattaattacagacacttggataagcatgggacaagaagaggagaagaaaaagcggctccaggctttcnnnnnnnnnnnnnntacaatgaagactgctaaagttgctgcctnnnnnnnnnnnnnnnnnnnntgcttgcccagaaagccagaagaagnnnnnnnnnnnnnnntttactctccacgatcactagtgttcccagaggcagaaaacagaaagtggacannnnnnnnnnnnnnnnnntcnnnnnnnnnnnnnnactcacctcagctccagaagcctaaattttgatgttgtgttgcttgtcaagaaagaagnnnnnnnnnnnnnnnnnnnntgagnnnnnnntgtggggaaaggagaagagaatctaaaaaataaacagatccctaacacatggtatgggtgaactgtatgataccgctttgccattg

SEQ ID NO: 5026 - DNA, 755 bp, Macaca Fascicularis
  misc_feature (1)...(755): n = A,T,C or G
cagcgggaaatggtcactaccacagagccagggatattcgttnnnnnnnnnnnnnnnnnnnnnnnnnnnnnnnnnnnnnnnnnnnnnccagcattcctttttggaagttttgtggaccatgcgtgtttcagcactctgagggcagaannnnnnnnnnnnnnnnnnnnnnnnnnnnnnnattcctagagatatcttgaaagcccttgttcttgggcttagaaacctcatccctttnnnnnnnnnnnnnnnnnnnnnnnnnnnnnnnnnnnnnnntcttcatctatttccttcatttctctttctgaacannnnnnnnnnnatgctattaagtggggcagatcaaggtaagcattccctcgacaggtggcctggcgtgggttgtaggggcccatgttgaatgaggagggtgtattcgttttttgttaataccataacaagttaccgcaggctttaaaaacagcacaatttggccaggcacannnnnnnnnnnnnnnnnnnnnnnnnnnnnnnnnnnnnnnnnnnnnnnnnnnnnnnnnnnnnnnnnnnnnnnnnnnnnnnnnnnnnnnnnnnnnnnnnnnnnnnnnnnnnnnnnnnnnnnnnnnnnnnnnnnnnnnnnnnnnnnnnnnnnnnnnnnnnnnnnnnnnnnnnnnnnnnnnnnnnnnnnnnnnnnnnnnnnnnnnnnnnnnnnnnnnnnnnnnnnnnnnnnnnnnnnnnnnnnnnnnnnnnnnnnnnnnnnnnnnnnnnnncaaaattaa

SEQ ID NO: 5027 - DNA, 711 bp, Macaca Fascicularis
tcattctgaacatactgttttatagtatggtcagctaataatatatcagaccttttttcatattatcaaatattctgcaacttttttttaatgtctattaatattccatcatatagatgtgatataatttgcttgatggttgtctcttaaaaagatagcaaacactttttttaaatcacaaaagtgatggatgttcattgtagaaaatataataaacactgttaagacttaaaagccatataattccaccaaccaaaattaatccctgttgtcatatttgtagtcatttttatagcctttttttctatgtatttataataactatcatttgagtttttttccttttgcttttttactttaaaaatacatgttctaggtcaggggaaatgtaatctggaattaaatattagccttaaaattcacaattttgattttcctggattttcaggaattgattaactaaaagagtcttgaaagtatttgctgtatttaatcaacaaacagagtgcattttttttttttttgactaagaaagctcattgtagtagaaagggtggaatgtggaatgtatagaaaattattagaaacagggaactattagtctagcttatttcctttcagtctttttttcaatattttaaaaaacattgagtacttattgaatttagttctgtgctcttccttatttagtattgtttcataaatactttg

SEQ ID NO: 5028 - DNA, 713 bp, Macaca Fascicularis
  misc_feature (1)...(713): n = A,T,C or G
gttttaggaaggaaagcagaacagtgggcatctttttcaaagtaaaagagcaaaaaaggcaaaaaatatttcatgtttacattatggacaaagacaagattgtccttcaataaaaggctgaatttttttttttttttgagagannnnnnnnnnnnnnnnnnnnnnnnnnnnnnnnnnnnnnnnnnnnnnnnnnnnnnnnnnnnnnnnnnnnnnnnnnnnnnnnnnnnnnnnnnnnnnnnnnnnnnnnnnnnnnnnnnnnnnnnnnnnnnnnnnnnnnnnnnnnnnnnnnnnnnnnnnnnnnnnnnnnnnnnnnnnnnnnnnnnnnnnnnnnnnnnnnntcaactcctgacctcaggtgatctgcccacttcggcctcccaaagttctgggattatggatgtgagccaccgtacccgacctggctgagtgttttaagttatttataaaagtagaacaagttgctctttatttattagtataattttttttgagatggagtatnnnnnnnnnnnnnnnnnnnnnnnnnnnnnnnnnnnnnnnnnnnnnnnnnnnnnnnnnnnnnnnnnnnnnnnnnnnnnnnnnnnnntgcctcggcctcctaaagtgctgggatcacagcgagccaccgcgcccggctgcataaggatgtgatttttcagtagaggctcttaccttttactttaaacattctttgagggttgttgttgtttcca

SEQ ID NO: 5029 - DNA, 1962 bp, Macaca Fascicularis
actaatgggatggtgccctggagagacaagagccttcctggaatgggctctggttctaattcctctttgacttgactgactttgggcaactcactccatagctttgcacctaaatctttttaaatgcaaattgagtggattctaccaaatcgtcttgaagtccctttgtctaagattttgttcttttttttccccctgaactctaccagttctgataagatgaaaaattcaccaaagttttaaggctctcttctgttaccaaatgatacatattatctaagtctgtattatcatcctaattttccattgttagtggaaaatggaatttcacggtgggccttgtgcacttaggtcttgactatgcccttgctcctcgtacagtgaaaaagtaagactctaagcctcaagaaatgttttatggcatgcatccgggagttttgttggctgaggatagtagccataaagtataagtgcaacatatttcaactatagaataattatttgtcactttgctatccctaagttgtcaaaaacttctcatgtacctaccctagattgtatacactctcttttccaaatctctgttttacatggagtgcaagtttccatttgtaatttaaagataacatcttagctgaagaaagactgttcattgatatgcagattgagaaatcagcctgtcctttagggatttcaagctgtggaatcaaccaaaggtctgcagaataataggacccttgagccttttatgattgtaagactttgatctgctaccaacgagtcactcaattttgtctgtgagcctcccttaatgtgaaaaagtggagcgagatctccagtaagtgcttttcatgcagaagtaatggtcttacctccaaataagagttctcatttatatattcattgcacaagattacttgtaaagattcaatgaccgtatttaacatttattgagtgcttgtttttgcaggtgctaagaatataccagccatcaagaaagagctgctgctcttgtgaaacttgtagtctagttggggtttggagagaagaaataggcaacaaacaaatgaacaattaatcataaaggcatcattgtcaggtgatgataaatgatagtataaaaatggtataggatggagtaacagagaatgatggggctatgacattagcctactcaaatctctttgaatagtttttcattcaagattttattttgatgcataaaacagaaactccaaaataatactgggtgaagcaggacaaaaatttgtttctctttcatgtcatgtatttgcagaagtaggcatgtcatatattttcatgtcatatgtttgtagaagtagacagaactcttacagtggggacctaaataccttatacctttatcattttctttatgttctactatcctgtgtcccaaatcattttactgtagcaagaaagagagattggggagtgtattagtctgttctcacactgctaataaagacatatccaagactgggtaatttataaaagaaagaggtttaattgactcacagtgccacatggctggggaagactcacaatcatggtggaaggtgagtgaggagcaaagacacatctcccatggtggcaggcaagaaagcatatgcagaggaactcccctttataaaagcatcagatctcatgagacttactatcatgatgacagcataggaaagaccagatgccatgattcaattacctcccaccaggtcccccccatgacatgtaagaattatgggagctataattcaagatgagttttgggtagggacacaaccaactccatatcaaggaaagagtagctaaacctctgagtaacattcctggatgtcacctacaagttctgctataaatcactattcagaaattagctacatttccatatctgatgcaagagtgaggcagaactgcagtcttttagctgaaaacattggt

SEQ ID NO: 5030 - DNA, 632 bp, Macaca Fascicularis
  misc_feature (1)...(632): n = A,T,C or G
acacaaagataggaacaataaacagtggggaattccaaaaggagagaagaagggacgaaggtaaatactaannnnnnnnnnnnnnnnnnnnnnnttcactacttgggcaacaggattatcagaagcccaaacctcagcatcatgcagtgtacccatgtaacaactctgcacatgtatatcctaaatataaaatttgtaataagaggcaaagcaattagataatgataaatggtcaattaaatggcaacatatagcacttaaaaatatatatggacccaacataagataacctaaatatataaagcaaacattgacaaatttgaaggaagaaataaaaagaaatataatagtaggataattcaatatccaactttgaattttagaacatccaaaaataaaatttaatgaggaaacagtgtcttgcacagacctatagaccaaacagccctgacagacatatagagaacattttgagcaacagcagaagaacatacattcttctcatgtgtatgtagaacattnnnnnnnnnnnnnnnnnnnnnnnnnnnnnnnnnnnnnnnnnnaatttaagattaaaaatatactgatacattttacaaccacaannggaataaaatagcagtcaataaagg

SEQ ID NO: 5031 - DNA, 766 bp, Macaca Fascicularis
  misc_feature (1)...(766): n = A,T,C or G
agtgacggcagaggcatgggctgggagtctcaggggccttgcctgggggtngccagcctggtagggggcagagaaggaaaagctgaggggggttccagtgagggaggnnnnnnnnnnnnnnnnnnnnnnnnnnnnnnnnnnnnnnnnnnnnnnnnnnnnnnnnnnnnnnnnnnnnnnnnnnnnnnnccctgtgttgtaattggtccctcctttcagctctctggtgagattcccgtgtctgtgtgtgtgcgcgtgtgtttcatagagctagcattagacgggtgatgtttcttacttatcatccctaactattgtaactnnnnnnnnnnaagacaacccccccccacaaaactcttcctgccacgggcttgcagattgaagcactttcgatgttgggcgctggcgtttnnnnnnnnnnnnnnnnnnnnnnnnnnnnnnnnnnnnnnnnnnattattttatacacaaacttgtttttcataaatgttataattttgtgtctgtctttataaactattataagtactatttttgttataattcaaaatagatatttagtataaagtttttgctgttaaatatttgttatttagtaaaatatgaattttgctctattgtaaacatggttcaaaatattaatatgtttttatcacagtcgttttaatattgnnnnnnnnnnnnnntgttttgttttgatatgaaactggtaccgtgtgagtgtttttgctgtcgtggttttaatctgtatataatattnnnntgtgcata

SEQ ID NO: 5032 - DNA, 626 bp, Macaca Fascicularis
  misc_feature (1)...(626): n = A,T,C or G
caaaagagtctttttttttttttttttgagactctattgtgcagactggagtgcaacaacgtggtctcagctcactgtaacctctgcctcccgggtttaagagattctcctgcctcagcttcacgagtggctgngattacaggnnnnnnnnnnnnnnnnnnnnnnnnnnntgcatttttggtcgagtcgaggtttcaccatgttggccagnctggtctcgaactcatgatctcgtgatctgcccgcctcggcctccggaagtgctgggattgcatgcgtgagtcaccctgcccaaccatcaaaagagtcttaatatatatatccagatgacatgtgtttactttnnnnnnnnnnnnnnntttggctgcataaatgtggtacaagcactctgtcttgaagggcaggtgcttcnnnnnnnnnnnnnnnnnncagaagtttcttttgtaggcattaaattttagcaaagatatctcatctcttcttttaaacaattttcttttttgctggttagaaaagttatgtagaaaacaatggaaatgtcatttatgctcattgtagaaaagctaaaaaaatgaatacaattaaagctgttatttaattagccagtgataaactattaaaaactt

SEQ ID NO: 5033 - DNA, 710 bp, Macaca Fascicularis
  misc_feature (1)...(710): n = A,T,C or G
annngagccatnnnnncgtgannnctgggaggcnnnagnccccgcacccatcatgcgtggaccgataggacgtctttccatggtgtnnnnnnnnnnnnnnnnnnnnnnnnnnnnnnnnnnngatgaactctcatgctgcaccttcagannnnnnnnnnnagtttgggagaaaaattgcagaggtacatattgggtctttaccacctggagctggtggacagcagccagtgtgtctggacatccaggagcgttgagactacatgtcacataaccacttttcacacatctgcttttggtgcctggtgaaaaatagaccttggcctcacaatgtgactgtctccgccacctcagagtgtagggatgggtccaggccagtgaaggagcaccctctagtggaggcgggggtgaattcttnnnnnnnnnnnnnnnnnnnnnnnnnnntagccagcctgtgtgaccttgtacatgagtttggtgtgcctattgtgatttaaaacaggtgggttatcaagaggaacttgggatctctttattacgtggacatttacttcaggggggaccgttgtaagaaaagccaaactccaagatcaagtgaggtgagtcttaaattttttagaagatttcactgaggagttctgtccaccctttgccctaatgaatttgaatgggtttaatttgcgaatttggatttagaccctattgtttttgaa

SEQ ID NO: 5034 - DNA, 698 bp, Macaca Fascicularis
  misc_feature (1)...(698): n = A,T,C or G
agacaaacatcaaaaaatgnnntatgtagcttggagtttgacagaaaagacataagtnnnnnnnnnnnnnnnnnnnnntcnctggaaggaaagttccannnnnnnnnnnnnnnnnnnnnnnnnncaaccaaaggttttgcctctgtttcagaaaaggctcataaatctactgtgtggcaggtccgacacctcccgcagaacagggagctcttcctgacagctggaggcgccggcggccttcacctctggaagtatgaataccctattcagcggtcaaagaaagattctgagggaatagaaatgggagtcgcaggttctgtaagccttctgcagaatgttacgttgtccacccagcccatttcaagtttggattggagtccagataaaaggggtnnnnnnnnnnnnnnnnnnnnnnnnnnnnnnntgagagtactaatcgttacgaaactccataaaatttgacttcaagactttggactcacagaatttaagataggttctggaatcctctgaccctcattgaacaaagctggatttggctgatgacaaaagcccccagacacaagcccctgggccagcctccagcctctcctggggcgtgtttgccgacttgcttgctgctgcgcgtggatannnnnnnnnnnnnnnnnnnngtctccagggccagtgcttttcttctcccttccatttctaagtca

SEQ ID NO: 5035 - DNA, 478 bp, Macaca Fascicularis
  misc_feature (1)...(478): n = A,T,C or G
atccagttnnnnnnnnnnnnnnnnnncacctcccccacccccttacccccgagaactttgcagcttcccttcccgccccatttttcatgtcnnnnnnnnnnnnnnnnnnnnnnnnnnnnnnnnnnnnnnnnnnnnnnnnnnnnnnnnnnnnnnnncccagcctctgccnnnnnnnnnnnnnnnnnnnnnnnnnnnnnnnnnnnnnnnnnnnnnnnnnnnnnnnnnnnnnnnnnnnnnnnnnnagcgtctccacagctgcaggcctgcaaggtctcccagcatcgcactcctgggcctggcatttggaacctgccaggttggcctaggaaccccccgcnnnnnnnnnnnnnnnnnnnnnnncattcctgcccacccccctgtctaggacccatccacatgccccccaacttgccctcggcctcctggctgacccttggccacagccttctgagggccaatggaaatatnnnnnncgaga

SEQ ID NO: 5036 - DNA, 741 bp, Macaca Fascicularis
  misc_feature (1)...(741): n = A,T,C or G
gcagcggaaggacagatggagtcaaaggccgatgcacagctggggccaggatggctgcaaagggnagaaggcggaacttggaaaaaccttccagaaaacccgagaaatctgtggcacacatggtgcaaaccacactttattatgccgcgctactactcagcgacgtgtgagcctctagtcactcccctctgccaccaggaatgacgacaatatatacgccctgagaacnnnnnnnnnnnnnnnnnnnnnnnnntaacacttccaggatgtttgacctgatnnnnnnnnnnnnnnnnnnnnnnnnnnnnnnnnnnnnngccctcagcgctccaccaccacccctaggcaaggaagtttgcaagcaggaccactctacagataccactttcaaaactcgcttctgtctgagccgaacgcaaatgccaataaatggccatagacgcagatttcccttcagttaaccataataattggtagaaaccgatcaatgacctctaataaagcatgcgtgagaagagcctctctggactcaagaatggctggccatatttannnnnnnnnnnnnnnnnnnnnncannnnnnnnnnnnnnnnnnattaatttcctagatactgtttctctcctttagggaagaccaaaagccnnnnnnnnnnnnnnnttgcagcaataataaaatgccttttttaatgtgcaatggagttatatataattgctaatccacagccacaccgttatctctacc

SEQ ID NO: 5037 - DNA, 706 bp, Macaca Fascicularis
  misc_feature (1)...(706): n = A,T,C or G
tacgagaagcggctgtactgaggacagcggtggaggccgaggtggtggagggggcgcaccccaatgtccacttttgggcacagcctccctccataactgagtgatccacagatttgcactnnnnnnnnnnnnnnncctttccagggagagaggaggggaggtcctgagggggctgctgcccctcactcggcatcccctgcagtcaggactgctccctgggccaggctgccctgggagcccccctgagcccagccagtcgggctctcaggccctgcgcctgcctcaggtctttcttgctgcagcctgctccagcccagcccctaccccaggggcaggtggcccctcctggcttctcctgtagggcacctccctgcccccagccccccaggaaatggtgctctcctggccctgcctctggcccttcctgggccgctgccccctcacttctgagctcctgacctaggccaaggggaggtctctgcccccttccccgggcctgggctacccttgggtcctgctcctcaggccaatcccctgtccctggccctggggaggcagctgccctggtcatggccgcctgcctgtcattcctgactcaccaccttccccaggtgaaccattcctcccctctccnnnnnnnnnnnnnnnnnnnttaactttgcacactttgggatcacagttgcgtcattgtgtgttaaaactcgga

SEQ ID NO: 5038 - DNA, 676 bp, Macaca Fascicularis
aactccaaatgctttcagttgctttattctccaggtatgtccctggggcacggagggaagggagagtgttaccattttaaagagaagaaaatgaagacccaagtctagggtttctcacttagcaagtcagtaacagagccagaactaaaactatacatctttggatttggtttatcctttgaattcattagatcctattggttttgccaaatgcatactgtttttaaggattcacagttgaagaaaaaataatctgagaatattagatttaaatatctaacatgtttcacgtagaattgatgtaaccaattctttaagcatagctttccaaacagctaggtatataattgtatataattttaagatataccctcctagtgattatgaacttccttaaagattgtttttttattttactgtattttgtctttcaggtatattgttgatgattttgatgttcagctttttccttccatggctgcataacaaccatacaattaataaaaaggaataaataactgttccaaagactcagactaacatacaggacagtccagctggatgtgataaagattttatcacctcatatggaaaacactggctgcactggattcgtcagtgttaacttcctttgaggaagccgccttatagttttcatcactgggacttaaacaaa

SEQ ID NO: 5039 - DNA, 725 bp, Macaca Fascicularis
  misc_feature (1)...(725): n = A,T,C or G
accctcaggaggnnnnnaggcctccctcacttcccatacccagtctaggagctctttctggctcccaagcacccagagctttcctccaccttttagttttggttcctccactggaatgtaggctccttacgggtgatggctatcttttcttgactttgtatcttcattgccaagcaaaaagtctgccgagtgggaatgttcaataannnnnnnnnnnnnnnnnnnnnnnnnnnnntcgtacatgaataatactactgccttacattttctggtgctttataatgtatacattacatctgcatattttattttatttaattttcaaaacaatcctttaaggtcaacattgttatccttattttgctaatgaggaaactaaggttagaaacattttgatttcctctaggacatatagctaggaagtgttactgtcttgagttgaacaaattttctggtgctaagtctgatnnnnnnnnnnnnnnnnnnnnnnnnnnnttagatggagctttgtaatgggaataaaacagtaccttaggttctttctgaaaaggaggtatctagccatggannnnnnnnnnnnnnnnnnnnnnnttaaatgttggttaggaacagatttaaggcttaaaaaatattttatgagcagcaagattgctttaacttttaaaatgaagctttggttgtctgatttgtaatgagcacctggatatgtcaatcaacatgcccat

SEQ ID NO: 5040 - DNA, 811 bp, Macaca Fascicularis
agggcggccaagattttttggacaatggttgcttttggcagaccaaaacctactgacttacctatcacaactgaagtccacattagataaatctagaaccaaatgttacataagcacatgtctggcccagaaaaaagagaaagttaaaaaaaaaaaaaaattcagaaactacaactagcattagacctatttacattagggaaggaaagggatcaacgtaaaaagtaagttatactgtaacaaattcaaccatttctccctaaaaggcctagagagaaaccaagcactaggacacatccactactgccaaaaaagcagaagtactgctggaacctggacagatcgaaagcaagggatggctgtatgctgagggctcagcagaggtctgtcctcaccaggtcccagtgcaactagtctagtccagttggccacaatatccgtcctccttttcttcaataaaataaagtgtggttaggtatacagctacctaaaatgaaaattacatttccaggttcagttatcctgaattgcacttcttttgcagctcagggtactcatgtctaaattgcggctaacaagatataagcaggaggtctcatatgacagcttccaggagtcttccttaagatactggccataagcaccctctgctttgcttttcatcccttcctacctcctgtagcctaggatgtagataatctgcgtatgggacagtgaggtcgaagtcatgcatggtgagacatcaatgtcaaaagaatctggatccctgacactgtggaggactctacagccctggaatgctgaaatacac

SEQ ID NO: 5041 - DNA, 747 bp, Macaca Fascicularis
  misc_feature (1)...(747): n = A,T,C or G
cagcaaatccaagcannnnntcagctnnnncgtctctaccgaggaagttccaggctggctcttctcacggaactctcccagaatnnnnnnnnnnnnnnnnnnnnnnnnnnnnnnnnctcgcagagtgctcctgctttcaatagcatcttccagaatgagaacttccagctgcagctcattcccccacctgtgactgannnnnnnnnnnnnnntggagcctagcccaggagaaccagagatgatcccaaggtcgctggagagagaccccgcctctggtgggcttggcctccaccgcctcccacgcnnnngagaagaggttccaaattgggatcctgtgcccagagcgtccacagcaccattcccagcatagactcccagtcttctccacattgttgtcatggtgtcacttcnnnnnnnnnnnnnnntttgttttgcctgttaagcaaaggaatgtcacatacctctgtccagctttttaggaaacacattttgcctattgggacttttgccatttcnnnnnnnnnnnnnnnnnnagatggaactcacacaaatggcattccagagtctgctgtactccgtcttctccagctgctggataatacagaggaacttcaacttctacagggaacagtggttggccaggctgcagtataactgaaacatgccttggagagagcagagacactgtgggggccagggccatctcccttttaatgtgttcgtgttaaaacctatttgagtataaga

SEQ ID NO: 5042 - DNA, 637 bp, Macaca Fascicularis
  misc_feature (1)...(637): n = A,T,C or G
nnnnnnnnnnnnnnnnnnnnnnnnnnnnnnnnnnnnnnnnnnnnnnnnnnnnnnnnnnnnnnnnnnnnnnnnnnnnnnnnnatggtctcgatctcctgacctcatggtccgcctgcctcagcctcccaaagtgctgggatgctgcgtccagcccatttttaagattttttatttgaaaatttgccaattctttaagtgttttctttttcagatttatgaatttcttcatcttttaagctatctataacttactgccatttggtaaagtagacttttgtgaacaaaaattataacatttacttttgctccctacctgactgccacagaactaggcaactattcctgagtattcatatgtttattgtaattcagttatttgtacaagttcagtgagaatctgctatctttataatgggacatattttaaaacatccgttatattaccaaggctttgattgggatgttatatttgagaatatacatagaatgatagattaactgtctaatctatcgtgtcaaccccaaatttttacgtatgagatcctttagtccacccaatggctgatgttagcagcatctttaacacaactgtttgttcaaatgtactatggtcccttttagagtcagactcctagac

SEQ ID NO: 5043 - DNA, 552 bp, Macaca Fascicularis
  misc_feature (1)...(552): n = A,T,C or G
tgttcccaccacacagcaatacctgcaggctggggcaggccctgggtgggcagagatcacaggtggcctgagaaccaggagccgcctgctccctcacttcctggatgagccaccatctccgtttctctttaggggaggcccagagttactgacacttgggccctcctagggtcccaaggtgagaatcaaagacacagaaatgtctgagatacacaatcacaggagattttattgaccccatgacatccagtgacagtgtgggagcaggctactctccagggacatatttttggaggcatatggagaaggaggcccaggcgagnnnnnnnnnnnnnnnnnnnnnnnnnnnnnnnnnnnnnnnnnnnnnnnnnnnnnnnnnnnnnnnnnnnnnnnnnnnnnnnnnnnnnnnnnnnnnnnnnnnnnnnnnnnnnnnnnnnnnnnnnnnnnnnnnnnnnnnnnnnnnnnnnnnnnnnnnnnnnnnnnnnnnnnnnnnnnnnnnnnnnnnnnnnnnnnnnnnnncaggagttcaacactacagtgagcagtgatcac

SEQ ID NO: 5044 - DNA, 685 bp, Macaca Fascicularis
cagccccccgcagcccctgctgtcatccctgcacggaccccaaccctggccccagacccctgcccaccctgccctgacacccgaggccgcgcccaccgactgctccactattgcggtagtgactttgtgttccaggcccgagtgctgggccgccaccgccaggcccaggagacccgctacgaggtacgcatacagctggtctacaagaaccgctcgccactgcgggcccgcgagtacgtgtgggcgccaggccactgcccctgcccgatgctggcaccccaccgggactacctgctggctgtccagcgcctcgtgagccccaacggcacacaggaccggctgctgctgccccatgccggctacgcccggccctggagccccgcggaggacagccgcgtacgcctgactgcccgacgctgtcctatctgagcccccgcaggagccctggccacacacagcaagaaagatacatctgaccagtctcaacatcagcgtatttcccctctcaccctcgcttccaggcagctctgaaatatgtcccacctgtgcagctatgtgactccctcccacacacacttagacacctctgcatgcagttggagtcactgtcacaagccggcaggcactggtgaggagacactgaagagactctgacttgtatttcgcttctctccttggctgccag

SEQ ID NO: 5045 - DNA, 703 bp, Macaca Fascicularis
attacattaatatgttgataaatcgtcattgctgaacaaatttttttatgtgcaatcatacagaacattttatatttaaggatgtttatatatcaagtatataatcattggtagaaactgggcagggcgcggtggctcacgcctgtaattccagcactttgagaggctgaggcaggtggatcatctgaggtcaagagttcaagaccagcatggccaacatagtcaatccccgtctctactaaaaatccaaaaagtagcgagtgtggtaacacgcacctgtaatctcggctacttgggagaatgaggtgggagaatcacttgaaccccaggcggcggaggttgcagtaagccaggattgcactactgcactccagccagggtgacagatccagacagagtctgtctccagaaaaaaaaaaaaaaagaaacctaagaaagctatattgcttatactcttaacatttctaacatttcactacatttatccattctcaaaggaactttctcatcacaagattggaaaatctgtacttccctggcttagtatgacttaatcataaacgtctaaatttgactgatgtcccaggaaataaaacttgtaaaactaatctgttgcattctatgtgtttatgtgacatttgagatctgcatattatgcatagcaatctggtttttatataatgtacagaaactgaaaagtttt

SEQ ID NO: 5046 - DNA, 730 bp, Macaca Fascicularis
  misc_feature (1)...(730): n = A,T,C or G
tgcaggagtggagaaacaatgcacaaatcttcagccaggaacattttgtggtctataaannnnnnnnnnnnnattctcggaacacagataactcctggatannnnnnnnnnnnnnnnnnnnnnnnnnnnnnnnnnnnnnaataatggaccatcntnntnnnnnnnnnnnnnnnnnnnnnnnnnnnnnnnnnnnnnnnnnnnttaatgataaatttgagctttatgccagccactcccaatttatnnnnnnnnngtctgagaaacaaggtgcccaatggagtgaggacatgtnnnnnnnnnnnnnnnnnnnnnnncttggagnnnnnnnnnnnnnnnnnnncttcaaatgatcaagagtgggtaagaggcaaacagcacataactcccactaaataggacagggagggtcacctctttggtgattaattccaaaactgtgctatatgaaggctttgtattagggaataatattagacaaatatggggaaatgggatcacagaagttttggctttcctgttagaagaatatactcacatgctgtatatattgtatacatggtttaaactaacttacacaactactgctctttggagaattgtaagaaaaacaatgacatcttccttaacaaccatagcctctacttttcagccagtttgcatttgtcaattcttcttcctcctgatgttttaatgtggcataatctaatgtataatctgactttgagtaaca

SEQ ID NO: 5047 - DNA, 543 bp, Macaca Fascicularis
  misc_feature (1)...(543): n = A,T,C or G
ttctggttgtttccaaatttttgtcaagttaatcttgctttaagcatcaaagtacacatatcatacggtgcttttactgttataagatagattcccaacagttacctgaataagtcaaaatatttgttttagtattaatagacattgttcgtttactttttaaatagactgtaataattcacactcccaccagcaatggagaagtgccatttctatgcatctttacaagcactgaatattaacctcttttttttagttttagttcctattttaacgaggaaacacatatttattggccgggcacannnnnnnnnnnnnnnnnnnnnnnnnnnnnnnnnnnnnnnnnnnnnnnnnnnnnnnnnnnnnnnnnnnnnnnnnnnnnnnnnnnnnnnnnnnnnnnnnnnnnnnnnnnnnnnnnnnnnnnnnnnnnnnnnnnnnnnnnnnnnnnnnnnnnnnnnnnnnnnnnnnnnnnnnnnnnnnnnnnnngaatcactggaatccaggaggcagaggtagaggttgcacgtgagccaagatcacgcc

SEQ ID NO: 5048 - DNA, 766 bp, Macaca Fascicularis
  misc_feature (1)...(766): n = A,T,C or G
gatgagacatcccagaagcccagaccctcaacccctctggatgctacatggggacgctggatggctaagcccctgttccaaggattttggggtnnngagattntcccntagagacnnnnnnnnnnnnngtcacagatgtcatatgacttagtcttaagaagtctcagaatgtccagcccgtcagcagttctaattctgagacatgagccttgggatgtggcagcatcagtgggacaagatggacactgggccaccctcccaggcatgagacacagggcactgtggagagacttctcccccatggccgcctgggctcccccatctcgcctgaggctgctcttctgtcagacttcctctttgtaccacagtggctctgggaccaggcctgcatgcccactggccattgccaccttccccagctgcctcctaccagcagtttctctgacgatctgtcaacaggttaagtcaatatggggcttccagtgcgtgcattccagtccccagagcttggtggtcccgaaacgggaagtacgtattggggcctagtggccactgtgagcaaatggtgtcttgggcaatctgaggccaggccagatgttgcaccacccattgagatagtggtgagggaggtgggtggggccttctgggaaggtaagtggggccccctaccctccccatcctctactcccgctgctcagcctgggccattgcaagggtgccacacaatgtcttgtccactctgggccacttctgagtgtgaagcggg

SEQ ID NO: 5049 - DNA, 2167 bp, Macaca Fascicularis
aaaataacgggtgggaacggtgtgggtggggggcaaagaggaaacccagagacacaggacgcccctttcctgtggtcggcacccagttgcttaggcaggccagccacgggcacggaaagatctattcaactcactgcccaatctcctctcctggtgcagaaaagacacccagtcagcgacttgcattctctgcagacatgagtgaataataataatgcctaacctttatatagtgctaattccacgcctggcactgttttaggcagtcatataaattaatgtaatccacacaacctcaagactgatgatacctcttcatcttaccaagcactgagcagttaaataacttgctccagatattaaggagctggggtttgaaccagccagcctggtttcccataaatgaaccaagaactggaacgaggacaagacctccgagaaggagtcagatgggagcgccctccgtgggctgagcctgtcagcatcctcgatgcaccctggtccctgaagtcggagaagagcccctacccacccacacccccttgcgccatttcgggtcacctgggtcctcagccctagcggccaccagatctgaaaggagcaggacgatgatcctggcgtcggtactggggagcggcccccggggcgggcctccgctccggcccctcctggggcccacactcgcgctccgggcccgctcgacgtcagccaccgacacacaccacgtggagatggctcgggagcgctccaagaccgtaacctccttttacaaccagtctgccatcgacgcggcagcggagaagccctcagtccgcctcacgcccaccatgatgctctactccggccgctctcaggacggcagccaccttctgaaaagtgctcgttacctgcaacaagaacttccagtgaggattgctcaccgcatcaagggcttccgctgccttcctttcatcattggctgcaaccccaccatactgcacgtgcacgagctatacatccgtgccttccagaaactgacagacttccctccgattaaggaccaggcggacgacacccagtactgccagctggtgcgacagctgctggatgaccacaaggatgtggtgaccctcttggcagagggcctgcgtgagagccggaagcacatagaggatgaaatgctcgtacgctacttcttggacaagacgctgacttcgaggcttggaatccgcatgttggccacgcatcacctggcgctgcatgaggacaagcctgactttgtcggcatcatctgtactcgtctctcaccaaagaagattattgagaagtgggtggactttgccagacgcctgtgtgagcacaagtatggcaatgcaccccgtgtccgcatcaatggccacgtggccgcccggtttcccttcatccctatgccactggactacatcctgccggagctgctcaagaacgccatgagagccacaatggagagtcacctagacactccctacaatgtcccagatgtggtcatcaccatcgccaacaatgatgtcgatctgatcatcaggatctcagaccgtggtggaggaatcgctcacaaagatctggaccgggtcatggactaccacttcactaccgctgaggccagcacacaggacccccggatcagccccctctttggccacctggacatgcacagtggcgcccagtcaggacccatgcacggctttggcttcgggttgcccacgtcgcgggcctacgcggagtacctcggtgggtctctgcagctgcagtccctgcagggcattggcacggacgtctacctgcggctccgccacatcgatggccgggaggaaagcttccggatctgaccccacagcctttggcctgctcacctgaccagcctgggccgcattccctgcaggacctcctgggtcaggcagggtggcctcctgctccacacgctgctgcatcttgggtctcagggtcccagacagacggacttacatggagctgggcactgccccgcctcaatagggtccattgtctcctcgcctccagaccttggagaggggaagtgggcaccctgaggcctccagcaccagctccgtcattctcgttcctggggaacccccactctgacctgtcgtttgttattaaagttcacattttgaaaaaaaaaaaaaaaaaa

SEQ ID NO: 5050 - DNA, 735 bp, Macaca Fascicularis
  misc_feature (1)...(735): n = A,T,C or G
gcagtgtaaattnnntaattatgcatatatatatttataccaccatggatttactttcacactggaaatntgtggtgtttttctacagaggaagccttttaacagcagaaaattatccggtagcaaattgtcttagggaaattactacactgttgtaacaaaagggctggcaagtgactaaatgttcattaccttttggttagcgttgctatcactgtagctgtgctgccttaacattgagagttgagttgtggacttagtcgttgagtgaatgttgaacttttttccttgaatcagcgttagagtcaaatgtgggtttaatgtgaatgctaaatgatacatgcaacatactttcaaatggaacatagaaatttcacttttgagaataataaacccacaacctaattgcatggttttgggctgaccgtcctgtctcattcatgattttactccctgcccagcttgcacatacatgcattcgaattttagtagtctgtcatatttaaaatcccacatatgtgagttaaatatgcaataaagaannnnnnnnnnnnnnnagccacacccaggcaatttaatatccatggtcttctataatgtttatatcacattgtaaatattcaaagaacttgttttaaagtttatgctttctgattctgtgattttcaaaagaggaattttttggaaattaaggactatcgtttgataattatatatgtaattaagctttagcca

SEQ ID NO: 5051 - DNA, 734 bp, Macaca Fascicularis
  misc_feature (1)...(734): n = A,T,C or G
gggtctttacttggtcaaatgtttattctatgttccccaggaacagagtatgagctcattgatgcagactgattctaactgccaggccctaatttgcaaactaactctcataataaacagaggcccagagttgtttatgaactgcttatctcttaaaaggagcacaagaacccctcctgccctccttgggcaccctgcctccaggagatggaggcatgtaataagacaaagactgcaccaactcaccctgacccagttacatagtcaccgagagtggggaagatgggacagcccacatgctgcataagatgggctttatgcagcaggcccaggtcnnnnnnnnnnnnnnnnncctttcctgtaacctgcactttgggatggtggaaatttctttacctgctgtctgacaggttnnnnnnnnnnnnnnnnnncccctgggccctgagtggagctaaagtcacatttggtaccagcagcacctatcccnnnnnnnnnnnnnnnnnnnaacactccnnnnnnnngcttttgcctgggtagggctagcatgccagcagcttctgcaggctccaaacccaggccagaagccagacccagnnnnnnnnnnnnnnnnnnnnttccctccttccagtgttccttagaacagacatttaggtatctcaggtcctttctaagtgtccctttcctgtgtatgcatttcctttttttgtctttactatgcactttagctataaagc

SEQ ID NO: 5052 - DNA, 812 bp, Macaca Fascicularis
ttgcagcgtcagctggatgagccaaaactagaacgacggcctcgggagagacacccaagctggcgaagtgaagaaactcaggaacgggaacggtcgaggacaggaagtgagtcatcacagactgggacctccgccacatctggcagaaatgcacgaaggagagagagtgagaagtctctagaaaatgaaacactcaataaggaggaagattgtcactctccaacttctaaacctcccaaacctgatcagcccctaaaggtaatgccagcccctccaccaaaggagaatgcttgggtgaagcgaagttctaaccctccagctcgatctcagagctcagacacagagcagcaatcccctacaagtggtgggggaaaagtagctccagctcaaccatctgaggaaggaccagcaaggaaagatgaaaataaagtagatgggatgaatgtcccaaaaggccaaactgggacctctagccgtggaccaggagacggagggaacaaagaccactggaaggagtcagataggaaagatggcaaaaaggatcaagactccagatctgcacctgagccaaagaaacctgaggaaaatccagcttagaagttcagttttgcaagcaagtatgctgctctctctgttgatggtgaagatgaaaacgagggagaagattatgccgaatagacctctacatcctgtgctttctcctagtttctctccaccctggaacattcgagagcaaatcaaaacctctatccagacaagacaaaataaaactcaccatctcctgaaaaaaaaaaaaaaaaaaaaaaaaaagg

SEQ ID NO: 5053 - DNA, 2747 bp, Macaca Fascicularis
aaagtatgccgggatggctgtggaggccgcggagtttgtggcgggcggaagctacgccttgttgatcttgccgcatctttactaggtgtcggctgattaggacctgcacgggctacatcagtaggaagattgattaagttcttcctggtggaaaggattccttcctgcttggtgtataaattgagtatgtgatccctcaatttgtagcgagaagataacatctctaacatcattgacttcttctgcatatctaacagaagctctaagaagaatggaagagataacagaacacatctggaagaacaatctgttacctctggacaagcccagctacaggatccttgggaccgaacacaaatgaaaatgcagaatcccttgttcaaaaattactgaaagtttcaagatggcagcagcagaacattaaaccaagtgggggattcttataggtgcagggcactgtttgactatacatgtctcccacccacgaagctggccctgcctccggctgcgctccccaccttccttcctattctactactgatgtctgccattctgtcttttacacttaaaccctttccctggtaagcttcaattgcccctcagttatcagtcactgtaatctcagtgaatgtgagtcccatggaagctcgcatctgagagcaggtttgatgtatggtaggatagagataaatcagggttgggagaaagatgaaggatggcaggctacaggaggctgacagggtatggcacggggatcttgagtaccttatcaggaaaatgcctttattcagagtaagattcttggaatgacctagtagaagtgcgctgaagaagaaaagcttttatgttttgctcttatgtagattttgtgttgtggtggacctttttagatagagtagatggtggtgggctaagctgctgatgtaggtaagtttggacgtctctatgaatgtgctgaggacttctaaactggaggtattaaggatgaaagaaaccactcctctagcctgcaaatgctagggtcctcttttatgccttaacagattcattagcagtttactcatgctcatgtctagcaactccaaagatggtcctgggaaaagttttcaccctgacttacagtatacctaaccattacctagaagctgaggttggatatttttaatgtgggaaaataagaaggaatctgagctttcatagtaaaacatctgctacccataaacctgtgtggtatacaaatcatgttgctttcatctattaatatatagaaggaaagtgtattagttaacatgaattagtgttgttattgtaatgctgtgtaataaacaaaacatctgtgtagtatacaacagtaagcatttattcaccttatactctggagttcccctcatctagtctggtcatggcagggcttgctcatgtatctgtcagctaggcagctctgctgttcttggctgggcttgcttccatgactgtgtgccagcaggctgttggttgatctagtcattcttgcaaaattggatgacttggtttcactccatgtgtcttatgtcctccagtaggtcaaactggacatgttttcatgacaatggcagtgggcaataggtaggcagagacatataaataaaatttcaggcttctgcttgcatcacgtctgataacattggcttgagcaagttgcaaaaccatccaagaacaggagagctttccaaattcaaaaggtaaggaagtggaccctgcctttttaggggtcagaactgcaaaggcatgtggcaaaagatatgggtaaagggaggaaggaaggattggagtcatttatgtcatccatttgctatagtctgtcaaaagctctgctaagacttgatgtttagattacaaggatatgctaagtttttgttcctttatatcattaaataaagctgaatcaccagaaaaatcttacacctatatatcagttttcaatgtattgtctttcagctccaactaccattctgcatactgctttgtgatactggagctgaacctggtaaagattttttctccagctggcttgatgctaagctttatcaacagagggtgctagagggacattgttgaggggatgatggcaggagggtgcttcccttccaggttccagtcctcattccttgttattctttgtgaaagtcagtagatcagtgtgcagatggcctagtggagctgaccatcaaggccaactcctccctctcacctagggcctgttttactggcagctctgggcatacccttagggagctgtcttcctacctgactggaccacttttatagttcagatcagatctgttgcctctgatgtttcttcccctctgacgggaagtggtagccctaccctcttaaaaatccttggttcttcattgcctgtaccccttcagcctaataattctttttctgtaagtgctatttctgaatcccttagagcaggagttggtaaactataactagtggacaaaataaggggatatcgttctatacttatcaaactagctaaatattcagacttatgacaacacttaattatgggaaggttgtggggaagcaaatatcctaataaaatgttacaaggagtatactatcttttgggaggtcaatataaaatatgtaacatgtaattatatatacgatatgcaataaaacatttaaaatgtgcatattcttcttagctcagcaattaaaaaaataattaaaaggaaaaaaaaaaaaaaaaaaaa

SEQ ID NO: 5054 - DNA, 218 bp, Macaca Fascicularis
ggacatgaagataaattagggaaagccccaccaaccccgccccccaatccgttttcctcccatggcaatgactttaggcgcctgtaagaggcacaaaagcagcaaagcttcttctaccactttttctggtaggacttcagttgggtgggaattatgctccagcgtgaggagggggccttttaaggaaagtcatgctgggtaaactgtgcaatgttaca

SEQ ID NO: 5055 - DNA, 440 bp, Macaca Fascicularis
cagtgcagtgtccagactgcgtatttcagtttttccacaatgtggatagtacatatgaggattatttaagaaaattaaagacttactttgttttttctggagacggagttttgctcttgttgcccaggctggatggagtgcaatggcacgatttcagctcagtgcaacctccgcgtggtgggttcaagtgattctccttgaaatttgtactagccctggtgaagttctgtgctttaaaaaaaaagaaaaagaaaaagttcagctataaagcatttgcttacagcaaggggagccgtgttatattcaatttaaacaagcaaaaaaaaagttttttgggagtctctccgtttatggtgaaaaggcagattttgtgtcttagtttcgaacaccaaacggtaagatggaggttatgtaacagagaagcctgtttgttgtgtggg

SEQ ID NO: 5056 - DNA, 2241 bp, Macaca Fascicularis
  misc_feature (1)...(2241): n = A,T,C or G
ggagcaaaaccagaaaggttgagaaggcagaataatgacttttcgtctctggaaggcatccatgttcaacagtctgtcaggaagagagacaggtggggctggctcgccacctggggtgagggctgctgcagggcttttattaaaattattgcacaggagtggagaagataaacactcagtgggtgcagtggaacagccggcccatatgtctggccagaactaagatctttctctaaaataaacctacttaaggtagcaccattttttttttttccaaaaaaatcttgtatactagtcaaacagatcccaggtttataaatacattttatatgcctctatgtcttcagtaccaatgtctggaatttattatctggctttatcattgcttgaggtataataggggaaggagaatataaattaaaattgagaatatcatcacaaggacaaggaggatattgatgtaagtgtctctgtgcatttcacactgtgtcccctgtagaccctcagagttagaaggtggaaccctctggtatatggtaaatcgaggcctagagaggcagtgtcactcatttaagattacacagctagtaatgtcagagacaaaattggaaccaaagtgttccgattcttagtcatttggtctttgtaactagagaacaaagctttgtacttgtattagttttacatagctgccataacaaataaccatgaatcaagtggctcaaaacaactcacatttatccttttactgttctggagctcagagtctgcagtcattctcactgggctaaagtcaaggtgtcagcagggctgcttgctcccagaggctccagggaagaatccatgtctgtgccttttccggcttccagaggccctgtgcaatcgttggttaatgatcccttcctcatatccctccaacttcttgcttttatcatcccacctcctgactctggccctcctgctgccctcttccaactacccttgtgatgacattggccactgccagctaatccaggataatctcccacctccagatgcttcatttagtcacatctgcacagttcctctcatcatgtagggcgacatattcacaggtttcagggagcaagatgtggacatctttggaggccattattctgctcgccacatccctctaccttgtattagcgcctctcccgttctctgaaaacaaacaatatagaaggcagaagagatttctgcatactaaaccatgtagtaacatttatgtaacattggggccattctcttcacttggcacagcacctttgccactcagtctccctgacctctggatgagtaggagggccagtatccccactattttacagattagtaaaagcaaaacacttaagattttggttcagttagagactgtggttcagttagagttcttaaagcatacctgcttgtaccaagtagtatttagtagtactcagtgtttataatagtatttcaaagtcctttggttcttaactcttttattagggttcagacaggaggttgcatttgtttcttcaattttttttgttttatccttgtggcgagagataagagaacacttgcctaatatctacttgtttgttcgacttcttgtccctcggctgtgacaaaaggcagagtgtgtggtaatgaaaacttattcacaatcttaaatatgatgtaagtggctgaattggaaagggagttgcccattaccaaaggcactggaggggagaaggcctgattagtgctggaaggtcgccagcctggagagttcagacacgtctgtgctactcacagacagtgcaaactcatcgctcttggaatttaattcttgggaaatgattgaaagagggagtaaaaatatttacaacttatatgaactttaccaatctccaaatattctgaacacttggcattatattttattaaaaataaacggccannnnnnnnnnnnnnnnnnnnnnnnnnnnnnnnnnnnnnnnnnnnnnnnnnnnnnnnnnnnnnnnnnnnnnnnnnnnnnnnnnnnnnnnnnnnnnnnnnnnnnnnnnnnnnnnnnnnnnnnnnnnnnnnnnnnnnnnnnnnnnnnnnnnnnnnnnnnnnnnnnnnnnnnnnnnnnnnnnnnnnnnnnnnnnnnnnnnnnnnnnnnnnnnggaggttgcagtgagttgagatggcaccactgtactccaggctgggcaacaagagcaaattacctctaaaaaaaaaaaaaaaaaaaaa

SEQ ID NO: 5057 - DNA, 745 bp, Macaca Fascicularis
cccagaatgtttatgtgtatgtgtttatgtagagcatatatatttcaagctgaatgttcagaaagaataaggtgagttttttggtggcttgaataagaattagatcataaaaattataaataatggccttctcagacagaaaaagaggataaatgattcatttttcactcatgtattaataataagacttgttgcataatacacaagctggtcattgcctgcaagaaagttattgaattaagcggctatccaggtttatgtctgagtccatttttaatccaatatggttaggattgaactccatatgcagagggtttctattcacagctacattcaaacagaatccaaaacccacatcagaactgacttgatctcttgtatggtagaactcaaagcaagctgtgtgctctatgcaatggtcttcatttgggaattaatgttcactgatcaactgcagcagtttatatctgtcatgttttaatccactgcatgaggaagtgctaataactgtattaaatatttccaagcatagctacaaaattacatgtttgcttaacacctttctatgatagaggaagtatatactatggttgtcttcttgtagtatgtcttttaattttgttcaatgtgttatcaactgttttaaggaatggggattgacatgtgtgtgcaaactgatatgtacataactcctgaggcaacagaagtgcccggtcatatggtgtaaaaatgtaaatacaggaaa

SEQ ID NO: 5058 - DNA, 561 bp, Macaca Fascicularis
  misc_feature (1)...(561): n = A,T,C or G
tgcctagacatccannnnnagagcaacactggccccacagtaaaagagggagtcttgtacctcagnnnnnnnnnnnnnnnnnnnnnnnnnnnnnnnnnnnnnnnggtattgcggatgacccttagaatccgttttctggtcttctgaagtaccaagggcaggtgttacctccnnnnnnnnnnnnnnnnnntctgtgctctacaacnnnnnnnnnnnnnnnaagggtttagaggctccccttggctcccagaccatatccagtgtnnnnnnnnnnnnnnnnnnnnnnnnnnnnnccaagcaccttacctctcccatccaagatgaccctctgagcttttcatttattcaaactctgtgatacagcctttttaaaaaaaattannnnnnnnnnnnnnnnnnnnnnnnnnnnnnnnnnnnnnnnnnnnnnnnnnnnnnnnnnnnncctcctggttttcttttgttacaaccacccttgccnnnnnnnnnnnnnnnnnnnnnnnnnnnnnnnnnnnnnnnnnnnnnnnnnnnnnnnnnnnnnnccatgacatttctagcatatcc

SEQ ID NO: 5059 - DNA, 691 bp, Macaca Fascicularis
  misc_feature (1)...(691): n = A,T,C or G
aaaccacaaacagagtggattgggctgcaggctctatgnnnnntgttataccaaactgtctacatgtgccaccaacacaaaaccaagccttggctagttgtcttctctcttcaatctctggaaaaataagtgcatatagttgataacccctcttagcttacaggaagctttttgtattaatcacctttnnnnnnnnnnnnnnnnnnacctcaacctgggtcaaagtggtannnnnnnnnnngcagtatgatggcaggagaagcagcctggggcnnggggatataaccatgctgtacccttcagatctggaaacagagccacaggcccctcttctgggtttgtgctctgaatgggagccagaattcactaggaggtcatcaaccaatggtcctcaccagcctcttctgaagatggaaggccttttgcccattgaggtagaggggaaggaaatctcttcttttgtacccaatacctgtgttgtattgtnnnnnnnnnnnnnaaaacnnnnnnnnnnnnnnnactttgcccagggtcctgtgcctgggtggggatgcaggcagccttgaccacggctgtttccctcacccaaaagaattatcatcccaacagccaagacnnnnnnnnnnctgnannntgcatcgatcagaaagagttctgtcaccaagctggccactatcacatatgcttactc

SEQ ID NO: 5060 - DNA, 2920 bp, Macaca Fascicularis
  misc_feature (1)...(2920): n = A,T,C or G
cagccatttactactccgggaacaattgtcaagtctaggcctatgctgaggattgagcttggcataagcagagaaactctagtaggggaaagagaaagcagtggaacacttgaatgtgggctggtaggactaattgaaatctagaagagccccagatacatggctggttttcaatgtgagacattcattgaatgtttgtaggggagggggtatggtgtgctgagaggctggaccagaaaaatcccacaggaatatcccacagtcttatttgggagtaaattcttaagagagagttccgctaggatgaggtccttactacagacacacctcaatcttgttcttgagacatttgaaactagagtaagactatgtctaactaaagatgccattacactccatcctgggtgacagagtaaaaccctgtctaaaataaaataaaataataaaatgtctagagtgcccctcagcaggtttacgagaagcaaaaccaaagcagtcacattatcttcaaaacaacttggtttattattattttttaatcccaggtcttgctggattcctgtagctttgcccaatagagggctgtgtgctgtgccgttcagttttctgtggcatgagaatccttttgtgatatttagatggggtcttctccatggacacagaacttcatagattcatatggtcccttatatccattttcttcccatctctctcatctaccttccttctctttcttcattataagtattataatgtaagaagtgaaggcttctggttcaggctaacactaaactgttcttaggagattttcatcaaattaggggatgtctcaagtatattacagttctatcagaaaatccttttacctttagagagtttggaaatgaatgtaaatttacagaattttacattgaatggctttttctacccatctcttcttactactctaaatatagactaagaagttgcttagctcaccaccctctacccataaatgtaaatctaaaaacagatttagtcgaattttaaaaatgcatatttcagcgacaaaatgttgaggtctagatgtgtaatttggggaatacttgattaaagtccccacacattggtgctgactacttcaatagcctagaactgattgtagttctatagctcttagtgagggacagcaagaaagtcaattatgtcaacatttgttcactgtgcacaaaatctaatctttaagtcatattctgttctttttgtggagaccttcctacttgaatcggaggctctatgtttcttatattcaattgtaaaaaactctgcagctttagaaaatgatatcccataccccttctttgcaatatctaaacttgatgactttcataccaaaattttttagatttttagtgtttttgccttcctaactggaatatacattttgccaagtgtcttgctcaagtagaatatgctgtttactactatgatgatttcgtgctatgtgtaggcccagtagtttgattaaacttggggaaaaaagaattctatatcccttttagtagtggaaatccaactgcttattgttgttgttattgtatgtgtgtggatgtgtttgtttgggggagtattctgtgcctttctataagcaaatattgattgaatgcatttatcattctgatccttaagataattattcatataagttacaatcattctcagctatggtattagattttttcagctgatcatggcacggacgtgaagtagtctcagcatgctaatctcagtgcattttagaggcagggaaggaaggctatacctcatactctactaggaaatttcagattcaaatatacatctagaagaaagcagatctaactggggattacagaggctaacatagtggctgctgagtacctgataacagatccatcactgtctccctgtacccaccctgtaaccacaacacaattcacatcttacatgcctacacagcatgttttgtacacacacttcactgtctcataatactgcagggagtgaggtgagacaaatggaagtgttcccagtccttgaagttggggcaaatgtagcatcaacgtgactataatctttacatggaattcagtgatgtgaagccccccacctgcatctaagtcttgtagctaataagcagcagcttcttccaattctcctctcatagccttgctcacatctcttaagttcttctagatccttaagccaagtaacagataattctagcttcttattcataataaaggtgtagactctttccctatagtagtagtagaagtaatttccatttgacgttcccgtgccacacttggtttgtcagagaactaagtgtaatgtgaaatttgtccttccttagaagaagcagtgttagttttttatgtttcttctttttctttcctgagctccaaatacttctgtctaaatgtcattatttcaaaagtcaagtcctacttctcttaattctttccagatatcccaccaaccttgcttgattaggacataaggagtctcaaatatatttaagtgaataaaaaaaattgagggccttagtagccaacattgcctacatttttaaaaagccttaactaagctgggcatggtggctcacaactgtaatcccagaactttgggaggccaaggcgggcagatcacaaggtcagnnnnnnnnnnnnnnnnnnnnnnnnnnnnnnnnnnnnnnnnnnnnnnnnnnnnnnnnnnnnnnnnnnnnnnnnnnnnnnnnnnnnnnnnnnnnnnnnnnnnnnnnnnnnnnnnnnnnnnnnnnnnnnnnnnnnnnnnnnnnnnnnnnnnnnnnnnnnnnnnnnnnnnnnnnnnnnnnnnnnnnnnnnnnnnnnnnnnnnnnnnnnnnnncaaaaaaataaattagaaaaaaaaaaaaaaaaaa

SEQ ID NO: 5061 - DNA, 448 bp, Macaca Fascicularis
cagacagccctgagatcacctaaaaagctgctaccaagacagccaagatcctaccaaaatgaagcgcttcctcttcctcttactcaccatcagcctcctggttatggtacagatacaaactggagtcaccagccaaaacgccaccagccaaagcagcccctcagcatccagcaacttgagtggaggcggtttccttttcttcgtggccaatgccataatccacctcttctacttcagttgaggtgacacgtctcagccttagccctgtgccccctgaaacagctgccaccatcactcgcaagagaatcccctccatccttgggaggggttgatgccagacatcaccaggttgtagaatttgacaggcagtgccatggtggcaacagccaaaataggggggtaatgatgtaggggccaagtactgcccagctgggggtcaataaagtta

SEQ ID NO: 5062 - DNA, 723 bp, Macaca Fascicularis
  misc_feature (1)...(723): n = A,T,C or G
ttagagacagggtgtgcatgttggggaccattcagnaaatccatctaccgcagtattcacattcccccaactgcgaaatgcattcaccctctcccctaaggtttccgaatttcatgtcattaaagcattagttcaacatgaaaaatgtcatgtagaacatatcagatgaaaagtttaaaatcccatttaaaacatccacaccaggtgtggatgaggcttctgagggtgtccgttaagtacagatccttgatataattccctttcctccgttgacctgtgaaacggaacgaacagcttatcttcccctaatgtgaaatgacgggacagacatggaataacaactacagtgattctagttcaaaatgagggaacaaggaagggataaagaagtcactgacccacaatagtttggaaatggagctgggcaaaatccagcaggagttttttaattaggatccacagcctgggaccgacccgctgtcctgtgagtctttgcctctgggctctctgctctgcatttcttgagaccatgattgttcatctcttttctcaagagattgttcatactcttttgtgtatggctcctattgcactcaaaatgtttttgagattcatccatgttgttttgtgtgtcaacagtttgttcctttaggctttccatggaatgaatgtatcaccatttattaatccattcttgtattgacagatgcttgaatgtttcca

SEQ ID NO: 5063 - DNA, 726 bp, Macaca Fascicularis
  misc_feature (1)...(726): n = A,T,C or G
cctgcagagagcannnagagtnatnnnnnanngccctggtccacccttccactgtgcaccatctggctcggttgccaagtcagggagcagggcaggccgcaggaactcccaaaccttggctttgaatgctgctgtggaggtgtgctcatccctttctggacgtgggaggtacctgtcccagcaggtcagatgaggccagctgaggtgctcccccaggcagaagggccagcctccgctatggcctagggttgggaggagaggcctccgtgagcagcccctcctctgccgccctcccaacctggtccctctcccccagccttggcagcctcccatgacccaaacgctggcattcacaagcaacccaaggggcaggtgaagaagcgcagccctgccagacacgcgctagattcctccaaggtctctgagatgcaccgttttttgaaaaggcgtggggtgaactgattttgatcttcttgtctagatgcaataaataaatctgaagcatttaatgtagtcatcttgacattgggcatacactgtacgagttccttatgtttccttgaactaaaaatatgtaaataatttttgtctcagtgaggaccgagggttggaaaacctctatgccgctgagcctcgggaccgctctagggaagtacctcctttcgccagcgtgactcatgcttcatgggtactgaacacgagggtggaaatgaaaactggaacttc

SEQ ID NO: 5064 - DNA, 921 bp, Macaca Fascicularis
  misc_feature (1)...(921): n = A,T,C or G
gacatcgtggctgcccagttgggccgtgagctgcggcacccaggactagcgctggcccctcagaaggatctaggagaggggcttgggagctcacttttaatttctcacccccattttacaaagagtgcttagattctcacaaattgtgttgtaagttatccatttggctttatcctaactagtcttaccaaacttagagggaaacctgtgctctattaccacacatgggcaaatcagcattgtaagctttctcaggttattattagagaggttggaaacattggtaaactctgttaactgagaaggaaaagaaaaatcccattgaactactgcaacaaatcagaaatccacataagagtgctctcctgcctgggcagcagcaaccaagaacaaagcccggggactgttttccttttaataaagccacaggcgggcatcgcagctccacagcccgaggggacacaggatggaaaccccagggtgagaagggagcggggagagttccagaaaggggatgaaatagtattaaaaagctgcgttggtaagcttttcgtggaaccaagatttgacgnnnnnnnnnnnnnnnnnnnnnnnnnnnnnnnnnnnnnnnnnnnnnnnnnnnnnnnnnnnnnnnnntctttttttggtgttttgcttttctgtaaggtttaagcatctagggagaagggaaaaagggcctcactttagaatgaatgactcattccttcttatgttgttttttttttgcccttgcaccagagtatgaaatnnnnnnnnnnnnnnnnnnnnnnnnnnnnnnnnnnnnnnnnnnnnnnnnnnnnnnnnnnnnnnnacactcagaatctaaattggacttctgttgtattctcaccactcaatttgttttttannnnnnnnnnnnnnnnatttcagagtcttcca

SEQ ID NO: 5065 - DNA, 733 bp, Macaca Fascicularis
  misc_feature (1)...(733): n = A,T,C or G
accgtctgtgcnnnnnnnnnnnnnnnnnnnnnnnnnnnnnnnnnnnnagaggcccagtgctgacagtcacacgactctcactgtacttgaatgatgggactgtgggtgcaactagaaaatatgttaattcttagccattcccactttgcctctccattcaaaaccccagctgcgagctgtttgtttccctgcctggaaatgatgttttaggcaggttcttaatttctcatgtctgtctcagataataaaaagctcttcatatgagcctcagaactgtctcttcagtgaatgaaattaccagtcattatatgaagggacttcaaaagatttgtggaaatattgaagtaaaacataaaaaataaaaactttatttcttggttgggcacagtggcttatgtttgtaatcccagtactttgggaggctgannnnggaggactgcttgagaccaggagttcaagaaattagccaggtatagtagtgcatgcctgtnnncccaannncttgnnaggcatatgcaggaggatcacttgaccccnnnnnnnnnnnnnnnnnnnnnnnnnnnnnnnnnnnnnnnnnnnnnnnnnnnnnnnnnnnnnnnnnntcctgtctcttaaaaccaccaacaacgacaacaacaaagcaacatttttatttctcaatgtaagctccatcaaggtcaagatacttttgtaagctgtgacaccagccatttagtccatnnntnaagaactg

SEQ ID NO: 5066 - DNA, 285 bp, Macaca Fascicularis
  misc_feature (1)...(285): n = A,T,C or G
gagnnnctgccccctccctccaccagacactccttccaggcctaagccccagcccctctccaggccttccttccccagctgtgtcttggtcttcaatcccagaacaggacctgtgagcaggtcacctgtgcattggcctggagctggagagtaaggctataggatctttggaatctcttggttcctgggagttcctcagagatcatacctccccagagggaagcaggaatgaggccaaaaagtgtgcattggataggggaacagcaggcagggctttggggacgc

SEQ ID NO: 5067 - DNA, 763 bp, Macaca Fascicularis
  misc_feature (1)...(763): n = A,T,C or G
actgaacacataaaantannnngctgnnnacagtgtaaacctaggaatattaagacttgtcacacagtaaacctgatacatcagaggtgaataccagcacctattaaattccattttgctgttttcaggaatgtaagaacacacacatattggctactggaaatcccagaagtccggttttcatttattccaggaggggcatcctcgacatcttatgtagacgatcaacaacttcaaaatttagtctgggccaagtgcagtggctcacacctataatcccaacactgggaggccaggagtttgagaccagcctgggaaacatatgtctctacaagaaaatacaaaaattagctgggcttagtggtacatgcctgtgtttctagctatgcaggaagattgcttgagcccatgaggttgaggctgcagtgagctgtgattgtgccactgatctccagcctgggggacagagcaagactgtctcaaaaaaaattttagtctgaagcacaactgtgctgaatctgtctgactaactcttgaccacacagaaccagggtttgcccctgtagtccccatggtaagaaagttgtacggcatattccaacaagtattggtttgtctggtatctttagagctttactctgttgatgtgattgattctcggctgaacattatgtctgttgtaactctgataagcattccacttttgttatttattagtggtatcttttttttttacgtgttaaatcttgtgattgtaaaataa

SEQ ID NO: 5068 - DNA, 679 bp, Macaca Fascicularis
  misc_feature (1)...(679): n = A,T,C or G
acgtgtcagggnnnnnncncnncttacagcctttgggcccctgggcccctgccctgnnnaagccctgcactggccagacacaggtaggtgccaagggaggccttgcctctgggcactgtagggggcagccccctgccttgtgacctccctccgtgccctgtgacctccttcagctggtattgagggtctggccaccacggaggggagaaggaagaagaggaggcccgagtggctgttctgggaccatggaggcctgggtcacagatacaggtaccagcagtcctgcccatacttccgtccatgctggtctccagccagtgccacttggagtcccctgcaccgtgccactgtccatccccacaccgttgcctgctcctcccatgaggcttcagcctcccctgaccatctgctcacgtagcctctgactgggcccatagtggtgcaggaggaaggaccgggaaccctgcgtggctttgggcaagctgnnnnnnnnnnnnnnnnnncagtttccccaactgtgaaatggggccagtccccatgccctgctgtcctcctcacaggactgttgagaggctcgcagggggacagggtgaatccctctctccgggagaggtatgggagggaagtcgccactcatctcacagcccactgcagccctccaggcccccgcctgagtccc

SEQ ID NO: 5069 - DNA, 705 bp, Macaca Fascicularis
  misc_feature (1)...(705): n = A,T,C or G
agaccagagtcactgtcnnnnntcagggactannnnnnnnnnggaataggagattctcccaggtgcctgtgtccaggctggtgtctgggtcctgtgcacccttccccaccccaggtgtcctgtccattctcaggagggccacatgcgtgctgctggagtgtcccataagagatgcaaagtgcctgaattttctgactcttcacgtcagactcacccccaagacacatgtgacccacgattccatctctgactataaggccaccctgagtcgtcttctcagcccaccnnnnnnnnnnnnnnatcgttgctggcctggtttctccttggagctgtagtcactggagctggggtcgctgctgtgatgtggaggaagaagagctcaagtgccaaagggatagaaacagagtgatctactctcaagctgcaatgtgagacaactgccttgtgtgggactgaaaggcaagatttgttcacgccttccctttgtgacttcaagaatcctgactttctttctgcaaatgcacctgaatgtgtctgtattcctgtaggcataatgtgaggaggtggggagcccaacccacccccgtgtccactatgaccctcttcccacgctgacctgtgctccctccccaatcatctttcctcctccagagaggtggggctgaaatgtctccatctctgtctcaactttatatgcactgagct

SEQ ID NO: 5070 - DNA, 724 bp, Macaca Fascicularis
actaaatgatatggttgaccaatatttatgctcagttttttaaaaatagtctctacaacaaattgtcacttgttgggtacaattaagtgctcattgtataagtgcacatggtacaaatcaacaccagcttataggattgcggaaagaattaagagattaatttagtgatcttatgtaccctgtcggtcatattgtggaagagctctacaaaacttactgtactgttaactccaagattttcttccagtaacaggaatgctagccagatgtttaataatcaaagaccaaaaatggcagtttaatttttctacccaatatcctatggcatatgaatgatctaaatttgaagctccaaggataggaaaaagcttacatgtgcctgtcctagacaagtactagagtttatattgaaatcaaaacttctaaaaataaaaatcagtaagattaattttactcatttttctaccatgagtcagtatgcttgaatttttcattgtatttgataatgtcatgtaaatttactgtaaaaactaagaaaaaattttaaaatgcattattgattaaatttagggttgcttttcagtatactcagtaactctgaagtcagtgttaacagtactgagcttacataagatttattgaatttacctaacttaggcaaatgttttcaaactgataggcttttggtccgaagtcaaatcaattatttgaaaaagataaatgg

SEQ ID NO: 5071 - DNA, 2873 bp, Macaca Fascicularis
gactgggggcctcgaccgcagctcagccggagggtgtctactcaagtcaaatactgaacagcttcctggcggagaggctgagaattgtatacttgattgctttaaagcatcccaaataagatgatccactccaacacctcccttttacaggttttaaaatattctgataactatgcctgaaaacaagacagtttcctcttcttccactagagatgatcaaaccaatacaggtttaacatgtcaggaagtaaaggctctcagagaaaaggcatggtcaaagacaaatgaaggcaatgccacgtctcagagtttggttctatatggagcctctaaggagaacagtgaaagttttcatgaaagtaaaatgacaaatactgaaggggtgaataaaggcatttactttagctacccatgccgacgtcacagctgtgctgtagtaaacatcccagcaccttgtgtcaacaaaatgatttcacacatccaagatgtggagtccaaaatacaggagcatttgaaaaggtttgaaacttcttttgaagaatggagcagaatttccacaaaagaactgaaagattcaagcagacatagactacatgaatgaacatggccctctactggactctaagcggaatcaggaacttcaagatctgaagaaccattataaaaaaaaaaaggaggtaatggacctacacagaaaagtttgtgaagaacttgaagaagctttagaagcctgtgaaaatgccagactgaaggctcagcaaattaaagaagagatggataaagatattcaccaggatgaaaaaagcatagaggcctacaagagagagatgtatcaacttaccagtctatatgatcattactcttcatcagtgataaatgttaatactaatattgaggagaaggaagaggaagtgactgaagcaataagggaaacaaagtcatcaaaaaatgaattacattctctttcaaaaacgctggaagatttgagaagagtttatgaccaactaatctggaagcaaaaaagtcaggaaaatcagtatcaggaagcagttaatgatttttatgctgcaaaaaaaacatgggatattgagctttctgatgttgcaaaagattattcagctgtttctttggcatgtacaaaactgatggaagacaataaaaaacttgggattgatattaacaaaataacagaacaaatcaatgaaagtataaggaaaaaatcacaatatgaatctgaaataaaatctttgaccatgatgaagttaaagaatgagaaacatctcaagagcctctatagggaggcttatcgcattggtactgttttccacctaaccaaacacaagacagatgaaatggaagataaaatagcagaagtgagaagaaagttcaagggtagagaagaattcctgaaaaaactcactcgaggtgaagtggctgctggaatggtgcttcagaaaaaactgtattccatttacgaagtccaggcacttgagcggaaagagcttttgaaaaatagggcaatatgtgccatatcactggcagaactacaggaacctgtgcttcaactggaagatgaagctgaaagaatcagaactctctatgaagaacattctgctgtacttaataatatacttgatcagaaagatttaattagaagaaaggtggaaaaagtaaagaaaaaattacgaaaaaaggggaagaaaacacttgatgcactaatagcaactgagagtaaacgctcagcaatttttaaagacttagaagcaactaaaagtaaggcaatgattttttatgcaaaaataaatgaattgaatgaggaattaaaagcaaaagaagaagaaaagaaaagttttgatcagatacttgaagtgttaaagaacaaatttgtaactatgagatttaaaagggaacatgcacaagctgtgttcgatcattatatgcaagagaaaaaagactgtgaagagagaatctttgaggaagatcagagatttagagtgctccttgctgtgagacaaaaaactcttcgagatacccaaaaaatagtagctgattcacttgaagaaaatctgcgtttagctcgagagtatcaacagctacagactacattcttaaaggaaaaggacaattatttcactatatatgataaacagctatcacttgatacttcaattagagacaagaaacagctctgtcagctgcagagaaggatgcacaggctgtggcaggagcacttcaaactggtggtcctcttcagccagatgaggctggccaacttccagacagactctcaggagagtattcagaaaatattagctgtgcaggaggaatcttcaaatttaatgcaacatatcttagatttcttccagactttgacagatggcccatgcgaaaacgatggttaagcaaacaaccaatgtatcttggatgccgaaataaaagacaagaaaagtcacacagttcagataacagtgtaattggacattcacctgtttgccatttcacacttccatgaacgaaaaactcactcacctcccagcatgctttgccactcttttacttacagcaaatccataacaatgaaacaggtgactttcatgctgctgtcaggaacgatctaatttcagctctgggtgactgattgcaattggctttgcctcatctgataattaatctatgtcaccattaattggaagagagaataattactggcggtgttgacagtgactgttcgcttccccagatttccccatcgtgttggcccaaataaaggctttgccattcagtacttaaaaaaaaaaaaaaaaaaaaaaaaaaaaaaaaaaaaaaaaaaaaaaaaaaaaaaaaaaaaaaaaaaaaaaaaaaaaaaaaaaaaa

SEQ ID NO: 5072 - DNA, 723 bp, Macaca Fascicularis
ttcccatccagacagtgcttgaagcttggaaagctaaagagcattatagcaagtacttattctgcattttcacaataatctggttagacaggttttatccctgtctccattttacaggcaaggaaatagaggctcagagaggctacgtgacttgcccaagttcccacagccactatctggttgagcaagaactggaattcaggatactaagtgtcaaaagaccacacactgaccctctggtcctacctactccgaggatatcaagagagcttggccatccctgagccatcccccatcctctgtctcctagacagtaaccttcccccatcctccatccattcattatgtcaccctctgtgttccaggccactgtgccaaggatcttcacacaggttttctcaattgaggaggtcgcatttcagctaggtctcaatgggtctggtttgaatttgagcgaatgagaaggtaaccacggagggctgggcgcggtggctcacgcctgtaattccaacactttgggaggccgaggtgggtggatcacttgaggttaggagttcaagaccagtctggccaacatggtgaaaccccttctctactaaaaaaaaaaaatacaaaaattagttgggcctgatggcccatgcttgtaatcccagctacttgggtagctgaggcacgagaatcactgaacccaggaggcaagccaagattgcactactgcactcc

SEQ ID NO: 5073 - DNA, 635 bp, Macaca Fascicularis
  misc_feature (1)...(635): n = A,T,C or G
agaaatgagcaactcannntnnnnngattagacaggatcaattgtaaagtgagggcttctccatgacaccatagttctnnnnnnnnnnnnnnnnnggataagaaattctacacttggatgtctagcttcaccacacagcttaaaaataaaataactgaaatagaattnnnnnnnnnnnnnnnnnnnnnnnnnnnnctgaaacgtactgtactgtaaattatgactcattttaagtgacctttaaaatcagatgtatttattatgcttgtgtaattatagaaataaagaaatgggtgacaggctgaacctcacctatgaatgtacagtatgtggatttgtgaaactgactgtaggaagtcaaaaacttatactgtatcttgtgtttacagttctgatttattcctttgaaaagcctgctgttttggannnnnnnnnntgacatgttgaaatataaataaataccatttttaaatgtttcttaaatgataaagatgtgaccaaacagaagtcctttactctgtaatcaatgagaccaannnnnnnnnnnnnnnnnnnnnnnacatttactgtgacagcagannnnnnnnnnnnnnnnnnnnnnnnnnnnnnnnnnnnnnnnnnnnnnnnnnnnnnna

SEQ ID NO: 5074 - DNA, 722 bp, Macaca Fascicularis
  misc_feature (1)...(722): n = A,T,C or G
aagttagactggttgactaggagactttcaatacaaattaaatattaaacagaggaaacagttgccnnngagttctgtcattgaaacaatggcagagaaacccaaaggaaatgcttattagaaataggaggtttgagaggtcaagactaggtgagagaaattggtggggaggataggtgtatttaatttggagatggtaaggaattgatattctccannnnnnnnnnnnnnnnnnnnnnnnnnnnnnnnnnnaagagtttaaaaattgagtcttgaacagatacatttctgattactcaaggtgcnnnnnnnnnnnnnnntttccccactattttttttacacttataactactccagtctcagaaaaggaatcatatactttgtgcatgagtaataaatttttnnnnnnnnnnnnnnnatacttagatatttacaagtcaaatttgctcttttccatcactgtccgcaaaaagtctttacttgtggcttacaataagtattggccagtgttctcttatcattttactataacaagaaaggaaagattgttttgtatttcaactgttccaactagatttatatcaaatttaacttcacctagattgataccaaacttagtttctttgcagaattaaaacatgtaatcaactggcttattttatcaacaattactcctttctgttttattcccttgctcagagattagcgttacagaaactta

SEQ ID NO: 5075 - DNA, 727 bp, Macaca Fascicularis
  misc_feature (1)...(727): n = A,T,C or G
gagctgggcntnnnaggtctcatnnnnnnnnnnnnnnnnnnnnnnnntccctgtaggtggcctgcggggatcgggcctgctggatgcttgatgtacgactgcttgatgcttgagtgctgtnnnnnnnnnnnnnnnnnnnnnnnnnnnnnnnnnnnnnnnnnnnnnnnnntctttttggaaggtaatttggcataaccatccaaattgaaactgtatacatactacatactatacatatgctaacccagaaattctacttataaagaatttacagtaataataggacagtgtctgtaataaaacattggaaacaacctcaatgtttgaagcattaaataaatcatagtacatccatattcagactatnnnnnnnntagggaaaggtagatcttgctgtggaaatgggatgatgtcaagtatttattaagtgagggagaaacgcaaattacaaaacagtatctctaatnnnnnnnnnnnatatgatttatatatatatataattgnnnnnnnnnnnnnnnnnnnnnnnnnnnnnnnatttnnnnnnnnnnnnnnnnnnatttctctgttcttnnnnnnnnnnnnnnncacctcagttaaagcaagatcagtctgttggccaggagtgnnnnnnnnnnnnnnnnnnnnnnnnnnnnnnnnnnnnnnnagctcgtggatcacctgaggtcaagttctagaccagcctggccaacatggcgaaaccccatct

SEQ ID NO: 5076 - DNA, 737 bp, Macaca Fascicularis
  misc_feature (1)...(737): n = A,T,C or G
acggttttctgcctaagtttattgagtcacaaaggcctccttccctgctgcctgcttcagctgggttgctggggggtgggcgtggatntaggggagggggctgtgatgtaaaacgcctcccctgccaaaggaggggtgaagtggtgtgtcagttcctgtttcttcccacttcctggcacactctgctcctctgtccgggggacacgcgcgtgtgttcgccagggatggggccaccaggttgatgccaacgctccgggtgcctgtcttgtccgtgtggcttctcagatggtggagggtgctgggagctggcagggtccttctagacagtctcagcctctccccaccgcccccaacaggctgtcagtcaaaaccagagaggggctgggggagccagcttcccagcgcgctgtgcccccaggcacccgtgtgacatgcacacgtccagctccgtgacccgtgtctgtgtgtgtgcgcaagtgagtgagagatttcgaacgccctcacccctcgactttgaaatctgagcaaaacaagaaactagggtcttcctctcccccgaccccctccccagctagtcttccctctgttcttcctgcctccagccgcccgcgccagattttgaaatctcggagacaaaactagtactgtaagataaatttttttgtactgtatttattgtgtataacgattttttaaaggagaattctgtacatttagaactcttgtaaataaaaacc

SEQ ID NO: 5077 - DNA, 729 bp, Macaca Fascicularis
  misc_feature (1)...(729): n = A,T,C or G
tggtcctgcctaaattcctacaaatatannnaagtcaaggactcaggctaattcctaagttgatcacattaannnnnnnnnnnnnnnnnnnnnnnnnnnnnnnnnnnnnnngcatgtggagtacctcctgtgacagctgacttgccaggggactccctacagaattctgtgatatacattttacttctgtgtatgtatggtatatatggtatgtataccatgtacacacatgttacattgagtatgaatgactgtggttggaaacccacacacacactcaagtctgtaaatatccttcctcactgaaacctgtgctttggaaatcatttcttgtacagctgtgcagtttcttgtaacagctgaggacaaagctaaggcaggcggacaatttagacaaagatcatctaaagannnnnnnnnnnnnntagcaactcatgaggacagacaaccaagtgacaaggttgactcccaatggnnnnnnnnnnnnnnnnnnnctcctttttgagtttgtgtttcctaagtgtttcttaacttctgagtgcaccaggctgtacccgttagatcctttcaannnnnnnnnnnnnnnnttctctctgacaggatgtttctccatcgagctgtagtgcaggatgggagggaggtgggaatactccttgcctgggctggagtttacagagacactgcacagcttacactcctgttaagtgtaaatattcaacacttccattc

SEQ ID NO: 5078 - DNA, 641 bp, Macaca Fascicularis
tcctcaccttccctgcccctccccccatacctttctaacctcactttctacctctttcaccctctaagacatcttcctgcctcagggcctttgcacagattattctttctgttgagatcattcttctctcagagatccaaatggctctctcatctccttgaaggctttgctcaaaatgccaccttctcattgaggccacaccaactaccctgatttaaaaattccaccccctccacttcttcccccaacatgaccaatcctccttaccctcctctgctttttccatggcattcatacctttctaatacagtatgtaactgatttatttatttagcctatagactgcttcctgccatgtggcagagacaataacactcaccaaatattccatgtgcttcctcacatttgctagtttttttgttgtaggcgaggctgtgtaattagtcctgagagaaagcattgtgagtcacttccaagctgcagtactgacaagcccatgggaagttcttcggtctcactttcctctgccatcacaactgaggaacctcagatgaaacctcttgggcccctgagtcactgcctggaagacaattgccttgtagaatcacaatggattttgtgcaaaagagaaataaataaag

SEQ ID NO: 5079 - DNA, 704 bp, Macaca Fascicularis
  misc_feature (1)...(704): n = A,T,C or G
aagacaataaattgtgagtnnnnnnnnnnacaaaaaaaattacagttagagttttttgaatgtttatattctgattaagctcactttaccttactttttttctaagtgacaattaatcctgatttctaatgtcctaaatattgcttagtgatttgattgtggtaatatcatttcttatctacaatgtctaaacttttatgggatagttttacttttattnnnnnnnnnnnnnnnnnnnnnnnagagcagaaacttttctaagccccacatttggttattgaaggccacagcgaatcttaacctgacaaccttggcaaactgcaccttaggtaattttagactcatataatttgttatttttcaagtaatagtgaataattaatattttcatttggaatatgagaatgattaaatttgtacttttgataggtatcattctttgattagaaaattaagagaatgcatatcttcctttggccgtaaattatcaagggctttctaatggaaatcatatataacatttctaaatataagtcctttcacattctgcatttccagttgtcttgatattgaaaagtgtaataaacttcatgctcacttattggagatttgggaaggttgaaaataaatttcctaatttttatttgtatgtgttctcctctatgtttaactctaggataactatcttnnnnnnnnnnnnnggt

SEQ ID NO: 5080 - DNA, 639 bp, Macaca Fascicularis
  misc_feature (1)...(639): n = A,T,C or G
tgcnnnnnnccctgcctgtgctcgtgccccctctcctcctcggcgctggcggcctccttgcctccctttcacccacgctgccatcctgtggctgtcgtgttggttcttcacacgtgctctgttctcgcggttgctccattcatgtcttcttggagggtgagggtggcttgggaactgacccagtgatcacacctactttctgcatctttctatctccctccttcccagcccacccgggctgcagactctgatgnnnnnnnnnnnnnnnnnnnnnnnttttagaaactaacggactgatttccaaagcagttatcttgggaaactgtttattccagcgatgtgacttttttcagaatatttcttggaatcaccttcagagtctggggctgtgtgttaagcaaccttnnnnnnnnnnnnnnnnnnnntagtgcccagggagtccagcgaatggcatctgtggccaagcgaggtctcaggtacaaagcaaaaggaccatttaaagtaaaatagcttggattcaatcgtgtgacttttannntnnngacatacannnnnnnnnnnnnnnnnnnnnnnnnnnnnnnnnnnccnngcttnnntgtgattttatagcttgactccttggagaacaatattcatttg

SEQ ID NO: 5081 - DNA, 756 bp, Macaca Fascicularis
  misc_feature (1)...(756): n = A,T,C or G
atgatagcacttataattgaatataaaatgcttaataatnnaaacaagtgcacttgnncgtttaatctttgtggtgagtaaattaaaaggagtctattaatttgtttaaaaaattatgtctgcagaatactttatattatttgattacaatgtattatttatggatttttttttcttcttttataatgaatggttcgggtgcgttttgtttactcctaaaaggtttctgtgcgtattttctaaatgtagtatctcggggaaaaggctgggctaaacattcgaaaagcacatattagctgaagagtgtannnnnnnnnnnnnnnnnnnnnnnnnnnntaaacttaaggaaaagattggnnnnnnnnnnnnnnnttaaaggcaatgtccaagttgacaattatttttctatagtccatacaaattaaataatctggcaactctggcannnnnnnnnnnnnnnnnnnnntcattttttaacttgctttcgttttgaaccnnnnnnnnnnnnnnnnnnnnnnnnnnnnnnnnnnnnnnntggctgccgctgtgttccgttatttnnnnnnnnnnnnnnatttatttgtattgccttcgttttgttcnnnnnnnnnnnnnnnnnnnnnnnnnnnnnnnnnnnnnnnnnnnnnnnnnnnnnnnnnnnnnnnnnnnnnnnnnnnnnnnnnnnccttacctatttgaaacaagccctgagaggaagagcagaaaaacctgagtgtaaacaactccagaatgtcg

SEQ ID NO: 5082 - DNA, 734 bp, Macaca Fascicularis
tacacttttaacatgtcacaaaaatacttttgatgttttttcagccatttaaaaatgtaaaaatcatactttgctcatgggccatataaaaagtcagagggctagatttggtccatgggtcataattggccaacccatattctcttaagtgtatttttgtcgtcatcgttacatgaaagtctaccatgcgggcaaagtgttggataggacaagcactctcatgactgctggtgggaatggagattggtatggcctttccagaaagcagtttggcaatttgtggtaagagtattttttaaaaggtcctgtttttgagccagtaattctgggtgtctgtcctgaagaaagaatttgatgcctgcagagagattagtgcataaagtcattaatcccccttatgcttttatcagcagtcctgtcagatgcaaaaaaatgtatctaagaggtgtgaaaggaaactcaccaaagtgttgcctcaaaggatgcaggtcccagcgttacaaggcagaacatggtgtaatcaaaggaaaagcaattgatgggcagttagcctgaccccacggctacgtactttcctcattaaacagatcatatctggttctttgcagaaaaagcaaagttcagaggctatgaccctgttttcctacagaaccagcgtggagtcccgcctgtatcactgaggacaggagacactgtgcccttactgctctcccattttctcttgcagacattgt

SEQ ID NO: 5083 - DNA, 169 bp, Macaca Fascicularis
atatacctttacagtgtatgataagatcgctaatgaattccaaccaaacatctctggctgagcaactcaggctgcgaggggccactcatggtggtctacagcttgattggcagtttcatcaaaaggaaatttgctgccatgaaaaaagacattcttaatctgggatcac

SEQ ID NO: 5084 - DNA, 2007 bp, Macaca Fascicularis
  misc_feature (1)...(2007): n = A,T,C or G
aagaggtgagtaaacaaagaatccaggaggccagggaaggaatggaattggtctcctctgtgtctgcagtagtaattagagtaggatgtgggggtcccttcctggaactattgctcttgagtgcccagggaaccatactgaaggattagtagacatgcttcgagtcagtgtcccttaaacaaggaaaggctacccacccaaaaggtaaagaagaagcagatacacaattatctccatggccgagggcctggggcacctcctccagtgcaccctgtgcaaaggagccttcccaagtcatgccctgtcctagagatctgcagggcttagggctgagcaagagagagcaccaatatcagactgtgcaggaggacaggaagaagaaagggtgatggatggagggctggggaagggcagggctgggggggggcattttcttcccctttctgtggagggcgggactcagtgctgggagggagctgcgatgtgtaggaagaacagcatacctcttgggggctagaggcaggtccctcttcctcttggattctggagctctcttcactgactgcatcacctggtgtttgggaagatttacatagccatatatatatgactttccctgcattcactgcgcatgaaaaagcacatgaaagaaacattttttttttgatcctactcatttcttttgcttagtctagttggcttggccctgctgaattcatagaaataattacctgccctgaggcaatggctaacagcagaggctactgaatccatcccttcactatttgtcaactgagtgaccttaggtaagttacaaaatgtctcagaggctgtttcctgacttctcaaaatggggattaaatgaggtaatatgtgcaaagcacttagtacagggcctgacatataacaagcagcaagcaggggaaatccttaaagctatttggatttgggagctgaaggagactttattcattagttgtggctgaagaaaatgagactctcagaaatgaagtgatgtgcccagttgggactagaagccttggctcctgctttgctgaccagggccccttccacctcctcctccctcccagaagtccctagtttctatggaactctcaggcacacaccaacaaccgtagcttcggaaggcactaaccagacaccatgaccagtgaacctcttcccaggtccttttaatcccctcccacttccacctgtggactggcaacctggcggctgtgtcctgacaattcagctgaaggagagggagctggttctggggaggaacatggcgtgtcgggggtggctttgcctgctattccaggtttccattctggatccagctggggcgggtggtgacagcaggtcgggtctagcgtggttggaggcagatatcccttcttcactcaaccttcccactccttcacagctgcgaggccaaggaggagaggtaggtcaggaattcttttttatggttgtcaccctcttttgagaagaagccttactgttccctgaggataccccaagaaagacttgagctctaagaataaaacattccaaaggagtcttttctgagcactctagacctgtgttgggcccctccacaaccatacctgcctttttgtaacttttgttttctttggctcttctaccaaaatgntactccttttacctgtgtttaaatcgactgtgggcatcttgagcacaaatggaagaatgtgaagccgaggaaatgaggctaaccttgggaaacatggtgaggggagccatttttaagccggggcttgggcatctggagtttaaggcttgtgcccctggggcagaatctggctagaacagtgatcactgaagccttgctcatatcctgtccacttctatgaactggatggatgatggcagggagagcgaatgtgcagaactgaattaccattattatgtgaaaccttggtcatctcatgtcctagaagaaaaagatagtcaaagcagtggaagacttcagaaaaaaaa

SEQ ID NO: 5085 - DNA, 115 bp, Macaca Fascicularis
agaggaggggaaatgcccctcttatatgccagtatgggggggacacttcagtccattgaccccagatagaatataactccacgcttttatagatctcaggggcccggggcggtgg

SEQ ID NO: 5086 - DNA, 474 bp, Macaca Fascicularis
  misc_feature (1)...(474): n = A,T,C or G
agtgcagtggtacaatctcaactcactgcagcctcaacctccntgggtnnnnnnnnnnnnnnnnnnnnnnnnnnnnnnnnnnnnnnnnnnnnnnnnnnnnnnnnnnnnnnnnnnnnnnnnnnnnnnnnnnnnnnnnnnnnnnnnnnnnnnnnnnnnnnnnnnnnnnnnnnnnnnnnnnnnnnnnnnnnnnnnnnnnnnnnnnnnnnnnnnnnnnnnnnnnnnnnnnnnnnnnnnnnnnnnnncatgcccagtcttaggtcaatttttaaaacaacagcaagatttttttttacattgtttctgccatgttttaggaattgcttttcctcccagggcttgtatgtttaaagttttactctcaaaacatgtaagggatgtgctgcatttcaggatcctgggtctctgtctgtgaaggactttccgtctgtgagtctttcctcttgcagcttaaaatgggattattttcactttatt

SEQ ID NO: 5087 - DNA, 703 bp, Macaca Fascicularis
  misc_feature (1)...(703): n = A,T,C or G
ttcaaagtgcacgagattcagtcatgaatttattcagtgccatgtctgtataaactctaagagttcctttatatcatattcttcagagccaacatttgtcctcaaagcaacgcttcccacctccttttacagagtactgaaaaagttttagcaaagtcacagattaggttgaatttcaaaatatatgtactttaaaaagttctgatttccaaatataattaagtatatactttaggaagttaccaataacttccatcaaagcagagtaggatatatggtaacattaattttctgtcattttaaatgagatatatttcttattagggaaattaaagtccctatgcttttatttttttccttattaacagagtattaatcttctaaaaaataacccagcagtaaataataaagaaattactgaatgagaggataatgaatctgtgaatcatagcaggaatttgcaatattaattatgattagctatttttctctcattgatttttgtgccacttgaatggaacagaagcatgccttttgttttgaaaggtctggggtaaaatgctgtgactgtttactgcaattgcattgtgtgttgcctgagactgctttcaaacactagagggggcctctgatttagagaaacaaaaagggcttttctaaaatggatgtgtattttattttcccnnnntgtaaagctcttttg

SEQ ID NO: 5088 - DNA, 1153 bp, Macaca Fascicularis
  misc_feature (1)...(1153): n = A,T,C or G
atatatatatatatatatnnnnntgtgtgtatatatatatatattccatcattagaagatggaaactattataccannnggtatgtgcagtcaaatatccaaaagggggaagtactgcttcaagaaatatctgtaagcattaaattctctcctttatttgtacattttatatagataaatttttaaagtactaattaggcattaacttttttcaaatgcacaggtttgttggtttttttatacactttaattgattttctcaagcgtgctaggtagaaacaggcagaattccacatcttcccactctcagctctgagcatgtgcaaggctgtgtaggacccagtttctctgtatatactattccagttcccagtcatctatgtagaaagtgcactgtgctgccctcgccctacattttcagctgtgtcattgcttcctggttggggtggggacggggtgggtcgggagggaggtatattgggaggagggtgggtcaaggcagaaggagaagctgttgaaatgagggccgtgaattcagtttatgttggtttgcggttgtgtttggttttgtttctttaaaaaaaattcaatcgggcagctcccttttccacaagcctctttgtgactgtagaactattgtagaaaaaaatgttcttttctatattataaaagaaattatccaacacagtaatattggtacctgtcattttttcacttctgtttaaaaaaaatgtatttttagcaagataacttgggtaatcttctaaaaaataaatttaaaaactcnnnnnnnnnnactttgatgcctttnnnnnnnnnnnnnnnntcatttcattccatctttaaaattttttatctttgttgtagaatattaaaaactattttaagaaagataaaaattctctttaaagagatctctagcgtgtgtgaatagagctccagatgcctctaaaagccgcatgtacaaaggaagccacgtctatcctgtctgtttatatttgcttttcctgttttgtaacctctttgtactttgttcctggtgacttgtaagctaaggggaaggggtgcctagatgcctttgtatctctccatgtcacgcgctcctgggccagccggcctcccttcctctccttgtatgtaatatctttttttc

SEQ ID NO: 5089 - DNA, 742 bp, Macaca Fascicularis
  misc_feature (1)...(742): n = A,T,C or G
ttcatgaagtacactgtattcccctnnnntccacaggggtgggagctgctattgttctagcccctgaaattcaactcaggagctgaacaccttggtgtatgggaggcactaatgggaagcctcaaccctggaatccaaatgccaggactaatagctgttgggcccaagatctcccaaggtcgaggcccagccttttgtgtagctgcaagcagcccaaagagaaagccatggnnnnnnnnnnnnnnnnnnncctggaatttgggcatggagggtgatgctttggttttgatgcttctgaatgaaaacgagtagggttaccagctgctctaagggatggtgaagttcccatgagaagcttccaaaacctnnnnnnnnnnnttcaccccactattcccccaacccctgtcagcctaataaaatcatccaggagtttccctataaggtctgagcagataaaggaagccagttatactattgctacaagtccggacactgtgccctccccacggctgctgccctggtcctttactcttgctagctaacctagttcacttgtacggtaacacactacctttgctggaaagttagcatgggcctcccggctcagtaatggccaactctactgacacannnnnnnnnnnnnntggttcttctattcattgcactaaagactaaacnnnnnnnnnnnnnnntaggaaaaaaaggtgtgtaagatttgttttgtttttcgtacagaataagc

SEQ ID NO: 5090 - DNA, 160 bp, Macaca Fascicularis
ccagacaccttctccctgcaaggcgcttcacgtggcagcatccggaggctccgagatcagcactagagttgccgagttccctaaggttttccttttcactgaggaactatgtggatatatcttggctaggtataaaaactgggggacctgagaaagaagt

SEQ ID NO: 5091 - DNA, 748 bp, Macaca Fascicularis
  misc_feature (1)...(748): n = A,T,C or G
tgcctggctgaagcnnnnnganttcatgatggggaaatggaacagttaccttccagccagtagaggcacccctagctcttgggatgtttgtatccaactccgggcaatgtggggctacaaaggcccctggcttccacaccctggggaccgggggaagactggtgctcccacggtgggtgtccacagtgaggtcaggcccccatagcaggtgcattctcgccctcagcaggnnnnnnnnnnnnnnnnnnnnccagcactggggtccggcttcgaagtctgtgtctctgcctgtctgtactcatgcctgacctgctggcacgccctgtccactgcactcctcccgcctcatttttatgtgattttgcacagtgcctggcaaacnnnnnnnnnnnnnnnnnnnnnnnnnnnnngaaagagaatccccctctcgctctctctctctgtccttctccctatgtgcctccatatatttctgtatcttttgggagtcaggtgactttccctgccctccccactccccatgctgccctggtcactgcccttgggaccccagccnnnnnnnnnnnnnnaaaaggattggggctgggcgcagtgactcatgcttatattcccagtgctttgggaggctgatgcaggaggatcgcttgtgcccaggaactcaaggcnnnnnnnnnnnnnnnnnnnnnnnnnnnnnnnnnnnnnnnnnnnnnnnnnnnnnnnnnnnnncaataaataaataaataaataa

SEQ ID NO: 5092 - DNA, 754 bp, Macaca Fascicularis
  misc_feature (1)...(754): n = A,T,C or G
gacactactgaaannngctcaacatctccctgactaccagcaacacgtatgtaatgttttcttcattaacattttaaaaactggtatctcctttaagtttggctgacaatagtaaataacaatgaatctaaggtgttatcagttttgctaaattctgtatctccaagcataacatacaataatctcctaatgatccacttaacaatgctcccatcttccaggcccaggtggtcctgggtatcttggttgatagggtggtggcacaaccagctcaatatggatggcttgactcatctgggctagtagaggggagaaatgtcagagagcccaaagtggaaattaccctcctttgatttcacaggagcggttcaaaggaccagattcaagccctcctgacttggctggctccctgcttcagggttttgggctcacctgggctaagtgagtgaccactagggttatataacttttatagagctctaaagaatagtttcctggcctatttaatgtctcttcttcccctagctgacccctgaaatagttggtctgtaaaccataaaaatnnnnnnnnnnnnnnnnnnnnnnnccctatagaagtgatctgtttttcctttcnnnnnnnnnnnnnnnnnnnntgtataactctttgaacacccagtattgacttgtattgtgttcactgtctgcatcattcataaagctggcaaatgctctttatgtgcaataggatctcattaaatgattgctgaataaa

SEQ ID NO: 5093 - DNA, 2897 bp, Macaca Fascicularis
tcacatactggagaggactgcttcctctagcaccgagccctccgtaagtcggcaattgctagaaccggagcccgtccccttctccaaggaagctgacagctgggaaattatagaagggctgaaaataggccaaaccaatgtccagaaaccagacaaacatgaaggctttatgctgaagaaaagaaaatggcctttaaaaggctggcacaagcgtttttttgtcctggataatggaatgttaaagtattcaaaggcaccactcgatattcaaaaaggaaaggtccacgggagcatagatgtcggactgtcagtcatgtcaattaaaaagaaagctcgaagaatagaccttgacacagaagagcacatctatcatttgaaggtgaaatctcaggactggtttgatgcatgggtgtccaaactgcgacatcatcggttgtatcgtcagaatgaaattgtgagatcaccaagagatgctagttttcacatatttccttcaacttccacagctgaatcctcaccagctgctaatgtttctgtagtggatggaaagatgcaaccaaacagctttccatggcagtcccctttaccatgcagcaatagcctccctgcaacctgcacgactggccagagtaaagtggcagcctggttacaggactcagaagagatggacaggtgtgcggaagatctcgcacattgccagtcaaatcttgtggaacttagcaaactcttgcaaaatttggaaatacttcagagaactcagtcagcacctaactttactgacatgcaggctaactgtgtagatatttcaaagaaagacaagcgggtcaccagacgatggagaacaaaaagtgtcagcaaagatacaaaaatacaactgcaggaagggccacctgtgaagggccagttcagcacaactcggcgccggcagaggctagcggcagcagtggctacaacagttcctttcagtgctaccatgtcaccagttcgcttgcattcctccaaccccaacctttgtgcagatattgaatttcagactccccctagccacctcactgaccctctggaaagttcaacagattatacaaagctgcaagaagaattttggctaatcgcacagaaagtgcattctcttttgaagtctgcgtttaatagcatagctatagagaaggagaagctgaagcagatggtttccgagcaggatcacagtaaaggccacagcacgcagatggcacggctccgacagtcactgtctcaggctggtgagcaaatccatgtcagtctccccctatcacagcaagtagccaatgagagccgcctctccatgtcagagtctgtttctgagttctttgatgcccaagaggtgctcatctctgcaagttcatcagagaatgaggcttcagatgatgagtcttacatcagtgatgtgagtgataatatatctgaagacaacaccagtgttgcagacaatatttctcggcaaatcctgaatggggagcttacaggaggggccttccgaaatgggcgtcgaacatgcctgccagctccttgtcctgacaccagtaacattaacctgtggaatatcttgaggaacaacattggtaaagacctgtctaaagtctccatgcctgtggagctaaacgagccactcaacaccctgcagcacctctgcgaggaaatgggatacagcgagctcctggacaaggcttcggaaactgacgatccatatgagcgcatggttctcgttgctgcatttgcagtttcaggatactgctccacctatttcagagcaggaagtaagccattcaacccagtccttggggagacctatgaatgcattagagaagacaagggattccgctttttctcagaacaggttagccatcatccacccatttctgcctgtcactgtgaatcaaagaattttgtgttttggcaagatatcagatggaaaaaccagttctgggggaagtcgatggaaatcctgcctgtgggaacactgaatgtcacgcttccaaagtacggagattactatgtgtggaataaagtcaccacttgcatacacaacatcctcagtggaagaagatggatagaacattatggagaagtaaccatcagaaataccaaaagcagtgtttgcatttgcaaactcacatttgtcaaggtgaattattggaattctaacatgaatgaaatacagggggtagtgatagatcaggaggggaaggtggtgcaccggctgtttggaaagtggcatgaaggactctactgtggtgtggccccctctgcaaagtgcatttggagaccaggttccatgccaaccaactatgagctgtattatggcttcacaaggtttgctattgagctcaatgagttagatccagtactaaaagatctccttccaccaacagacgcccggttccggccagatcaaagatttttggaagaaggaaatttagaagctgcagcatcagagaagcaaagagtagaggaactccagagatctcggagacgatatatggaagaaaacaatcttgaacatataccaaaattttttaaaaaagttattgatgccaatcaaagagaagcctgggtttctaacgacacctactgggaacttcgaaaagaccctgggtttagcaaagtagacaggccctgttctttggtagactgggaatgtagagctagccaacatatcacattctgaatgaataaataactatgcacaattatgtttcttatagctatgtgtggtttctgggtccactgaaaacctaccatttgcttttctattcatctttataatggactttcagaagtgcattagacaaagcccctaaccactttcggatcctttctgttttgctgcaaccatattccttaaaaaaaaaaaaaaaaaa

SEQ ID NO: 5094 - DNA, 720 bp, Macaca Fascicularis
  misc_feature (1)...(720): n = A,T,C or G
gagaggaagtgtttacgcaccagtggagctattcgggcaccagtctccgtatggactgagggtttccggctgatttgggcctgggccctccttgtgtggcttccaaggcagccctcaggcagagagatgcagacactagcatttggaaatcagctggcggcacnnnnnnnnnnnnnnnnnnnnnnnnnnnnnnnnnnnnnnnnntggaccagaacggggaggcagaggaatagtttcagcagcacaaaggcagagggagcccaggtggaggcccttaatnnnnnnnnnnnnnnnnnnnnnnnnnnnnnnnnnnnnnnnnnnnnnnnnnnnggagtctgaaggatgaactgaattttatcaggtactgtgtgacaggagtgaaggcagcacacaagctccccaccctcctggagctgacatttcagctggagagannnnnnnnnnnnnnnnnnnnnnnnnnnnccgtgaagagaacgtaacacaccaagaatgcagacaggtctggaatggataaagatctgagatttttcacccagatggaaaatggtacagcagcagnnnnnnnnnnnnnnnagggggtgtatgtagaatcacaatgataggaaaagggcagttctgcttttgccttaccacgtgaccctggagagtgtcacctgtccctcagttctcgtttacaacagaaaggtggtgccaggtgtgataattcaagcatccctttta

SEQ ID NO: 5095 - DNA, 703 bp, Macaca Fascicularis
  misc_feature (1)...(703): n = A,T,C or G
agaagttaataatacaaagaacttaccatacaccttacactcagattcacaaactattaatattttgccacatctgctaaattgttcgggaaaaaacatttcaggctctttccctgaaccatagatacaatgtgtctttactcctaataccttggaatgcataggacattcacttatataatcactgtacaattattaaaatcaggacatttacagggacacaatactgttatctaagctacaaactttatccaggtttcaccagttgtcacaataatgtcctttgtagcttttctgttcctggtctggaatccaatccaggatcatatattccatttagttttcatgtctttttagtggtgcagtcactgcttactgcagtgtggacctcctgnnnnnnnnnnnnnnnnnnnnnnnnnnnnnnnnnnnnnnnnnnnnnnnnnnnnnnnnnnnnnnnnnnnnnnnnnnnnnnnnnnnnnnnnnnnnnnnnnnnnnnnnnnnnnnnnnnnnnnnnnnnnnnnnnnnnnnnnnnnnnnnnnnnnnnnnnnnnnnnnnnnnnnnnnnnnnnnnnnnnnctcggccaccgtgcccagactgtcccattatttttgatgttaatacaatcacatggtttaagttgtatctacacatttctccattcagtaagtcactatttccccctttgtggtaagtcatttgtggg

SEQ ID NO: 5096 - DNA, 1242 bp, Macaca Fascicularis
aaaggcgccttgggttgccagggagatgaaaatgctaaattgctgtttcaaagatcaggatagggttagtgatttctcacccaagttcctgggaaagaggatcatgagggaattacttattaacaagggtaaattcctgcaagggcaattggtggctttgaggacatgtgaaatcccatcctttccatgtgtcccagcatagagagtaaagagatggaagcacgtgctaatcccggcgaggctgactgtagggcggcagggagaatttagacagcacagcggcccgtgaactcctccatgtctacaagcctcaacccaagagggccttgtagtggaagcaaaggccgtccttcagcaccaacactttcctcctgaaacaggaaagggatatatacgctcagtagctgtcacccagcttccaccactgagaagtgctaaggaggacacggtctgcagggaagggcatagcattcgcctcttccagggcactcatccccttatggatttgttggaaaaggaggaggaggaggggtttccttctggggttcccaacagtaacagggcatcccacttgttttccaggtgggatggatagcagggcctcaggcacagccagtaatggagagacaaagccagtgtatccagtcatggaaaaggaggaggaagaaggcaccctggagcgggggcactggaacaacaagatggagtttgtgctgtcagtggccggggagatcatcgggctgggcaacgtctggaggtttccctatctctgctacaaaaatgggggaggtgagagcccttgtgccgccccacccactcctggaaggacgatgcttccatctcctgcgcttacggcccctccggggagtcccatagatgcataggattctggagttggaaggacgcttagaggtcatccaggactctctgtaagaaactaagacctagaaagatgcgtgactatcccgtgactatcccagggctttttctattgtaatgtggcatcgtagaaatgtgagcacaagctggaaccaggtggagaagagtttggatcctggccccgctgctcaccctctgtgtgatcttggacaagttacttaagctctcagagcatcaagttaccgctcctgcaaatcgagataataatgcctgcctttcaaggtcgttgtaaggattagagataatgtgtgtaaagaacttaataaatagtagctttgttgaaaaaaaaaaaaaaaaaaaaaa

SEQ ID NO: 5097 - DNA, 745 bp, Macaca Fascicularis
  misc_feature (1)...(745): n = A,T,C or G
ggatttacattaatagaacactagtacaaagatgtaatttggctttctcttttaaacaagattttcattgtgatataaacaaaaactgaaagaattttcgtttgccttttatannnnnnnnnnnnnnnnnngggaagaaaaaggagacagatccagtcgtcctcatgctgtctttattgcagcnnnnnnnnnnnnnnnnnnnnnnnnnnnnnnnnnnnnnnnnnnnnnnnnnnttttaaaaattttggacttattattttggctaaatgacttatagtaactttgtactaatctccttctctaagcaactctcctccaaatcctgttgggtaatggaaaaagtggcaccctctccctccaaaagaaaaattcatatccctttatactatgtaagggctcaattaccattttccctccttgccctggtaatatctaaataccacacacccctttggggcaaaaacatactttccaagatgggtgcctgcttcatatttacccaacctctgaattcatctttccctctaatagacccatttctnnnnnnnnnnnnnnnnnnnnnnnnnnnaaataacttcaacctagatagtcttatttcaggggtttaaaatagcccatacttattcagacaagccctagcaagaaagctaactgnnnnnnnnnnnnnnnnnnnnnnntctacaatatgtaaataacctcctcatttgcttcccttccacagaactcacacagaaacacacagcat

SEQ ID NO: 5098 - DNA, 721 bp, Macaca Fascicularis
  misc_feature (1)...(721): n = A,T,C or G
accacagccctggcaaaggggaccagtaagttgtctgaatctccagggttcctgactagctgtctcttctgcagtctaggcagctgtagtgcccaactctataggctttggccctccagcttctctgactgtgggaggcactgccttgtctcagacagaaagcacttatctcttaggagattcccaagaaannnnnnnnnnnnnngttcccagggagtgggttactggccaaagggaacataaggtaggcagaaaagttaaaagagtttcttaaagtgaagactggagaagttcctcccttcctctgagctatgaatctctcttcatgaaagccaaaggtagagacgggggacagggccaggtnnnnnnnnnnnnnnnnnaaacacttctagagttgcccattcctgttctgctcttggacccttagatacctcctgtcctttttagatccagattaagagaaacgttcaggaagctctttgaaaccctcagtatttgttggagggactggactcctctccatctccccaccctctgcctccagtcaccatgtgcaagagagatcctgtacagatgtctctgggctctcgtttttcctttagaataacttcttcctatttcaggaaagggaaatggtgtcactcaggccctgggactgcttctccagccaggttggggccataggtcccactctagtgaaggtcaatgtctcagaaaaaag

SEQ ID NO: 5099 - DNA, 736 bp, Macaca Fascicularis
  misc_feature (1)...(736): n = A,T,C or G
ccatggtgtgtgcttagtgcaaatggcagnnnnnnnnnnnnnnnnnngacnnnnnnnnnnnnnnnnncccaggtcggcacacacatcctcataatggcatttctcctttctgtgcacagccctttattgttataaagtactgttccaaaaagttaccctgtgtaaaagaaaaaaaatggtttaagtcctttcagaccctacctcagaggaggcctagacttagagccttttgagagcttccatcttgtttaatctaggtgcaatctaggggtcctgaagcaaggagcacaattccagtgtcccccaattacttctaaacagtgattgcagccttgtttagaatcaatannnnnnnnnnnnnnnnnnnnnnnnnnnnnngattcataaggggcagtgtcaaagggnnnnnnnnnnnnnnnnnnnnnnnnnnnnnnnnnnnnnnnnnnngttcacatcccctcggtgccnnnnnnnnnnnnnnnnnnnnnnnnnnnnnnnnnnnnnnnnnnnngcaaacagcatttgaaacagaagcacagctgctctgtttgacaccgaactgtggctccagattccagtggaagccaaatgctttttcttttacagctgggtgcctgtaatcccagttacttgggagatgaggcaggannnnnnnnnnnnnnnnnnnnnnnnnnnnnnnnnnnnnnnnnnnnnnnnnnnnnnnnnnnnnnnnnnnnnnnnnnnnnnnngactccat

SEQ ID NO: 5100 - DNA, 1114 bp, Macaca Fascicularis
  misc_feature (1)...(1114): n = A,T,C or G
gtcnnnnnnnnnntgctgccataggttttgggtgtaaagaatgtttactgccctccatttaaattctgaaaagggatagtggatgttttccctctcctatgttagaaactattcttaaaaacttttcaaaatatnnnnnnnnnnnnnnnnnnnnnnnnnnnnnnattagtgggtaccttttatttttctttttttaaagcacaagaggcccataaatcttgagttattttccttagtttaatttttttttgatacagnnnnnnnnnnnnnnnnnnnnaaaatgatgcgttattaaacccctaactggctggcatgctttcctgtttgtattctatannnnnnnnnnnnnnnnaaccatgatagtttaggtataattgttcaaaataacctaactgcagcagaaatgtagcacagttgcttagtacaggcttctcacttccnnnnnnnnnnnnnnnnaatttgaatagtcttgagttcttaaatgcccaaagaacacactgttatttcttgtgtatatttcaacataaatcatgttgttatcaattggttcggaaggccctggttgagaagacttttagataataaggtcatatatatatatannnnnnnnnnnnnnngtctactnnnnnnnnnnnnnnnnngcttacaatttcatttgagccctgagtatgtgccctgctgttactctttctttggtagttgaacgttgaattcaagtcttttttgttttaagaagtactaagcaaacaagcaataaaaaggggaatgnnnnnnnnnnnnnnnnnnnnnnnnnnnnnnnnnnnnnnnattctgtgcctctgtgcattaatatttggatgcatgcaatgccagcatggaaattggtcttcacacatactgcagttttccagaaacattcacaaaacaataaatgtaacagacattccatttgttaatgggcatatatgtgaaaagcagtgtagaaaataggctaatattnnnnnnnnnnnnagtccttaataacttcaagtgtggttatataatggacactgtcaatgttcannnnnnnnnnnnnnnnnnnnnnncaaaataatgcttgggaaacattaaaattgagctaaattgtctcaagttc

SEQ ID NO: 5101 - DNA, 757 bp, Macaca Fascicularis
  misc_feature (1)...(757): n = A,T,C or G
taggagagtgatnnttttctacaccctcaccaacacttaacatnnncagacttttgggttttaggaggaaaacctatttaaaaactgcatttccttaatcatgaacgaagtcatctttccacttatttgccagacatttgtattttcttttctgcattgtccttttcttttaagatgcttgccctttgcttgttaatttgttggaaatctttgactctaatgagtgtaatcaatcttttctctgnnnnnnnnnnnnnnnnnnnnnnnnnnnnnnnnnnnnnnnnnnnnnnnntttgtttatagtcttttgccaagcgtaaaatgttaatttccacatagtcaaatttgtttatctttccctttaagtcttttcagtttcatgccttcttnnnnnnnnnnnnnnnnnnnnnnnnnnnnnnnnataatctcctgtgtttcttctagtattatataatatttcttatatattatatagtatttactatatgttttcatatacttcttatatattccctgtaaattcatatataaaacctatattttatgtggatttaagcagagaatggtgtgagttagggatctaacaagtttcatttccnnnnnnnnnnnnnnnnnnnnnnnnnnnnnnnnnnnnnnnnnnnnnnnnnnctctactgctgtgaaagtatactcttatcagatactaggttcccacatgcacggaggtccatttgtgaactgtgttctgatattatttttcagttcctgcattagtaga

SEQ ID NO: 5102 - DNA, 710 bp, Macaca Fascicularis
  misc_feature (1)...(710): n = A,T,C or G
gctgtgtagcattttaacatatatatattcacaaatatattcatataaacagtatacattttgaatcagtcatttgttaaagaaaagtatattcaatgaaagatgaaattaaaataaaaaaggacaggagtctatcctccagggattgaacattttccaattatctggtcttttcctgttgtacaaaaatgactcattgctccgaatgtcaaaaacaaatgcgacaaacaatggcacttcatcatttaaagtaatgttgccaagagaaaaaatttcctgggagggaggtttcccacaagccaaatctccccagcctcaaatgctagcactttttggcagttggataggaaatgaaacattctttggcagccaaaataagagaggccgatggtgaaactttttgagacaccctatggccttcttgtcaaaaccttcactggagctcaagaaaagcatttctgttgtgttatttgcagtgcagatgatgtctgtgtaacaacataatggttattcacccttttttgattttgatttttgctgtgttatcaaaaacttgaatactgtgagaagaagtgaattttcagttgacgaatcagtatcttgttcccatggtgataacnnnaattgaatannnnnnnnnnnnnnnnnnnnnnnnnnnnnaaaaaaaatacaacactaacaatannnnnnnnnnnngtgtacaatggctg

SEQ ID NO: 5103 - DNA, 2137 bp, Macaca Fascicularis
aatgacgatgacactggttttatctggggagtttttatgacctcacgttcccagaatgacagtggtttgcctcaggtatgtagaatttgccagcttcccaactgagcttcttgggtgctatggacaggttaaacagcatccttcacaagcattaaaatccctggtgaacctgtcactgccctcctatgtaaatttctgaccacagagctgctgctttgggatgtagctgtgaccgtttctgtatcatgagtctctgagaagcgtaagtcacctgcttctcatattccagagttcagtagttgtgtctctaaatgagatagccatggctgggtgcaaacaagagaatacaaatgtctacatgaacgggtttgtcctgtcgctctgcttcgatccattgttatttctgagaatcattttgatttttggactgcttatttcaatgtgtaggagtcttccttgtagatgaatgcctttcacgtataagtctttctcttatttattgatttattaaaaaaaaatttccctacagagggagaaacaaaacacaaaaattccctttcctgtcacaggggaaaataactggcaaaacagagaagcccccaaagtaaacagagtaatagagtacccagcctcccgtagagcttgcagaaatctcattgtgcagacgtggagctccccagcttttgccttgttagcctatttctgaaccagtagttctgtttcttaatagggtaaagggcctgacttacgtaaaagctcaaagtcttaatcacaatgataaaatacaaagtcgtggcaactgtagtaagtttaaagacatatttagcttttcaaggacatcctgtctttaagaaagagtctttcatttagctaaaggaattaaactgaattttcaatcttttaaacaaaatgatgaatttagtgaagaaaacaaaactctccatggctaacgtaatttatgcaaaatcacgcaattagtgatagctgtgctagactttttttttcccttcaccaaatgcgcctctaataaaaccatcgtgaggagcagtgccatctaatgtaagtagtaaacatggatagtaaatgattaatatctggtgaggcatgcagatggcaggacttccatttttcctttgagcccccatgcatgtttgctaatcattcttgcaaaaaaattgcaaagataaatatgaactttggaaagtaatattcaacaggatatgaatgtaagaaacagcacagtgtgggggaatagtaaaaaccagcacttttcgcctctgcatggtgaaatgacggtaacctgctgtagtgtaagcttaataagggttatatcattttcacctatgtactactctgggcatggcccgggtcttgtgagtggtatttttttaatcaagaccccagccagcgcagtcaccctgacagtccccccactgagatatggaaaggtaaccctctagcaagtcctcgttcaggggaaagcgttcaagtgcacagacgtctaccctgtgctagcctgagctgtagtcttctgaaatgatcgcttggcttcccagccaaggcagggctcccccaaagttccttcccactcttgcattttcacctcgggatgcttccgcagaatttcagtgcctaagcagacaaggtcaaagtaaactccttcaccgctgcttctggcgcaggggcccagagcgtatccagccccccagcacagaccaacagcaggagaggggtcggggcaggagccctgggctgtagataagcaaaacgcacccattttctctcctatttactccagaggcacctctcctcccccactcctggcatctccttatcactggctccctctccctgtggcatatttttgggtagtagaatgctgaggtcacagggagcggctctttatccaagcagtggggacgtcagcctggagccctgagcatgaaccagcaagatgcaggctctcgctcttgactttgggctccaggcgctgccccggcccagggctgcccgcgagctccacgatttttaaacaaaaaaaaaaaaaaaaaaaaaaaaaaaaaaaaaaaaaaaaaaaaaaaaaaaaaaaaaaaaaaaaaaaaaaaaaaaaaaaaaaaaaaaaaaaaaaaaaaaaaaa

SEQ ID NO: 5104 - DNA, 728 bp, Macaca Fascicularis
  misc_feature (1)...(728): n = A,T,C or G
atcacttgaattgcattaaataccattaaggaatattaactgatttaaaaataagatatattcgtgaccatgtttctaattttcaaaaatgtagctgccggtgtgtgattatatttcagttgtacaaaatatctaaacctatagcaatgtgattaataaaaccttaaacatattttccagtaccttaattctgtgataggaaaattttaatctgagtattttaatttcataacctctaaaatagtttaatgatttgtcgttgtgttgnnnnnnnnnnnnnnnnttgacatcaaaagtgatatttaaggaggattattttggtctgcagcaacttgataggactattttagggcctttttaaagctctattaaaactaacttacaacgattcaaagctgtctgttttaaactatttcaaaatgattttagagccttttgaaaactcttttaaacactttttaaactctattaaaagctaataagatatcttgaaataattgtcatatcaaatacattgattgtttaatgtttaaatgtcagatgaaaaaggtaaagctattaagaattcacccagataggagtatcttcatagcatattttcccctgcttattttccagtgatcacattattttgctaccatggttattttatacaattatctgaaaaaaattagtcatgaaggttaaaagagaagaaaatattaaacataaaaggttcagtctttcat

SEQ ID NO: 5105 - DNA, 733 bp, Macaca Fascicularis
  misc_feature (1)...(733): n = A,T,C or G
attgatagtacatactcacattgtatnnnntagtannnatattttccaaatatgtagcatctcagaaatatttagattaatgagtcatctcagtttgttgatgaagagacaaagacctcgctagagcagcagtccacaatcccagatggtgctaggaggctgctctgtcttgtatccatcctagacacatccagaagaatccttaaagtttcagtgacctgcatctttatatggatagtttttattagatatttttaaggttatgggaataatgaccaattttataccttatttattaagagatggggtatttttctatgttgcccaggctggcctnnnnnnnnnnnnnnnnnnnnnnnacaattagctgggagtgcaggcatgcaccaccatgcctggcttatactttttgattcacttctttttctagtgtcccaccttttcccttagaataattgtggagttcttatattcttaaaaattaatgtgtgtttattgagtatgtgttaatcctatcatatactaggcattactttaatatttagttttagttgaagttggttttattatcgttagttttatggagacaagaagggaaaggtgataaaattatttctaaactacatacttatctgaaaccactgccagaaaagccagaccatcctcctactaggtatcactgcctcagggtaagctgaattttgtatctctaagttactagattactcttcac

SEQ ID NO: 5106 - DNA, 220 bp, Macaca Fascicularis
agtgtgagtcctttcatgtcctctaaatgaatagggtgaggaaaaggttttcccacatatttcacatttatgaggtccatgttcagcgtgcattaccacgtgtctttgaaagcttatgagataacactttcccacattgctgacatgcatagggttcttctcagtgagttctttcatgcatctgaacgtaattggaacacttggacgttttcccacattg

SEQ ID NO: 5107 - DNA, 1943 bp, Macaca Fascicularis
  misc_feature (1)...(1943): n = A,T,C or G
actttttttaaggatagttactacagtattaaaaattatacagtatattaaagaaggccaactgcagcccaatgacaaacgtgaaattgatatggagcagtctattgatgaattaattcaattaattcatttaagaaaactgaggatatttagtaaaggaggtacattgacctgagaatgattctatacacatattagggacatcaaggcttttttcaggttttgtgcattatggcactttaaacacattattagtaaattactgaattaatcaataaacaatgtagaaacaaatgaagaaaagatgggccatacctggaccaatgatgatgactggtggtatacgactcaaaggtataagaagtgtttttgttagtggcaagttcagagtcatttgtttcaagagaatatgaaataaatatattccaaataatgatgatttaagtgataaaggaaaggtgaaaggcaaggatcattggaggaatgtctgaatttttagatcatctgttctgtttacactcctcagaatggcttcactccatctgatttaagcactcttccgtggcatgtgcactatggttggttctgtgtgttaggagcacgcagaccattgggagtatgcattcatttcctctctttacaaggtccagtaagttggtgtcagtgacatacaagaatctttgtgttcatgcattnnnnnnnnnnnnnnnnnnnnnnnnnnnnnnnnnnnnnnnnnnnnnnnnnnnnnnnnnnnnnnnnnnnnnnnnnnnnnnnnnnnnnnnnnnnnnnnnnnnnnnnnnnnnnnnnnnnnnnnnnnnnnnnnnnnnnnnnnnnnnnnnnnnnnnnnnnnnnnnnnnnnnnnnnnnnnnnnnnnnnnnnnnnnnnnnnnnnnnnnnnnnnnnnnnnnnnnnnnnnnnnnnnnnnnnnnnnnnnnnnnnnnnnnnnnnnnnnnnnnnnnnnnnnnnnnnngccacgcccggctgtgttcatgcattcttaaaaattataaggaatcactgatagagtagataaacaaatatataatgaataaacatcaaggtggtaaagcgtgctcattgttaaaatatacaggagggaaaaatagtattaatataaattggaacaagtgtattttgtcttagactaacagtgataactgaaagtgagaattttgatgattcacttgtgtatttcgtgtttgatttattaagagaaaaataaatattgatataaatttataaatgcctgaatgactatataaagggatggaggtgtctgtggctcaatgaagagaatatataatcctctcctgtgctctgatttgtatgttcttccacgctcacgaactctgtgtttgtatctatgtgttaggagcatagagaccagcatcagcagtggtaaaaattccgttggtttgagtgattcaaagaatgtcaatcatgctaatgttttatttcaggttgatatgcagtattacgttgattaatgctatgtgaaaaactgaattcatttaaagaaagggatttaggctctttgtgatagtatagatgaatgtgagtgatattgaagagcttattttttgtggtttatgtgtatgtctttattaatgaattactcaataaacaagtgtaggtatgaatgaagagaaagaaggccaatcctggaccatcgatgacaactggtggcttacgtgattgtatatgctggttgtatatgaagaatagtacatatctgaaactttgaggtccaacacaaatagaatctagtccattcccatatattataaagtgatataatagacggatacctgaaatgtacaaggagtttgtgattagtcttgtgtgcgggaggtttaaaaatattgtaaaagtagcaatggcagaataaacaaataaatgtacaaataaaataaaacaaataaaaatgaaaaaaaaaaaaaaaaa

SEQ ID NO: 5108 - DNA, 758 bp, Macaca Fascicularis
  misc_feature (1)...(758): n = A,T,C or G
tgaaggtgaggctgcgggagnnnnngagtggccaggatgtgcagatggtcacggagaactggctggttctggagcccagggnnnnnnnnnnnnnnnnnnnnnnnnaggagaggagtcaggccgcgactgtgcaggagttgacttccccagctttgctggcttcagaagcctttgtacataagagagatgctgctacccaagcaccaaagaactgttaagcacgtgcactactgaccccaaccctggtctttcctgttggcccctccggagcctctacagaaacaggctgggttccaggagcccatctccctgctgtctccccctgcccccagtctggatgagggcaaggacaccttcgttcctctgtgccatggagtcctgcagccccttaacccctgcgtggcaactgtgtatagcttacacctgcctccagttgnnnnnnnnnnnnnnnnnnctttaaaagatataactatgggatgggagaacttgagnnnnnnnnnnnnnnnnnnnnnnnnnnnnnnnnnnnnnngttccgtgactccagtgggctagtggtagcctgtcccagacaactccatcaccccnnnnnnnnnnnnncctttatccctgacagctgctgcactagccttcctgcttccctaaggacttagtggaggaggaaagttgtttttggtactacttggtgggaagtaaggggaaggctggatcttgggtttggtccacccacccaagaaaaaagactgtaacggaagaaaaaa

SEQ ID NO: 5109 - DNA, 1533 bp, Macaca Fascicularis
agatatttcctttccttaatgacatggggtgtcaagcatcttttcatacgcttatttgccatctggatatcttctctgaagagagacagaggtcttgctatgttgcccaggctgttctcaaactcctggcttcaagcgatccacctgctttggcctcccaaagcactgagaaatgagccaccatgcctggttccatgaagaactaacaggtattgagtgtccgctctgttccaggcagggcgctcagcatctccacgtgcttctcctcattcaatcctcacaaggatgccaggaggaattcagagggagatccctacgaagtggtccctggaaggaggcacacctctatctcctcacaggccagctcccctacccagtccctcacaaggcccagttctccaaggggtaggggggttggtgctgaagaaggctgcagggggttcctccaggaagggcagtgcttcctccagaggccaccatggaagtgccgctgtgccacttgggaaagcaggagctcctgggagcctaacctaccgatgctgggatcctggccttggcacccctcagctggtctcaggagatctgcttgaaaacatccacctactccacccagggcagcagaaactactcggggaggctgtactgggccccttcttccagctgagatggataacctgaagcacagagacatcaaataggccacacagctggaagtgccaggaccagagcccaaagcacatggtctttctcccatacccacttaccttcctgcctcctagtctgaagagaaaacactcaacaaagaaagctccctcaccacctaattgatgtggcattggaaacagccttgttcttcctcgcctacaatagacttcctttgctccattccagagaggggagaagaagcaatgaactgcctgggggaggcagttctgcagaaagaatctgaaggccactgtggaaggaattggccacggatgctgaatgatgacaacagggctggagaaaatgaggagccactggagggatccaaacagagaagtgtcatgatcagatctgaggtgggacagtcaacctgatggtggtatagacagtggatgggagagacccaagaccagcatcaaattcaaaggctgtgataagctctagctaaaggctggaaaccagttcagactcacataccaggatgtccaacccattctcaaccaggaaaaaggaagaagattgaaggagaaaaagggacagagatggtcaccaagctgaaggcagatgaagaagtgagaagagagcaaagtgccttcttgctgggagcctcccttgtgtctggaatgatcagaaatgggggagaaatggtacagccttcagcagatgaaattgagcggttgtgctgtgaggcgggctgtggtacttaaatgcaatagctgatctaatcactagtctcgttctctgggaagctttttgctgcattttagcacagaaaagtgttgtctttctctcttttgtggctcgagctgctatttaagaaagcaaaaa

SEQ ID NO: 5110 - DNA, 750 bp, Macaca Fascicularis
  misc_feature (1)...(750): n = A,T,C or G
tgcagnnnnnagctgtgatgcnnnnnnnnnnnnnnnnnggcaacagaagtgacactgnntgaaaaaaaacgacgaccgaaaaaagtcaccttagctttttctcttagaaccttctctaaaatgtattctttgtggcattctgaaataagattcctgatgatgcctgttgannnnnnnnnnnnnnnnnnncctgccagtatctttggggctgtgtccttcaaggacatgtccccagactgctgtgcagtgtcattttctgtttggttttgtggtggcttcttccctnnnnnnnnnnnnncaacctcttatcaccatttgttggtgtcagaactaactgcttctggtctggagagggactgaccnnnnnnnnnnggtagagagaattatgaaagagattttggtatttttctactttatattttctgactttcctgnnnnnnnnntatttcacttttccaataaggaaaaaaaaaaaaacttgacctnnnnnnnnnnnnnnnnnnnnnnnnnnnnnnnnnnnnnnnnnnnnnnnnnnnnnnnnnnnnnnnnnnnnnnnnnnnnnnnnnnnnnnnnnnnnnnnnnnnnnnnnnnnnnnnnnnnnnnnnnnnnnnnnnnnnnnnnnnnnnnnnnnnnnnnnnnnnnnnnnnnnnnnnnnnnnnnnnnnnnnnnnnnnnnnnnnnnnnnnnnnagaggtggaggttgcagtgagttgagatcacacctctgcttnnnnnngggcannnnnncaga

SEQ ID NO: 5111 - DNA, 1144 bp, Macaca Fascicularis
gataaaaaaccacccaaattctaaacagatcctcctcaatcgtgggaaaaaaaaaaaaaaaaaaaagatttttacatctcgtctagagcattcgtctaacttaatttcaccgcgactctgcaagccctgggggaaggaggttgtaccattggagggttgagaaaactgaagctccacgccagtgaaggagggggcttgggcgagtcgtgttgttgggatatctcagagcgattcaggagccgccgcgtttgcccgcaagcctccactatgcaggctggctttccttccttccttctctccttcctaagtacccacttcacgcctgtcagggtgtggctactagagacttattgatgaaagagaacagatctggccctgccctcctggcacttacaagtgaaggggaatcagacactaagctcgtggttacacggagagctaaaaattccaggtaggatacagggagggggctgggccagtagtggagagggtgccaggctctgcctgggaccgggcagggctgcgctggtgcaggtggtccagagcctagcgaagccaggaaggagggagctgcagacggtgcaaaaggtcccctgggtgagggctagaacttgaatgtggagatcaggttgtttgacccagactggcctccactgttgtaactgaggtggggacagggtgatgtcatcaccttgtcttgctagcaccaggaacccagtagccctggggtcctaacagcgtccaaatctgtccttcatcctcttggaggagtcacagctccatggtgaggaatggcatgagtgcacactaccacccccgtggatgcatctgcagcagctgctggctgagcatcactcctgcttggagcaccagccctctgagagtcatttgggaggttgatggcctgggcctggccacacagcctgggcagtggttcagaggtcagcatgtggcccaggctgggacgttgacagcttgcttcagcacatgagggaaaccagcagaaaaggtgagcttgcttggcctggcacagtggcttgggtcttcatcccagcaccttgggaggccgaggcgggagaatcgcttgaggccagaagctggaaaccagcctgggcaacaacagagagatccatctttacaaaga

SEQ ID NO: 5112 - DNA, 1794 bp, Macaca Fascicularis
aattagtgacagcaagacccatcctttcctgactgatagccccagctaaaatcatcactcagacaacttctaggagaaagtaaaatcaagaattaggatctcaatactctatttagggtcttcctaaacatctgacagctgatagagattgtaaccttacagcgtttgcctcaaatgtacctgtcatgaaggcctcttaatctgaccaaggatgcttcacttctagatacaattttgatttgttatttacctgctgcagagtgcccaaaaggctcatacctgattttctaaatttctgcttctggatcacatgggtcattagcacaatgcctgtgatacagtaggctctcaaaaaatgcttttaaagaagcatgtgtcctcctgttataatatcataataaactttctgaggccttttgacctaattattgcctacctcctaagaatggggtattgttcagcaggggtgggggactgaggcagaataaggccctctgaggccttagaagactaactggggtgttacaacacaaaaaacctacagagcaagcagtgagtgccaagtaccttctaaacattccagattataagtatcctgggagtaccaagatgactttctggaagcctaggttcttgtttgaacttaaaaggaagatgtaatttcaaagggggatcatggcagagaagatattcctggcacgaactggttctgtgtgctgccttcacggaggtggtcagagcttgctcctgctcatggtttgctggactcttttgccatgtaagtgtggtcgggaagggcagacagcagcccctggcatatctagaagacttgaggcatcaaaggtacacacatacttacatagtttctgtgaagcaattccctggagagttatgcacaggaaccagattcccatatgggaaagataataactctgacatcaggattatgggagacaagaatacctcactcccaaactggcctttgaatgtcttatttttttcagttcccttttcctgtaagcagcatcatatgctattggagaacacctgctctgtacaggctaggttgaactccagctctgccatgtaccggccttgtccacaggccagttgcttagccccgctgagcctcagtttctttccctgtaaagagggacactaatacctacttccaaagataatgaaaggattaaatgagacagtacatgcacggcggatttcatttcccagatatgaccacaacaatagctgccatcccatgtgctctgtgacagcctttcccccatcccctcaagaggcagtacctagttcacctactcttaaacgtgaatgaatttatgacttgctcgtaatagaatgtggtgggaataatatagttgatttctgaggctaggtcataaaaacgatgaagcttctctcctaccttgtaaactgggacacttgattttggagctgtgagcagccaccttcaaaagtcctactagcctgaggctaccgttctgtgatgaagcccagcccccatggagaaaccacacgtaggtgccttggtcaacagacccagccaaggccatcctcagccaccggttctgtgagtgaagacgcctctgggtgatcccagctccagctgacaagtcactaccagacttcagatcttcccagcagaggctccagacattgcagagcagagacaagccatccccactgtgtcctgtccaaatgcctgacccacggactctatgagcataataaaatggcttaaattgttaaaaaaaaaaaaaaaaacaaaaggccaca

SEQ ID NO: 5113 - DNA, 713 bp, Macaca Fascicularis
  misc_feature (1)...(713): n = A,T,C or G
cccgcttccttnnncannttcacttgaagtcctggcctcctcaggatagcaacnnncagctnnnnnnnnnnnnnnnnnnnnnnnnnnnnnnnnnnnnnnncttgttgatctgaattccataacgattcattcttatgcagtggtgtatgtgtgctcgcgcacacacacacacacacacacagtgcatcttcgaaaaggcttcaggctggaagacagctgcccttggtgtgttgagggcaagggctgtacagggtggtacaaagtttctctcccaaacccatcattgccacaaccactccagtgcaannnnnnnnnnnnnnnnnnnnnnnnnnnnnnnnnttccaggagccagtctttcccctagcgagaggcccaagtccatggctggaagcaacctctgctcctggtgctggcacagtcagagcatcatggaccacatttgctttggggagggaaagaacttctggagcctgcatctctggtacccaggtgacagcagacccagccgtgtcactgcagccaggccgtgcttggcagctttagggaaacaaattagcagacgactgcagggtccagggacttagcaagctgcctccagggcagaggaatcaaaagacagatttgtttgtttatttgttatttttctggccctggcttcaattcccatacacagaacttggctgtgggattctttaaaaaaaaaaatcattcta

SEQ ID NO: 5114 - DNA, 693 bp, Macaca Fascicularis
  misc_feature (1)...(693): n = A,T,C or G
cagggagatacattcccatgccatgcannnngcttnnnnnnnnnnnnnnntggtcaaatgagctttatgntcatgagctttaagtttataattatccaggattttaaatcctcaacttgttctagcnnnnnnnnnnnnnnnnttgggtcatacattagtgctagatactagaaatattcacttttccactgatcagagagacagacattaaaaacaaaaatagaagaaaggaaagctttcaccctgcagctttttagcaggggacaattgtcttgccaaaacttttttcccttttctctcccattttctcccacccagtcccttctcactcnnnnnnnnnnnnnnnatgctttcttctctgtagatgttaacagttaaggcccattttcctcaggcacttaaccacccaatcagaacaccacatctgttaggggaggtaacctggccaacagtgtgtccatcacatcagccctgctggagggaagggacccacattcacctgccctctggcctgcccccgatcccatatctattaccgtgtccataggaataataggtaagggctgtgtctctgtcaagccatgtaacaaaggacactgtaaaaaaaaaaaaaaaagtctggcatcagagggagcatgtggagagcaacttgggaggaacaagttcattttgtattgaatgatttttaatgaa

SEQ ID NO: 5115 - DNA, 2157 bp, Macaca Fascicularis
agtgttccgggcgcttcaggctggcttgggtcctgctgctctaaccccaagggccctggagtgcgccctgatacctccatcactcaccatggccggtcagttctgcctccctgtatccccacgcctctcgcccctgaaacccttgaagccacatttcggagacatccaagtgggcatctacgtggcgatccagcgcagcgacaagcggatgcacctcgctgtggtcacagagatcaacagagaaaattcttgggtcacggtagagtgggtggagaaagcagtcaaaaaaggcaagaagattgacctggagaccatactcctgctgaatccatctctggactctgctgaagaccccatgcccgtatcccctttggctcccgcgccctcttcggccatcggggaccagagtaccaccacgaaacgggttgtgatgatcccccagaaaaacaaaacagcctcaggggacagcctggacgtgagggtccccagcaaaccttgtctgatgaagcagaaaaagtctccctgcctccaggaaatcgagaaagtgcagaagcagcgggaaaagcgcaggcggctgcagcaggagatccgagctagacgcgccctcgatgtcaacaccagaaaccccaactacgagatcatgcacatgatcgaagagtatcgcaggcacctggacagcagcaagatctcagtcctggagccccggcaagaacatcgcatctgcgtctgcgtgaggaagcggcctctcaaccagcgagagaccaccttgaaggacctggatatcatcaccgtcccctcggacaatgtggttatggtgcatgagtccaagcaaaaggtggacctcactcgctacctggagaaccagaccttctgtttcgaccatgccttcgacgacaaagcctccaacgagttggtgtaccagttcaccactttgcaggaagggcccaagatcattctaagggcatttatgctctggtggcacaggacgtctttctcctgctcagaaactccatatatgagaagctggacctcaaagtctatgggacattttttgagatttatgggggcaaggtgtatgatttgttgaactggaagaagaaactgcaagtccttgaggatggcaatcagcaaatccaagtggtcgggctgcaggagcaagaggtgtgttgtgtggaggaagtgctgaacctggtggaattagggaatagctgtcggacttccaggcaaacatctgtcaacgcccactcatccaggagccacgcagttttccagatcatcctgaagtcgggagggaaactgcatggcaagttttccctggttgatttagctggcaatgaaaggggagcagatacgaccaaggccagccggaaaaggcagctggaaggggcagagattaacaagagtctcctagccctcaaagaatgtattctggctttgggtcagaacaagcctcataccccattcagagccagcaaactcacacaggtgctccgggactcctttataggccggaactcctccacttgcatgattgctactatctctccagggatgacctcttgtgaaaacaccctcaacactttaagatatgcaaacagagtaaaagaattaaatgcagatggaaggccctaccatcgtggcctctatccaaatggacatgaggcatcaaggatgttgaaaagtcacatcggaaattcagaaatgtcccttcagagggatgaatttattaaaataccttgtgtacagagtgaggagcagcagaaagagattgaagatgttgaaagagccactcttttagggaaggataccacaacttcaaggaagggatctagccaatggctggagaacatccaggagagaaccggtggagtaaaccatgatgttgatttttgtattgcccagtctttgtccattttggagcagaaaattggtgttctgaccgagatccaaaagaaattgaaattattacgcgctgacctccacgtgaagagcaaggtagagtgaagccaatggtgagagatcaagtccgaaatgctgcactgctgcagtttccaccactcttatacaggaaaactgtccaaattatctaaatataaagatcctcttgaaaaagcttaaaacatcttaaaatacaaaaaaaaaaaaaaaaaaaaaaaa

SEQ ID NO: 5116 - DNA, 717 bp, Macaca Fascicularis
  misc_feature (1)...(717): n = A,T,C or G
gtgcatgctcagtgctccatacaagctaaagtgagtcatggagaacatgacatcattttttcccctttagctaggtaatctcatataccacaggtacatgaccaagcatctctgctagaggatgtacctctcataactcctgtgtaaaatgaggatcctgttggtgattttcattccagtttccaaagcgagaggagccttctgagcagaagtatgcaagactgattctgtctggaatttcctatttggctgcattctaggaggcctcctgacttactcatagtattgtgccctggtggcactgatggggtagcttgtcttgctacttgctaaagttctatttctttgagaaaactgaggaaccagaatgcttaagagttcataaaataatctctaaaccatgttaggttaaaacaaaatgaccatctcacaaaaacaagtttagttgaatgctcaattccttaaaaaatcttcatttaaggctgagtgtgnnnnnnnnnnnnnnnnnnnnnnnnnnnnnnnnnnnnnnnnnnnnnnnnnnnnnnnnnnnnnnnnnnnnnnnnnnnnnnnnnnnnnnnnnnnnnnnnnnnnnnnnnnnnnnnnnnnnnnnnnnnnnnnnnnnnnnnnnnnnnnnnnnnnnnnnnnnnnnnnnnnnnnnnnnnnnnnnnnnnnnnnnnnnnnnnnnnnnnnnacaggagtttgagtttgcagtgagct

SEQ ID NO: 5117 - DNA, 1288 bp, Macaca Fascicularis
  misc_feature (1)...(1288): n = A,T,C or G
cagagccgtgtggtgaaccacactggccgcttcannnnnnnnnnnnnccnnnacgccgagagcnnnnnnnnnnnnnnnnggcgccacgtgcaggagctgcaccgcagggtggcttcacacgccccagccagtcccgcgcgcctcagtcgctgcgtgcaggtgctctcccggaagctcacgctcaaggccaaggccctgcacacacgcatccagcagaacctggaccagctgcgcgatgagctcagcannnnnnnnnnnnnnnnnnnnnnnnngaaggggnnnnnnnnnnnnnnnnnnnnnnnnnnnnnnnnnnnnnnnnnnnnnnnnnnnnnnnnnnnnnnnnnnnnnnnnnnnnnnnnnnnnnnnnnnnnnnnnnnnnnnnaccaggagactgaggannnnnnnnnnnnnctggcgccacctccaccaggccacagcgccttcaccccagagttnnnnnnnnnnnnnnnnnnnnnnnnnnnnnnnnnnnnnnnnnnnnnnnnnnnnnnnnnnnnnnnnnnnnnnnnnnnnnnnnntcatgaccaaggccacagccacctgggggagccctgagggtctacctgcccagggccattcccagctccttgtctggggagccctggctctgagcctctagcatggttcagtccttgaaagcggcctgttgggtggagggcggaaggtcctgtgcaggacagggaggccaccaaaggggctgctgtctcccgcatatccagcctcctgcggctcccccatctggatgcattacactcaccaggctttgcaaaccnnnnnnnnnnnnnnnnnnnnnnnnnnnnnnnnnngttgctccattcaagggggagggagtagggagggagaggcaccnnnnnnnnnnnnnnnnnnnnnnnnnnnnnnnnnnnnnnnnnnnnnnnnnnnnnnnnnctgcgtcctggagtttggctctggtcacttctggctgcctggtggccaccnnnnnnnnnnnnccacagagaggagcacttgtctccccagggnnnnnnnnnnnnnnnnnnggggaatagaagggagaaagaggagaatatcatggggacaacatgtgatggtgtnnnnnnnnnnnnnnnggctctgatgctggtgggtatgaaaagtgggggccctgataggagagggcagagcccatgtttcctgacatagctctacacctaaataaggggctgaaccctccaaactgtgggagctccttaaaccctctggggagcataatgtgtgctctccccatctccagcccctccctctggactcccaa

SEQ ID NO: 5118 - DNA, 562 bp, Macaca Fascicularis
tcgggcttcccaacagcggcctactggaaaagtaaaagatgtctgaatatattcgggtaaccgaagatgagaacgatgagcccattgaaataccatcggaagacgatgggacggtgctgctgtccacggtcacagcccagtttccaggggcgtgtgggcttcgctacaggaatccagtgtctcaatgtatgagaggtgtccgactggaaaaaggaattctgcatgcccccgatgctggctggggaaatctggtttatgttgtcaactatccgaaagataacaaaagaaaaatggatgatacacatgcttcatcagcactgaaagtgaaaagagcagtccataaaacatccgatttagtagtgttgggtctcccatggaaaacaactgaacaggacctgaaagagtattttagtacctttggagaagttcttatggtgcaggtcaagaaagatcttaagactggtcattcaaaggggtttggctttgttcgttttacggaatatgaaacacacgtgaaagtaatgtcacagcgacatatgatagatggacgatggtgtgactg

SEQ ID NO: 5119 - DNA, 558 bp, Macaca Fascicularis
  misc_feature (1)...(558): n = A,T,C or G
agtggcagactgggtgtacaatgagcttcgggggcagctggaggagcgccgtgggcgctgggcactccgcctgtgcctggaggagcgcgactggctgcctggnnnnnnnnnnnnnnnnnnnnngtgggcctcggtctatggcagccgcaagacgctgtttgtgctggcccacacggaccgggtcagcggcctcttgcnnnnnnnnnnnnnnnnnnnnnnnnnnnnnnnnnnnnnnnnnnnnnnnnnnnnnnnnnnnnnnnnnnnnnnnnnnnnnnnnnnnnnnnnnnnnnnnnntgtgcggctgcgccagcgcctnnnnnnnnnnnnnnnnnnnntctggccccaccagnnnnnnnnnnnncnnnnnnnnnnngcccagctgggcatggccctgannnnnnnnnnnnnnnnnnnnnnnnnnnnnnnnnnnnnnnnnnnnnnnnnnnnngaatagccctgagctggaatcctgcacggcgccacctccacgctcacctcacctctgcctgcctggctctgatcctcccctgcttgcctccctcaccccacaccaggcac

SEQ ID NO: 5120 - DNA, 545 bp, Macaca Fascicularis
  misc_feature (1)...(545): n = A,T,C or G
aggctcaagcaatcctcctacctcaacctcccgagtagctgggaccacagacgtgtaccaccatgcctggctaactttttgtggagatgaggtcttgttatattggccaggctggtcttgaactcctgagctcaagtgatcctcccactacagtctcccaaagtgccgggattatgggtgtgagccaccatggctggcctaaatttcctatatatattcttttcttgtttctttatgagaatgcaagcatacacgaatatatattcttattttcccaactttttaaatacaaaacagtatactctgtactctgtaatatgccactatgcttatacactaggtttttgccacttaatatgtcatggaaatcttcatatcagtacatgagaaccttgctgagcagtatttggattgtttcccatctttgagcaaatgttgcagtgaaaatcttgttcatttgttacatctttgtgcaactctctgtggaataaatttctgcatatgagattattgagtcannngggtaaannnccnnnntaaanntt

SEQ ID NO: 5121 - DNA, 732 bp, Macaca Fascicularis
  misc_feature (1)...(732): n = A,T,C or G
gtggagcagaaatgtgtggttgtcattgaaggtgtgaacataccctacctctacctctacatgtgnnnnnnnnnncacacacggaggacgtgaacccatgcagaagagcgatgtgacatgttttacattnnnnnnnnnnnnnnnnnnnnnnnnnnnnnnnnnnnnnnnnnnnnnnnnnnnnnnnnnnnnnnnnnnnnnnnnnnnnnnnnnnnnnnnnnnnnnnnnnnnnnnnnnnnntggaagctgtgaggctannnnnnnnnnnnnnnnnnnnnnnngatnnnnnnnnnnnnnnnnnnnnnggtgttggaaatggatataaatagacaattcagggaaatatattgatcttagatctaataagacacaatagattagaagtagggaaattaatgaaaaagcagaattaaggatgacttctcaccggcttgaaatgctaaatggatgagggtgctgtttagtgagttgaggaagactgggggtggtgatgggtgtagaaattgagaaaggaaaatcaagaatttctagaactttcagagtaatgttaaatactttccttgatagttggtcagtcatcatttgtaagtgcatttctaaaaatattgcttaattttgtttttgacctttgtataaatggaattttgtgtgtactgattattttgctcaatattatgtctttaagattctctgtattgttgcatgtggctgagtttatttttgatgctgtgtagt

SEQ ID NO: 5122 - DNA, 339 bp, Macaca Fascicularis
attctccccagagcagaaaagaattccagaggctgcatgtgggctgcttttcccccttcttccttttttccctcgcaaaccaacaaccaaaaagcgtttagtgatggaaagaacaccagtggaaaatggcaaataacaatatttccaagtccgagtcaggtcctctttgctctgctttttcctgtttcattgcaatttattgatttcattgtggttttttgtttgtttggggcaagaacggagatgtgaaccaggacgagccagcagacccccaagccagtatctcctcccagcgcagggaacaccgcctgcaccggcgcatacgcggggaccctggcg

SEQ ID NO: 5123 - DNA, 663 bp, Macaca Fascicularis
aatgtgggctgtttaataggtcgtgataatatttggttaaatattcaacgatatgattctccactaaggataaattttgatgtcaccaagcccaagctatggaaatctttcttttcaagaagccttccataccctggcctttccagtgttcagcctgaagagttaatttaccagcgttcagacaaagcagctgcagctgagctacaagacaggattgaaaaaatactaaaagaaaaaatcatggactggaggccacgccatctgactcggtggaatagatattgtacctctactctgcgtcacttcttgcctctgttagaaaaaagtcaaggagaagatgtagaagatgaccacagagcagaactgctaaagcagctgggagactacaggttctctggatttccccttcacatgccttattctgaagtgaagcctttaattgacgctgtgtatagtactggagtacataatattgatgttcctaatgttgaatttgctttagctgtatacatacacccataccccaaaaatgttttgtctgtttggatctatgttgcctctcttatacgcaacaggtaatttttttcactgtactttttgtatcatgtaaaaactacacaggatatgagaaaattttaaattatatgcatcacatcagaagaa

SEQ ID NO: 5124 - DNA, 743 bp, Macaca Fascicularis
  misc_feature (1)...(743): n = A,T,C or G
tgaaacgagaaagattccctcaccccctcgcagggcatgagacgcggagagtggctcgcttcttcagtgtcccccgctgctcaaacctctaggggagcattaaaactggcaggttgtggggctccgtgttcctctnnnnnnnnnnnnnnnnnnnnnnnnnnnnactagggtctcaggggtttttatagacatagggttggggcgnnnnnnnnnnnnnnnnnnnnnnnnnnnnnnnnnnnnnnnnnnnnnnncagcagtgcctgtcctcacctaggtccgtgggcacaggcctggctagggaccatgcccttctcttcccagcacttcccagccctcctcccgtgtaagtttcatgcaatcaaaaatgtagcaggtgacaaaggaggtaaaccaagaagttactgaatattattttcacaaatcctcactgtccacaggtaaattgaagacccttaaaaacttctgaattcttatttatatttcatgtaataaatatctactttaggggccaaaatatggcacaatgaaaggagaagagtacagaagttagagttgaaagccctaaggacaaatcagccnnnnnnnnnnnnnnnnnnntttagggcaataagtataaataataaaataattgttactatatatggatcnnnnnnnnnnnnnnnnnngaactatacatacatnnnnnnnnnnnnnnnnnnnnnnnnnnnagaattattatcctcaannnnnnatagataactgaa

SEQ ID NO: 5125 - DNA, 2070 bp, Macaca Fascicularis
attcgggaggagaggggccccgcccctccgcggaggctcctaggagggtttcgctcagcctagcctcgcacctgcctgctgccgcgcgaccctagaggcgagattccgccgcctggatatcgcaggaccatggagaatcccacccctccctgagtcagtgcgggctgaggtcccggctccgcacgggcgcgcctgcgaggcggactcctcccagtcaccggccttcccccagagtggggggctccggccagagcccacaggacctgggtctaaggcaccatccgcggccgaacagtggcgctggggtctgtctgcgtcctccccgcccccggggtgagacagacaggaccaccctagagcctctgggccaggacggtcggagccggagtccccatttgggcctgcatggacgccccaggctgcccggcccccagcgcgaactgtgagcccagactgcgctttccctgttcccaggccagctgctgggccgaggctggggggcttctggtggctggggctgaaccggctaggaacaggctttaataggaggggctcgggtggaggaaaggctcctgcaaaggttctgccagtatcaggtcaggtggagggaggagaggaccggtgtggccaggctgcggaagccagcgcaggaaacaagggcgggggctgctcattacagaggctgctggaggcttgtccgaagagcagcgggcagcacggaaaggcttggggacacagacacgctcagacttggcgtttcaccaggcattctttagctgcctgaggggtggctgggctgtgtgagatgaccctgctttcactaggttaggaattatgactggtttccagagagaacattggttagtgattggctatgggggagagggggcgttgagccaactggggtccccctgaagcgccagcaaagtctctggttttctccaggatctgtttccttagtccctggcaggattggctccgctgcatgccatgtccgtgtgatcccttccagccagaaaccaggagttaataaagtgaataatgacaagcgctcaggccactgccgtggagggtgggccacaacccagagctgctcatgcgcagggcaccctggcctccaggtccctcggaatggcaggagctggaggtgggagtggagactgtgggagctgagcctgcagtgagtggccaggagccagctggggctgggcctggtcggtcactgttaacctcccccggaggtcgtcagtgggataagcacctgggtgaagacgcctgcctgtttcaccagtgtccctgccctcagtcccccagtccatgaagagtatctgtgtgaagactggggtatatagggcagcgccatgtgatgatgatacatgctgtggccagctgggcaacgctgttttcagctccacagtctgccaggtggggtgggggctgtgagccacagcaggagcgagccaggcctgggtttggacacctgctgctctgcctcgtccgggtgctgatgcaggaacgccccttctcccacccttggtgcaacatctgacctgaaccagcttccccagcccagcaacactgctcccctaatgtggatgtcaacctaaagaaagaaactgaaccacagttcatatagagagtttgtctgggccaaggctgagagagctgcccaggacacaccaagttgccctgggagtgcttccttcagccttatcacaagcaagtttttaaagactgaaggggacagggagtgggctgatatcaaataagcaggatttctgactgctttccagagagaaccttagtgactggctatacagtgttggactacagggttatggtgtccagcgcatggctttttatgtctacttggcgtgtttggaactcacaaaggatgtggcttcaagaggtctttagctcaagtgggagtgggatgtgactgctgtttcattccagtgcctctctgagccagataattaaagggggctcccattcctcagataaaaagttccttttctaacaactggccggttagctcagttggttagagcgtggtgctaataaaaactt

SEQ ID NO: 5126 - DNA, 2245 bp, Macaca Fascicularis
  misc_feature (1)...(2245): n = A,T,C or G
tgagaggccctgtgcccccctcgcctggtctccctctcacccctgaggggatgccgcagctccggggcccgcgggcaggaagggcgcactggtcggcccgggagaggggtctgagcagagggcagggtgcaggcggaatggccctggtgccctatgaggagaccacggaattgggatgcggccatcgttctttccacgtatctgggtgctggcacggggctggtgggcatagtggctgccttgctgggtgctcatgtgactatcacggatcgaaaagtagcattagaatttcttaaatcaaacgttcaagccaacttacctcctcatatccaacccaaaactgttgttaaggagctgacttggggacagaatttggggagtttttctcctggagaatttgacctgatacttggagctgatatcatatatttagaagaaacattcacagatcttcttcaaacactggaacatctctgtagcaatcactccgtgattcttttagcatgccgaattcgctatgaacgggataacaacttcttagcaatgctggagaggcagtttactgtgagaaaggttcactatgatcctgaaaaagatgtacatatttacgaagcacagaagagaaaccagaaggaggacttataattggctataatttataagaatgctgtcattgagtgtgccacttaaggtcttagactgcaaatctaaacatatttaatgaaatgtcttactagtacaaaaagtctaaagcaaaggttctcaggggagaaagcacatgtgcagttttaaaacaaagcagtgcttttgtcccattgctatgagttttagtcatatttactcacactgaaatccaattaacattaaaggattaagtgtgagattttggtttatgctatttctgtatctcatactactccctcttaataaagtttccactgatgacatgaaggctggtataaagatgtctttaaaatgagcaagctttctttggtaagattaaatcttaacaaattatttttaaaaccttctgatatatacaatgtttagccaagttttctaattttctggatgtaaaacaaaaggtttaacatacattccttgagctgttagtgctattgaaaccttttgccctgtttagatccttaaaacttttagttggttgagtaggatatgagtttttttgagtctcatatcatactttttgccttaatttcaggtttatatatgttaataaaggaattaaataaaaatgaaatttcagttactttttgaaagcacctgaaatctggctgggtgcggtggctcatgcctgaaatcccaccactttgggaggctgaggcgggcggatcacctgaggtcaggagttcaaaaacagcctnnnnnnnnnnnnnnnnnnnnnnnnnnnnnnnnnnnnnnnnnnnnnnnnnnnnnnnnnnnnnnnnnnnnnnnnnnnnnnnnnnnnnnnnnnnnnnnnnnnnnnnnnnnnnnnnnnnnnnnnnnnnnnnnnnnnnnnnnnnnnnnnnnnnnnnnnnnnnnnnnnnnnnnnnnnnnnnnnnnnnnnnnnnnnnncaaaaaaaaaaaaaagcacctgaaatcttgaataggttgtctatttcaagtcaaaagctgaggttttccccttctgctttacccttgctcaaatgtcttaatgcagttctttcccgagctttccttgcttccttaacaatgcatcggatgacattagaagttttaaatctcatccctccctgagaggttagctttttgtattgtacttgtaattgctcattcaacattagtattgccccatagagtgaagcttcttgagggccaagaatgcttctgcctcttccattgttgcttcccgagtaccttctgtatatttcataaccaaataatgaaaaagatatattccatttaaaggacattgactttgggttaaatgattgttatactgtttgatgattatctttgatacactttgacatctcacatacacacgaacttttctttttacaatgcaaacgtttaaacaatagcttaactttagactgcaagaatattatgatctcaatatggtatttggtactagagatagatttcttttataaaatcttaaaaacaggacgttctcttccttttgatcccagaggtgaaaatattcagtatgttgttttctacatatattgaaatagcagtttcactttaataaagatggattaaaagttgaaaaaaaaaaaaa

SEQ ID NO: 5127 - DNA, 3005 bp, Macaca Fascicularis
  misc_feature (1)...(3005): n = A,T,C or G
ttttaaagccccaaaagtttatagttcactagaccttagcttttcagctgtttggagaagtatgcgtttttccagaatcattgtccattcactttagtgctactcaaaagagctgctcccagaaagccctggaggataaaaacagggctttcttatttggggatttgctgttaggctgacagtgaccagctggtgacaagtgtgacgccaggcatagcagtcccgtgaggctggtctggtgtcttgctggtaaaaacagggctttcttatttgtggatttgctgttaggctgacagtgaccagctggtgacaagtgtgacaccagcagagcagtcccgtgaggctggtctggtgtcttgctggtaccgtctggtgagaattaaagcagccccccgaaaaagttggcctagagtgtagaatttaaaatggccgttctttttggttcacgtgtatttaatgtaatataggtgcacttttttacatctgtcagatttgaataaaataactgatttttttattgaacattgtgttgttcatgcttttgaagaatgaaactgctttttctaaaggtgacatgggattatgtgtatgtgaacatgaatgtctcttttcagtttctgcattaaagtattcagatgtctagcgtgtgcaagatattttatgtagcatactaattttgaatgtttttaaattattgaggttatgtccttaagtaaatatagatgatgactaaaatgttttattctggaaaaaaacaaagttaggcattttagtgaaaagaagtttataattttcctttttgacatcttctgaagaacgcattgcgtaaaatactgtgttcttattttcagaaggatttgagtcaatggaataagttcaccattcccttgaacttactttactttttcctctcgtgtttcaggaaactcttatcactactgttgattctagttccaggtatgtgggagctttcttttaaagcagtggtggatgggaaggctcatgggtccaggctggacaaggtgcgtcccccacctgctgggttcctggacctgacactgtgctgtctcagcaactttccactgaaggctggactgttcagagcgctcagccccaagctttcaggcaggggacagtgaacaccgtccacagccacgtgatctcgccgcgtgatctcaccggctggctgcatccaccccaaggaacaaacagaacaactgcatttccttttcccccagggcagcatcttaggcggccagtcccacagcgcctccctggctcatccaggcagactttccatttgcttcctttcagtccatgtctgtttcttaaactctagtgattacatttccctaagcacgggtcagtttccctttgtcatttttgttagctttaaagttgaagctggtaatctgcgtgtagcatgactcaattgttctaggcaccagatttgtttatgatagtccaagtgcacattcacatttttggcagctctaccatattgacttccataatagccactttttttggacccaagcttaaaaccacacatttgtatttcatcctgtcaaatttaactgcctcagtctgttggtgttttggaatattccctgcccacaggcagtatttcaccctactcttcattaacaagccagtttctttctaaagtgaagttgaaaaaccccaccaaaccccactaagacaaaagttatgcttgtaattcttatgaaagttacacttgtaatccttatgaaacgattgcacttacaatccctatgaaacacatatgtagacctagtctatttctgaagtcttacacattaattttcattttctaagaaattaagtcaaagatcgaaatctaaagattcaaaactaatttaaagattcaaatagaaattatagctcatccctcctttgtctctgatttgattcataatctgtaaaatttacagatcgaacttctatgcatcaggactgtaaattaggcatttttttggtgggggtgtgaatttagacctgtggaccacacacgaagtagtttggccattctgtttcttaaccttttaaatccacttcagcacaggttgtaaagattagattttccaaacctaagcttaaagctgtggtgttaatggcagccttaataatcacagggcccatactcttcaactttacagctggtggggcgtttgttttttggtttgtttatttttgttggtttatttttgttagtttgtttttgagacagagtctcgctctatagcccaggctggaatgcagtggggccatctcagctcactgcaacctctgcctcccaggttcaagcgattctcctgcctcagcctcctccccagtagctgagattacaattagctactgccaccacgcccagctaatttttgtgttttttggtagaggttttaccatgttggccaggctggtctcnnnnnnnnnnnnnnnnnnnnnnnnnnnnnnnnnnnnnnnnnnnnnnnnnnnnnnnnnnnnnnnnnnnnncgttcctggccaagtggggcgtgagttttctcataaagccagtagggcagagtgattcctgccctacatatagcggggcatgcattacactcatgtcacttttagcaaatccaggtcgccttttcagcaaaattggttacagagttaagaaaaacatgccctggtaattttctgttagaaagggcaaagactttgagttcaccacagtgcacatgatgtcagcatgattgctttttgtgtctttctagttggtggaccaactgggtgatccctgccatctctgcagtggccgtcgccttcatgtatcgcctatacatggcagaagactgattacctcctcagaagccagcacagggaaacctgctttggtcacaggagaaaagaagccattgctaactacttcaactgacagaaaccttcccttgaagacaatgattttaatatatctctttctctttcttctgacattagaaaaaaaaaaaaaaaaa

SEQ ID NO: 5128 - DNA, 721 bp, Macaca Fascicularis
  misc_feature (1)...(721): n = A,T,C or G
gaagagaactctctcnnnnnnactaagtgatataacctacttggccagcattccaaatagactcagacttaccgccctgagcctgcacagagccaggtgcaatgggcagtgagtctggccaaaacgtaaaccccaccctccctgctgtcattggctctccctcnnnnnnnnnnnnnnnnnnnnnnnnnnnnnnnnnnnnnnnnnnnnnnnnnnnnnnnnnnnnnnnnnnnnnnngttgttggaatgaattttgaaacttctcagaaattaatctgaaatggnnnnnnnnnnnnnnnnnnnnnnnnnnnnnnnnnnnnnnnnnnnnnnnnnnnnnnnnnnnnnnnnnnnnnnnnnnnnnnnnnatgccacagctcatctctagcaaggaatttatcttcaggtgaagaagagaggaagcaggatcccactgaacacctcttgcagaaggcaaggaccaatgtttgaatgtgtttcagatgtcatgtgtttagtttttatatgtgtgtacataattatgtatagagatagacttgtgtatacaccttccacaaacacatcctnnnnnnnnnnnnnnnnnnnnnnnnnnnnncttctttctcctgctctcaagttggaacttgcattgtgataagttttggaaattcaaaagtactgcaacgtgttgaaataagaaatacttaatattgtcaaataacttgtgattgtcttgccatcaataaaa

SEQ ID NO: 5129 - DNA, 717 bp, Macaca Fascicularis
  misc_feature (1)...(717): n = A,T,C or G
acaannngctcnnnnnnnnnnnnnnnnngcaatagnnnncagaaaaatacttaaattcccttaatggtgttgttttctatttgttctggttttgagataaatgagtgattctgtcccaaaatgtccatttttgaagtgattttcctggaggattagggtatttagcagttgaagctcttcattcatagtagttactgtcagctaacaggtttttttaaggcttttaactattaatattttatggaatggggcaaagtaaattgatgaaagaattggagtgataagtaaatagtcctatacaaacatacaggccataaaaggatgaattnnnnnnnnnnnnttatnnnnnnnnnnnnnnnnnnnnnnntatttaaacctctattattttagacaagattgtccagaacttaagtttgatctgtcagccagtactcccattaaattcagtgtggtttcacttgagataatcagatatgtcatcgaaatgttagcagcagcttcatcctccttnnnnnnnnnnnnnnnnnnnnnnggatgttttgtttaataatagccatagtgtgtgtttannnnnnnnnnnnnnnnnnnnnnnnnnnnnnnnnnnnnnacatgtcagtgcagtggaatgtgcattctctgagtgttgttttgtggtatcattgtctttcctgaatgactttctaactgtgcagnnnnnnnnnnnnnnnnnnacaagta

SEQ ID NO: 5130 - DNA, 746 bp, Macaca Fascicularis
  misc_feature (1)...(746): n = A,T,C or G
ttccagggaaggcacccaggggcaagtgccatgcatggcatctcccaggagggcagaggagtgggtctctccagaaaaaaactaagggacactgaggctgggtgtctcctgcaggtggggtggggccctgggagccagggcagagcctgggcccaggagaggagttggggtcggtttcggagctacaaggtctggggcccagaaggcacagcctgggcgtggccccctcgagccctagggatctgccacagcagcgagcacctgcccatgcccacaactggcatctggagcgagggcagatcagggcaggagcagctgcaggaggggacgggttcctgtgagccgagggcaccgtnnnnnnnnnnnnnnnnnnnnnnnnnnaaaagaatctcatcccagcctgtggaactcccgaagcacacgcggaattacannnnnnnnnnnnctccaagttgggagggaggggcctggagaagacctttgccctgggcaagtgtgtgccccccgtggctcccccacacagcagcccgcagcctagatggaagctccagggtgcctggagcccctggtgctcctccnnnnnnnnnnnnnnnnnnnnnnnnnnnnnnnnnttggttccccatctgtatgaagannnggggtagtactgggtgatcctcaagccctcctgatcttacctctacagaggggtccccgtgacagcatctgtcccctcaactcagccacatcatnnncagccctccctc

SEQ ID NO: 5131 - DNA, 630 bp, Macaca Fascicularis
  misc_feature (1)...(630): n = A,T,C or G
gataacaggcatgagccaccgcccccacccaggttnnnnnnnnnnnnnnnnnnnnnnnnnnnnnnnnnncccctgaagcccccaaaactctcaaaacaatactnnnnnnnnnnnnnnnnnnnnnnnnnnnncagtgttgagtgtgggctctgagtcatactgcttggnnnnnnnnnncattcctgtaatttgacataactcagattcctcttttgaaaaacaaggattaagtagtgcttccttcatagggtctctgtgaatannnnnnnnnnnnnnnnatgtagtctccttaccacagcattacacacnnnnnnnnnnnnnnnnngtagcatggggcagagttaggccctcatatttnnnnnnnnnnnnnnnnnnnnnnnnnnnnnnnnnnnnnnnnnnnnnnnnnnnnnnnaaaaaatctttaaatttgaaataataatactcatacaatttattttaatatcatttttcaaatttaatttcattttcacctttaatatttcataaggattcaagaatcagatgcagggattctgtttctctcctttttgttgttattgttgttgttttacatttaggatttcaatgtggaatctcagatttcttttgtaaactcctttactgtcagat

SEQ ID NO: 5132 - DNA, 751 bp, Macaca Fascicularis
  misc_feature (1)...(751): n = A,T,C or G
gtcaaagannnnnnnnnnnnnnttaacccatnnnnnnnnnnngtatttctagannnatcaaacagtgcctcctacatccaggacgcctttcagctactcttacctgtgctagagatctccctnnnnnnnnnnnnnnnngaatcacacaggcatgagctgcagggccagaagcctttgctagaacattgaagaacggagatgtttnnnnnnnnnnnnnnngatggccaaggaatgccaccttatctggctnnnnnnnnnnnnnnnaaggagtggggttattttagtatataaaaattcaggcaggagagatggtttaaagagaaagattgttgccttcagtgtttgattgaagtattcaggtcctcacagtattctttccagttgttgtaattcataaattatttgaaaagaaacttctgtagaaagtccaagaataataactctagataaaggttagtgnnnnnnnnnnnnnnnnnnnnnnnnnnnnnnnnnnnnnnnnnnnnnnnnttatcagttttgttgtgggtataatttgcagcccatggatataactggttgataagccagagaaaaataatttagtgttctaaaattcatggcatgtgtggtttattgatgccgtgtactttctnnnnnnnnnnnnnnnnnnnnnnnnnnnnnnnnnnnnnnnnnnnnnnnnnnnnnnnnnnnnnnnnnnnnnnnnnnnnnnnnnnnnnnnnnnnnnnnnnnnnnnnnnnnnnnnnnnnttctt

SEQ ID NO: 5133 - DNA, 4284 bp, Macaca Fascicularis
tgctggaaaaaaaaaaaaaaaaagagcgaagctgaggagtccagcgctcgccgccagggccctgggctgtcccgagccggaatccagatcttacataagatggaagtttctcacactagatactgaacattaagtagaaaatctagtaaaatctaagttgccatggaagaaataccagtaaaagttgctgtaagaattagacctctgctttgcaaagaagttcttcataatcatcaagtttgtgtgagagttattccaaacagccagcaagttatcattgggagagacagagtcttcacttttgattttgtttttggcaaaaattccactcaagatgaagtttataatacatgtataaagcccctagtgttgtcactcattgagggctataatgcaactgtttttgcctatggacaaactggatctgggaagacatacaccattggaggaggccatattgcttcggttgtggagggccaaaagggtatcattcctcgagctattcaagaaatatttcaaagcatctctgaacatcctagcattgagtttaatgtgaaagtatcttatatagaagtgtacaaggaagacctaagagatcttctagaattggagacatccatgaaggatcttcacatccgagaagatgagaaaggaaatacagtgattgttggggccaaggaatgccatgtggagagtgcagatgaagtgatgagccttttggagacggggaatgcagccagacatacaggtaccacccaaatgaatgagcactccagcagatcacatgcaatttttacaatcagcatttgtcaagttcataaaaatgtggaggcagctgaagatggatcatggtattcccctcggcatattgtctcaaagttccactttgtggatttggcgggatcagaaagagtaaccaaaacggggaatactggtgaacggttcaaagaatccattcaaatcaatagtggattgctggcgttaggaaatgtaataagcgctcttggggacccacgcaggaagagttcacatattccatatagggatgctaaaattacccggcttctgaaagattctctgggaggcagtgctaagactgtcatgatcacatgtgtcagcccctcctcctcgaattttgatgagtcattaaattctctcaaatatgccaacagagcacggaacattagaaacaaacccactgtaaacttcagccccgagtcagaccgtatagatgaaatggaatttgagattaaattgcttcgagaagctttgcaaagccagcaggctaatgtcagccaaactagccagatcaatcgagaagggagtcctgatacaaataggattcattctcttgaggagcaagtagctcagcttcaaggagaatgtctgggttaccaatgttgtgtagaagaagcctttaccttcctggttgacttaaaagatactgtcagactaaaccaaaagcagcaatacaaactgcaggagtggtttaacatgatccaagaggtcaggaaggctgtggtcacctcatttcgaggaatcggaggcactgcaagtctggaagaaggaccagagcatgttacagttctccagctgaagagagagcttaagaaatgtcagtgtgcgcttgctgctgatgaagtagtatttaatcagaaggaactggaggtgaaggaactgaagaatcaagtgcagatgatggtacaggaaaacaaagggcatgcggtatctttgaaagaagcgcaaaaagtgaatagattgcagaatgaaaaaataatagaacaacaacttcttgtggatcaactgagtgaagaactaacaaaacttaacctgtcagtgacttcttcagctaaagaaaattgtggagatgggccagatgccaggatccctgaaaagagaccatatactgtaccatttgatactcgtttggggcattatatttatatcccatcaagacaagattccaggaaggtccacacaagtccgcctgtgtactctctggatcgaatatttgctgggtttcgaacacgaagtcggatgctgttgggtcacatagaagaacaagatgaggtcctccactgccagttttctgataacagtgatgatgaagaatcggaaggccaagagaaatctggaactagatgtagaagtcgttcatggattcagaagccagactctgtttgttcccttgttgaactgaatgatactcaggatgaaacacaaaagtcaaatttggagaatgaagatttaaagattgattatctccaggagagtcaagaattgaatttgcaaaaattaaagaattcagaacgcatacttactgaagctaaacaaaaaatgagagaacttacaattaacatcaagatgaaggaagatctgattaaagaattaataaaaacaggtaacgatgccaagtctgtaagcaagcagtattctttgaaagtaacaaagctagagcatgacgcagaacaggcaaaagtcgaactaactgaaacacaaaagcagctacaggagctggaaaacaaagatctttctgatgttgcaatgaaggtaaaattacagaaagagttccgtaaaaagatggatgctgcaaagctgagagttcaggtcttacagaagaagcaacaagatagtaagaaactggcatcactgtcaatccaaaatgagaaacgcgctaatgaactagagcagagtgtagatcacatgaagtatcaaaagatacagctacaaagaattacaattaaaaacaggacaggaagaaggtctaaaaccaaaagctgaggatctcgatgcatgtaacttgaaaaggagaaaaggttcgtttggaagtatagaccaactccagaaattggatgagcaaaagaaatggttagatgaagaagtagagaaagttctgaaccaacgccaagaattagaggagctggaagaagacttaaagaaacgggaggccatagtttctaagaaggaggctctattacaggagaagagtcacctggaaaataagaaattgagatctagtcaggccttaaacacagataatttgaaaatatcaactcgcctgaacttactggaacaagagttgtctgaaaagaatgtgcagctccagactagcacagctgaggagaaaataaagatttcagaacaagttgaagtcctccagaaagaaatgaaaatgaaagttctggaacgggataatatggttcgtgaattagaatctgcactggaccatctaaaattgcagtgtgaccggagactgaccctccagcaaaaggaacatgaacaaaagatgcagttgctgttacatcatttcaaagaacaagatgaagaaggcattatggaaactttcaaaacatatgaagataaaatccagcagttggaaaaagatctttatttctataagaaaaccagccgggatcttaagaagaaacttaaggaactggtaggggaagcaatccggcggcaactagcaccatcagagtatcatgaggctggagatggagtcctgaagccagaagaaggaggcatgctttcagaagaattaaaatgggcatccagacctgaaagtatgaaattaagtggaagagaaagagaaatggacagttcagcaagcagcttaagaacacagccaaatcctcagaagctctgggaagatatcccagaattacctccaattcatagttctttagcaccccccagtgggcatatgttaagtaatgaggataaaacagaaataggtgataatcagtttacaaaatctcacagtcgactatcatcccaaattctggttgcgggaaatgtgggacaacttcatggtattacaccggtaaaactgtgtcgaaaagaattacgtcaaatttccgccttagaactatcattgcgacgttccagtcttggagttggggttggatcaatggctgctgattccatcgaagtatctaggaaaccaagtgacttaaaaacttagatatttaataatagaactttcagtagatatgtaaaaagattcctttttctaacctgttaaaaactaaagctcaatttcactacctctttcctcagaataaaggaagaaggggaggaaggaatctctaattcttttatatactatagatgtgtacatcttctatagaatacttgggaagtttaatttatatttccatagtaaacatgttttccaatacttggtaacatttaaatatttacatttgtaaatacacttaaatgtttttccaggcatatttgaagaataaaactaataatagactaaaaaaaaaaaaaaaaaaa

SEQ ID NO: 5134 - DNA, 774 bp, Macaca Fascicularis
  misc_feature (1)...(774): n = A,T,C or G
tcagnnnnnnnnctntggagctgagtgagcagtcactacaggagcttcnnnnnnnnnnnnnnnnnnagccggatctggtcatcgcacacccagtgctggacggccacccagaatctcccaaggaactcgtctcaaccttctgaggcactggtggccagagcagggtggaagaccctagtcaaagtccctatggagagaacggcccattccaagcgcgggaggacattgctctcagcctctgggaaacttctgagctgagaggccccggacaggcatgtgggaggcccagacatggcaccctgccccgtccaggacaggtccaggatctgcccctctctccatactctgggggactccttctcccccggcctcaccactactgcacccaccttcctctcctgggcccctccagccattccccttgaagacaccccccaaccaacccaagccacaataatgatggtgagagctcctacctggagcacaatgacccttctctgcccaacccccatctgcagtgtggcccagcagcccccaggactgtgcccctgtagaccgaaggtaggcaggtcaccgtccctccctgttaggaatgagaccatccctgaggcnnnnnnnnnnnnnnnnnnnnntccagggtctgagatctttgggaagggagactagggcagggtagagacagagcagaacccctgtgctgggtgggaggcatgaccacatggcgggtgagcagcccccatgcactgatgataaattctcctgtgcactcatttc

SEQ ID NO: 5135 - DNA, 712 bp, Macaca Fascicularis
  misc_feature (1)...(712): n = A,T,C or G
tctannnnnatannnnntaaacttaattcaataacatgctttctgttgtataatgtatctggtttaggtatttataatatgtttaaaatttaattgggcaaaggacatgtttttcttttaaaaagtacttatattgaaaattaagatgtctggattactatgtaaattctaaagagtagcagacctctcatttaaagtcttaagtgagtctcttttgacatagatagcaatagaagtatctttcttctttcccctttctttttctaaacaagggaagaaaagtgtaatagaggggagaacacataatgccgactaagggtagtgcattaagtcaaaaacagtcttggcaggtatataggaatagtggtttcccgactggttgatgaccataatcgccaagaacagtggttcccagtcttggctgcacattacagtgatctggaacttgaatgaaatactaattttaaaagggtgcagtggttcatacttgtaatcccagcactttgcaagtccaaaatgggagaatgacttgagcccaggagtttgagaccagcctgggcaatgtagggagaccctgtccctacaaaaagatacaaaaagtagccgagtgtggtggcttccacctctggtctcagctacttgggaggctgaggcaagaggatcacttgagccccagaggttgaggttgcagtgagccatgatcacaccactg

SEQ ID NO: 5136 - DNA, 803 bp, Macaca Fascicularis
  misc_feature (1)...(803): n = A,T,C or G
gtgctcactcgtgtacatcnnnaggactctatnnngacccacagaatcagaccatgaccannnncacctggaacatcaaccacgcccggctgatggtggtggaggaacgatgtgntnnctgtgtgannnctgacaacagtggctggaccgaaatccgccgggaagcctgggtctcctctagcttatttggtgtctccagagctgtccaggaatttggtcttgcccgattcaaaagtaatgtgannnnnactatgaagggttttgaatatatcttggcgaagctacaaggcgaggcgccttccaaaacacttgtggagacagccaaggaagccagggagaaggcaaaggagacggcactggcagctacagagaaggccaaggaccttgccagcaaggcagccannnnnnnnnnnnnnnnnnnnnnnnngtttgtgtagccagcccaccaccaccacagcaccccagacagctagnnnnnnnccctctgccctccctccattgtactttatcattcaaaatcaacttcagccctatctgctgtctgggtggtgggttgtggggaggcagtttggcatctgcaggacagcaaggcacgtgattcnnnnnnnnnnnnnnnnnncttattctcccatggggcagctgaggaccgaggcacnnnnnnnnnnnnnnnnnnnnnnngctccaggtagcctgcannnnnnnnnnnnnnnnnnnnnnnactgtaagccccacgagggcagggcttttggttttgttctctgaagtgtctcaatatctagcacataatagacactcaataaata

SEQ ID NO: 5137 - DNA, 748 bp, Macaca Fascicularis
  misc_feature (1)...(748): n = A,T,C or G
catgggagttggcgtacagatgatnncgtcagcctggtagtgagcacggtacctggtgggcagttctgggatcctctcnnnnctgccactctcaagcaggccccggtgtctgttgttccttctttgtgtccacacgtgctctgtgttcaactcccacttacaagtgagaacatgtggcatttggttatctgttccttcgccagttcacttaggaaaatggcctctagctccatccatgttgctgcaaaggacataatcttggtcctttttatggctgtgtagtatgccgtggtatatatgtaccacatttcctatatatttttaagaatgattagaaccccattcttaaatgagagctcttgtttatgtgggtaatagtcatcaatatttaccatattagaaattaaaataggaagtattaaaatatttctatatttaattagcaataataaacctattacatttttgcaaatattttaatgtctagcttgataaaagataggctctcgaatctcacattcattcctgtgatatcacaagccttgcggcccgtggaggcctctgctatgcactctgtgagaatgagagtgagcaaggccggtggcggcttaggacgctcaggaaggtggttctgtggacctcctgaaaggccttaggacccagcggtcgcagaagcatgtgggagagtatgtatctggacagtgttatcttaatgctcctgcggaatcgtcctctggtatttggcatc

SEQ ID NO: 5138 - DNA, 1836 bp, Macaca Fascicularis
gcactgtatagctgccccagtgagggcgcagactgtactggcctgcgcggagcaaggcggtgtttctggtgcagctacccaagaagccactggttccagagatggggccagcctccaagccgggccatgtgccacacccaccatccacatgtggcagctcagcactccagaaccaacgccgaaacaagaggcaccctcagccctttagccactttctggatttcctgactgagagccatgtcctggacagcctggagacagtggtggagaaggcgactgagcgcatggctgccatgaagaccgaggctggggtgccgcttgtggaggtgcaggacccagtggaggtgccaagtggtgggcggcgggcacatgcccggcccagcctcagcactgtacaccggcaccgtgtacggccgaccctctgcactggacaccccaacaactacccatccagctccagctccatgtccgactcccatagcagcctcatggctggctggctgggctcccacagccgggacagtgacctaggtgcccaaggtttaggctcactgccacctgtgaaggacaaactcctgctggagaagaatctcaagcggctgctacagctggagaggaaagggaaaggcctcagtcagtcctgctccaagagggactccctgctgtgggatttgctgggcagccagaccagctttcagtggacccaggagcagcccctgtcctggttctcggagctgctgggctcaagctctggtgtgcctgaagcatcagagccgaggcctggggaacaggagccgatctgcaaacgagagttcaataaagagatcaagtcgttactgagccagctggagtccctcgacctgcctggctactgtccgctccgtgagccccatcgcacactgaacttcctggctgaccaccgcctcttccctgccctgcagagcgtcgtcaaccaggctgtggataagctccgcggcgcccgctgccgcgacggccgtcctctgttccccaccagcttggagcccccctcagagctgcaggttcaacgcaatctgccgccgctgggctctgagccggctgaacccaccaacagcgggcagccccaccccacagtctccagccccaagatgcctcagagaaaacacaaggacagaggaggctccccctccatgtctagtgcccaggtggccaccagattcaagctcaagagcccccgcagcagtggcaggttcacaaagaagaagccgctgccctccatctcatcgaagtccagcatgtctcacttctccaaccgcctttatgaggagctcgccgacttcctgacccagcaggcagcctccctgctcatccgcaagtacgagtttgaaaaggacctcagccggcagctcagcccattggagcccaagctctcagtgtccgctggcaccggcatgggttccagtctccccaagtccaaggacacggacagtgaaggccatgatgaggccgaggttgaagatgaagatgaggatgagtacaaggatgaggaccaggatgaggacaaggaggaggatggagtccagagcctcccagaacctggagaggaggcctcggtcagccactctgtggacgtgggccatagtgacccaccatgaagtccccactggccactcgattccctgctctgtcagagttgctgcccatcacaccagcccctgccatgagcagagtcaccacaggctgaatgcccacgaggagctctgctgagactctcaggggagccagcgaaagaaatagaaataaagcctgtgttgctgggacacaggtttgttgtcctgaaaaaaaaaaaaaaaaaaa

SEQ ID NO: 5139 - DNA, 675 bp, Macaca Fascicularis
  misc_feature (1)...(675): n = A,T,C or G
cagttaaaggtggccattgctttgattctgctccactttagagtgactccagaccccaccaggcctcctactttctccaaccactttatcctcaagcccaagaatgggatgtatttgcacctgaagaaactcnnnnnnnnnnnnnnnnnngggtacaatgattaaatatactttgtttttaagttaaattcnnnnnnnnnnnnccaagcagatagaaagggatcaatgtatggtgggaggattggaggttggtgggataggggtctctgtgaagctacacatgatccaaaatcatttctaggtacacagtgtgtcagctagatctgtttcnatatgactttgggagatcttcagatcttttctgttaaactttcactactgttaatgctatatacaccaatagactttcctatattttttgtcgtctttaaaatagnnnnnnnnnnnnnnnnnngtaataagtgcatgtatgctcactatcatacaagttcccaacactagaaaagcatgtagaataaaaattttaaatctcacttcacatagcctagattctataccctgaccaatcctactgcttttcctgaaaacagaataatttggtgtgcattctttcagctgtttcctatacattttttatgtaaaatacnnnnnnnnnnnnntatagatgtgatcatt

SEQ ID NO: 5140 - DNA, 693 bp, Macaca Fascicularis
  misc_feature (1)...(693): n = A,T,C or G
aggctgctttnnnnntcggcccnnnnnacgtgcccnnnctctgacctcaagtctgccatttctcccccatcccagtgtctccacttcctaagtgatcttagcctgttcttcccccacgctgcccaccatgcctcttttcagtgaccctggcctgaccttcccctcccataatgtccttttccaacctaagcctctgtgtacccctcctggctcctcccagtgtctagcctgcccctctttccacagggtgcccggcacccatttgcccaggcagtgggcaggaatatagccaatcccannnnnnnnnnnnnnncggcttccaacatgttgcggcatctcaatcttgagtatcactccaacatgattgcagatgcagtgaagaaggtgatnnnnnnnnnnnnnnnnnnnnnnnctcgagacnnnnnnnnnnnnnnnnnnnnnnnnnnnnnnnnnnnntctgtcnnnnnnnnnnnnnnnnnnnnnnnnnnnnnnnnnnnnnnnnntctcccagccttgcaaggaccacactccccatacnnnnnnnnnnnnnnnnnnnnnnnnnnnnnnttgtgcctctaggcagtggaccatggtcannnnnnnnnnnnnnncctaggttcgaacctctgacatgggtggctatgctacttgccatgacttcactgaggctgtcattgctgccttgccccaccc

SEQ ID NO: 5141 - DNA, 2619 bp, Macaca Fascicularis
tttaaaacttagtgacattaaacttttcatgtggttggttgtgaacaaatgaatatataaccacgatgtaatccagtgttgtgctgctgctgaatgtttaacaaccatctttcatgaaagaaaaaaggccctgttttgtagtgtttactaatatttgtggtataaatactgtcttcatggtgattttacctgccaatctgatgtcattaaatgcagtttgatgaaagagatagcaaaccagtggctctcccaagcctttgcaaaccagcacagcaaaggacataaatttccacaactcattaattaaatgtattggtcatttgattattatatccagtatttgaagagcttttatattgttaattcatttggcaagcatttggacacttgtttatttttagagatatactgggcacctgaggtatttaatctgcaaagacccaagttttgtgaagcttggttttaaaaagtccaattattgtgctcttataggggttgcacattcaaggcttacactgaattctgtctgcagttctgttttgtgtgaccagcacagtgttttaaaatgttgcactccgaatccaactttttaaaatggggcatgtgctcttaaggtgaccactagcttaccactcccagtttttcttagtctcaaacattcacatgcttttcaaggcctttgagttggcaaatcctgaatatatagtgaaggtaggaaatggctcttcttatgccacatgttagtctgattttgaagtcagttgtataaggttgggctgacagtggtattttccagtgaagactattgccaagaatgcatatcattctgcttattttattctagtggaaaaaaattcagtgtatatttaagtgtatttttgaaatctgtgcttgtccaacacagggctgtaggggctgatgaaaagagaatgatgtgatttgagcttttattaaaaaaaagatacaatgatcctggataaaatattttagatggtgattaaaatgcccatagattaattttttattggttctctgaaatctcgaaatgttatccaagttacaatttaagcaatgagagtaaaatttgaattctaaattctcagcatcttcccataatcttgagtggagagacagaggaagcaaatgccaaggagccttctaattttgactatatgatcattaactaaaggcagcaaggggttgtaaactaatcttatatagtcaatgtttcatagaatgctttggttacaatcaggttttttaaagactttaaaggttttttgtatgttatatgcttatgatttctaaaaattatgcagtatacacaaagggcataaagtcaaaaagtatgtctccctctgtgacttattctcacaccccagcggtatataatttcttgtattcttgtatagtctttcagaaatgttattcattttatatatggttccctatacatatgcctcttcctgttcttccttattttaaatgttcaattttgtgacttggttcttatttaacttggttgtctttccatattgccacatccagctctcactcattattttaatgtctccaggattccattatatggatgtccctttgggagaacatttgtttatagacttttctactaaatatattgttacaatgataatatccttatgcatatatgaagattactcttgattctgcctgactggaaactttattaataaagtagacatcattctattttgaggctcaccagctgtgtaggtatgatcttgtgcttccatttaagaaattcttccatttaaagaagaaaaaaatctctctgactatctgaagatacatgaaaaatcctatgcttttaaattaaacaattaaggcagtcagttcattgaaagattgtgcaagttcacatctattttgcatcttaattttttcattgtccctactcatgactctaaataaagtgcatggcttggggctatattttgttttgcagtttgttggtatgtgcctttccttatctatattagcttagactataccttatttttaagaagagaaagtggaaattaactatggcaaaatctgttttggcacaaccatgtttgttcattattcaaaattagcttcctatgctttagaaaaaatgtgagttattactctgaaagttctgattctgattcctcaaggtttagagcccagaaatatcttaacatgtctttgctgttagtcaagcacaggatttgtttcctgcaaaagtttattttcagtgaagaatacttgtcctaatagctgatagaaagtacctttgcactttaaatcctaggaatagcgaacaaggaacttactgagaagttcaaaagaaagagtaacaggaccttctagtcagcagggcatgtttggaaaatgttaatacgccatgatttttgaagaccaattttagttcaggaggtggttttaaatattggatgaaaacttacaggctgatatcaatattcatttctgaaatactttagtatgataaatttggttaagttcttgttcattgtgaaatactgttggaagaatttttttcaaaataaagacttctgaatttgtgtacaaaaaaaaaaaaaaaaaaaggccaca

SEQ ID NO: 5142 - DNA, 860 bp, Macaca Fascicularis
  misc_feature (1)...(860): n = A,T,C or G
agcagnnnnnnnnnnnnnnnnnnnnnnnnnnnnnncccacagactggcaaacnnngcagaacttcccgtggctgaggctgtgaccggaggccaggaatgctgttgggtggaatgtgagtgaatgggccctttgagctgccctctagagagcaaatcgtttcctggagctctgaatgaacatctgtcctggtttgctcagacgtagaagctccattgaccatgaggccttgcaaacatcagtggccacaggcccagtatgctgcctggcactgtactagtttaggacctgcagcatgtaggnnnnnnnnnnnnnnnnnnnnnnnnnnnnnnnnnnnnnnagcagctttttagattcttcttgcaatctcctgaggattatctgccccatttttaaaatgaggtggaatacccaaggtcatgtagccagtgagtgctctggggaccacactgtctgctgtgttccaccagaccacactatgaaataggaataaatgttcctgttgcaggactgctgggaaaatgggtggggtggcacttaagtcaccataattttgaagacctgcacacagagggctccaggaattgtagacgataaggaatttcagttctacccactacttaagtacttgtcatgtactcttagaggaggccagtaatgatcagaacccttttactttaaaattaatatattgtattagagaatatattaagtggttatattgggttatgttaggatatatacttgaatggaaatacatgtactattagcaatcgtcatatttcacttatcctgtaattagacaagaaagcataatatagttctacnnnnnnnnnnnnatannnngtgtataagattttta

SEQ ID NO: 5143 - DNA, 619 bp, Macaca Fascicularis
  misc_feature (1)...(619): n = A,T,C or G
ccaaatggtgcacaatattttgtaaaaagtacccagtagccccatttcatacaatgttcctaaattannnnnnnnnnnnnnnnnnnnnntccctccttgttgctgtgtaattggagttgccacagtgtgtggtgctgatggacgtgtcagaaccgagaacacttaaccttctttgattgtttttcaagttttaagacttcgatccacccctatgagagcaagtaattgtggaaatatttttggtgtaaaatcattccagagtatgtaatatttaactgatagctgcatgaaagtgagattcgtgttactttggctttctttgtctccgttgacacggttgcacatttccaagttnnnnnnnnnnnnnnnnnntgtgtttaaaaaaaaaaaaaaacaaaattaaaaaaagagattgtggcctggttttgtaaaagttttaggtaaaattacaattgattgttttaggaatcattattaaaaattttctgcaaatcataaagctatatcgaggtgttgagcttagcnnnnnnnnnnnnnnnaattattcattgtggctgtccagttctatgatgcattctggcattttgtaagctgctctgactagcaatatatagattca

SEQ ID NO: 5144 - DNA, 1195 bp, Macaca Fascicularis
  misc_feature (1)...(1195): n = A,T,C or G
agcatcgatggcactgatgaagacccacatgaccgcgcngtctggannnnnnnnnnnnnnnnnnatgtccccaacaaaggtgtcataggagatcccctcctcaccctgtttgtggccagnnnnnnnnnnnnnnnnnnggaggacaaattaaaggaagtcttttcccgctatggtgacatccggcggcttcggctggtcagggacttggtcacaggcttttcaannnnnnnnnnnnnnatcgaatacaaggaggagcgtgctgtgatcaaagcttaccgagatgccgatggcctggttattgaccagcatgagatannnnnnnnnnnnnnnnnnnnnnnnnnnnnnnnnnnnnnnnnnnnnnnnnnnnttggaggcggtctggggggaaaaaaggagtctggacaactgagatttgggggacgggaccggcctttccgaaaacctattaacttgccagttgttaaaaacgacctctatagagaggcaaaacgggaaaggcgggagcgatctcgatcccgagaaagacactgggactcaaggacaagggatcgagaccatgacaggggccgggagaagagatggcaagaaagagagcccacaaggttgtggcccgacaatgactgggagagagagagggacttcagagatgacagggtcaaagggagggagaagaaggaaagaggcaagtagaggcccaacagcagaccccaaagtgaagatacactggaaatgagtggagggggaatgtctcagagccctaataccagaaggcagtctgcacagccaggtcagtattcttgaacaaatgtacctccactctcacttaaaatgccgactgccttnnnnnnnnnnnnnnnnnnnnttnnnnnnnnnnnnnnnnnnnnnnnnnnnnnnnnnnnnnnnnnnnnnnnnnnnnnnnnnnnnagataaagttcgacagaagtggtggtgaaatgaaaatgaagaataaggagtggtcgggatcaatgaaagaattacaaccagttctgatggattgatttttcctttctctcttnnnnnnnnnnnnnnnnnnnnnnnnnnnnnnnnnnnnnnnnnaccttaacttctgaggactttgagcaagtaccatactgttcagatgattttcaaaaaagtaacatttagcattttgatacatggctgtctttgaaagttcatattgtgaaaattcaag

SEQ ID NO: 5145 - DNA, 639 bp, Macaca Fascicularis
  misc_feature (1)...(639): n = A,T,C or G
catgnnnnnnnnnnnntgcttatgcatgtnnnnncacgtttatgannnnnnnnnnnnnnnnnnnnnnnnnnnnnnnnnnnnnnnnnnnnnnnnnncagaatnngccccagaatgagactagtatctggctccacagacactgttatttgctttggccgcnntncttccagtcccattcagacctagattctcagcgtcaatcagaatgaccaccacatctccgtgaaggaggggcgttccactgagaacatgtggccactcccagctccaggcnnnnnnnnnnnntctccatggcaaaagccaccttttcatcttttggacttgaaggtatctaacaaaaataacatccacactcagagatgaggtaaatgtctgttaatttgtatgtaacaaggcaaagtatttggtaatttttaaagttagttccaaagtttaaaagaatgtaataggtttttaggaatcattttaaaagtactttaaaagagtataatccttattttatgtgatcattgacattaactgtaatattttatcactcgtttctnnnnnnnnnnnnnnnagaatttcaatcatttttgatggaaaaaagaatagtaattggtcttagcactcaaataaaatggtatcagcgatgacaac

SEQ ID NO: 5146 - DNA, 799 bp, Macaca Fascicularis
  misc_feature (1)...(799): n = A,T,C or G
tatgaaggacatgtgatggtgtcaatgttcaagaaagccgaataagatgagacctcaaaagacatacacagatttcgcagttaagtggtcatcagtaactttgttggagtctttttggtgaggccagaagcgttaccatgctagtttaagaaggaatcaaagatgctaaaattaatataattacaggacacttatattttgatattgtgcttttaaagggaaggaatctaaagcacattcaaaagcagggagaaagctgatagagagttctttatgtttatttttaataggagaaagttgaacacatttcagtctagaagaagtaaatcaggatggtggaaatatgaaagataaagtagagtgataaaaattgttttgctaagactcagcagattttggaggatcaannnnnnnnnnnnnnnnnnnnnnnnntatctaagaatgcaggaaaggatgtgaggataaatgcagataatagtacttggaggagtaaaaggagtttgtactagctagtcttaaaattcttaaagactttagtcaattattttgtcttggttttattttatgaagcattttgtttatacaacatggtatctaattacacacattaaaaaattaatgtaactaaaaatatttatatttgtacgaatgtgctgtaatgtgtattagttttccacagttagcattcgagacagttacatttcaagtatattcttcaaactatctaatttacataggacatttagtaaccgttacatggtcactggctcaagaaaagatgcaaatcttatgaataaag

SEQ ID NO: 5147 - DNA, 1718 bp, Macaca Fascicularis
aatacgctctgggcgaggaccaccggctgtgggaagagggttctgagcgtctcctgaccttgacggtttatttcctagagcaaatgcttagaagactggaaggctcaactctgaggaacgcccagcccaggaggagcaatctaagatactgacatcagacgttcctcagtaaaggcccgctcagagcaccctaagtgaagcccagagtctgtatgcttcacccatatatacagatgtaaaaagcttttgtgtcttttcactcataagagtagacagaaaagaatgaccagactttggaagaaagctcagaagtgatagagacgaaagcaagcagaaaagctatttgaagtaaaacaacagaaaatttcaagaaagcaagaatcagtgcacttggaaagaaaaaaatgcctacatagtatgcttgttatgtgaattagctcattaactagtactgatgttgggcgttggtgagcttaaagcaggaaatagtcttccttcttcccatttttgctatgtattggttggaaatcaagtatcagttctacactctgatcttcccacatgcttcagttgtgaggagcccagtattcactcatgacattgcaaattaacatctccagaagggattcataaagcctggagaaggcatgttacgcataaaagtggagaatttacatggtaaatgaaaatggccaattctttaagaggagaagtactaaaactttataaaaatctgctgtatcttggacgagactatccaaaaggagcagactattttaaaaagcgtttgaagaacattttccttaaaaacaaagatgtgaagaatccagagaagatcaaagaacttattgcacagggcgaatttgtaatgaaagagctagaagccttgtacttccttaggaaatacagagctatgaaacaacgctattattcagataccaacaaaactaattgatcattactactttaatttagctgacaaacagccattgatcattactactttaatttagctgacaatcagtgccagctgtttatgtgtaccagataatgtgaattaattctaacttaaaatgggaagatatacatattgtgtaaaaaatccctgagctgccctactgaactaagtaggtttcaacttctgttcatgctgagaaattatcagcaacttaatgctcaattttgatacaaacatagcaatttagctatactaccgattataaattaatgaacacccaattttgaatgaaaatacaatacacttaatcctgtaacttaataggacttagccaattatttttagcttatttctccattttactgacaagagaatgccatttactgaatatttaatcagcaaaataatttcttatttctcttaacttttgaaaggaatccctttttttttttcacccaatttgatacattaacagcacatactcaaggttcactccacaaccaagtttctgacaatgatttaaatgtagttatagaaataatatgtgtggagttattctgactttgaaatagcctgctggtgactggcattacatacataactattcaattatttccattattaatgttgctgctgctacctttgggcctaaaaccaagtcatctgttgtgtatcaattaccttctttgataaaaggaaataaataatgttattctaaaaaaaaaaaaaaaaaaaaaaaaaaaaaaaaaaaaaaaaaaaa

SEQ ID NO: 5148 - DNA, 2246 bp, Macaca Fascicularis
aaaaaaaaaaaaaaaaaaaaaaaaacttcctggagggaaccgcagtccgcaggccagggctctgtccccgggctcgcgtttcggggctcctcggctcccgaacccattcgcgcgggttgtgcgtggctagggtgcaagtccagattttcgatctaactggggttatgagccgtttacgagtcatttggacgatagtaaggcctgatcactctgaaagtgtctgtggtgtgaagtcacctgatccttgactccctgcttttgctgaatgtgacctcctactgtacgtggaccaggagcgcccctgcccccttgaagacgcagttgcgttggcagcgcagtgttgtgtatccctctcactcataacacccctatttataggagtttagcatttgatctcgcactgtggtgcgaattgatcgcatgaaatcctgattgaaaattttgatggtacttaagaaaggcgtaaagttttttcaaaggcttataaatagtaaaagcctacggtttggtgagaattatgaagatgatgacttagtaaattctgatgaggttatgaagaaaccatgtccagtacagattgttcttgctcatgaagatgaccataactttgaacttgatgaagaagctttggagcagatactgctacaggagcacatacgagatcttaacatagtagtggtatctgtagcaggagcttttcgtaaagggaagtcatttctactggacttcatgcttagatacatgtataacaaggattctcaaagttggattggtggaaacaatgaaccattgacaggctttacatggcgaggtggctgtgaaagagaaacaacaggcatacaagtttggaatgaagtatttgtgattgacagacctaatggaacgaaagttgccgtgctgcttatggatacccagggtgcctttgatagccagtcaactatcaaagactgtgcaacggtgtttgctctgagcactatgactagctctgtccaggtatataatctgtctcagaatattcaagaagatgatcttcaacatttgcaattatttacagagtatggaagacttgcgatggaagaaatctaccagaaaccatttcagacattaatgtttttgattcgagattggagctatccttacgaacattcatatggtttggaaggtggaaagcagtttcttgaaaagagattacaggtaaaaaaaaatcaacatgaagagcttcagaatgtaaggaagcacatacacaattgtttctcaaatcttggttgcttccttttgccacatcctggtcttaaagttgcaactaatcctagttttgatgggagattgaaagatattgatgaagactttaaacgagagcttcgaaatctggttccattgctgcttgcccctgaaaatttggtagaaaaagagataagtggatctaaagtcacttgtagagatcttgtagaatattttaaggcttacatcaaaatttatcaaggagaggaacttccacatccaaagtccatgcttcaggcaacagctgaagctaataatcttgctgcagtagcaggagcaagagatacctattgtaaaagtatggaacaggtatgtggaggggacaagccttacattgcaccttcagatctggagcgaaaacacttggatctcaaggaagtggcgatcaaacaatttcgttctgtaaaaaagatgggtggagatgagttctgccgacgttatcaggaccagcttgaagctgaaattgaagaaacctatgcaaattttataaagcacaatgatggcaaaaatatcttctatgctgctcgtaccccagccacactgtttgcggtcatgtttgctatgtatataatctcaggactgactggcttcattggcctaaactctatagccgtcttgtgtaaccttgtcatggggttagcactgacatttctttgtacttgggcatatgttaaatactctggggagttcagagaaattggaacaatgattgatcagattgctgaaacactatgggaacaggtattgaagcccctgggtgataatttgatggaggaaaacataaggcagtctgtaacaaactctatcaaagcaggcctgactgaccaggtgtctcatcatgccagattaaagacagactgacagttcatctcctcacggactccactctcttttttttcatgcttgctgtacaatgagaactcaaataaaaataaaccaaagtttaaaaaaaaaaaaaaaaaaaa

SEQ ID NO: 5149 - DNA, 989 bp, Macaca Fascicularis
ttttgggcagaggaacagctcaggtctttaggggtctcagaagcagttgggtctgggagagtggagcagctcacagctggtgcacaactgttgcatgccaagcatgcagttccctgtaataaaatgacacaccttgttctcaaacacaatttaaagtggcctaatttgttttctggtctgcttctccctcacttcccagattataaagtccatctgcattcttttccccttgcatgaatgcaaacacccacatgcatgtgcatagacacactcaacccatctttccttatgaaattcatttattttttgaatttttcattgaattataatatatagtcatgcgttacttaatgacagggatgccttctgagaaatttgctgttgggcgattttgtccttgtgcgaacatcacaaagtatatttacacagacccaggtggtagagcctactacacacctaggctactaacctgtacagcttgttactgtactgaatactgtaggcaactgcagcccagggataagcatttgtgtttgtaagcatctctaaacatgtatagtaaaaatatggtattatagtttacaggaccactattatatgcatggtctgttgtcgacagaaatgtcattttgtggtgcgtgactgtatatatagtattccccgcttgtctgcaggggatacgtttcaagatccccagtggacgcctgaaatcacagatggtactaaatcttatactagactgtttttttctatacatacgtacctctgataaagctcagtttatcaattagacatagtaagagattaatgacaataacaaaatagcacaagtatacttgtaacattgttacaagtagtgacttctcattcatactcattgctgtagaacagagaggttggcagactgtaacctgtgggccaaattgagcttgtgagctaagaatagtttttaagcttaaaggattatatattaaaaaaaaaaaaaaaaa

SEQ ID NO: 5150 - DNA, 777 bp, Macaca Fascicularis
  misc_feature (1)...(777): n = A,T,C or G
caagtagctgggattataggtatacaccaccatgcctggctaattttgtatctttggtagagatnnnnnnnnnnnnnnnnnnnnnnnctgggttcgaactcctgacctcaggtaaggagtcnnnnnnnnnnnnnnnnnnnnnnnnnnnnnnnnnncatgcccagccattacttgcatataattttaaaaacaaccttcaaaatgtaaaataactacaataacaccaaaccccacaatattgcattagaaagagtttttatttagatcatgagacataatagtgtttcatactcatgcttatacagaacctnnnnnnnnnnnnnnnnnnnnnnnnnnnnnncaaccaaactgcaaaatatcttcataaataaaaatccaggttaatattagtattattatcctacataaaacaaagctactaatttcctctccaacatatatttaaataaacagaaatnnnnnnnnnnnnnnnnntttgtaattctggtttgtttagaatttagttaaaaacttatttgtggagctctccctctcttttgactggcggaaccatttctgacttcaaggctttttattaaaatattctgcaatgaacacagaaagcttggcagatatcacctttatgcttttttctttgaatatatatttgcttgtgcacagtaagaatgattaacatttgcttttatgtgtagcttaagatgacagctcttctgtatattgtaaactgtgtttctctcaacatttgtccttcttcatctgtaaaatagacaactactg

SEQ ID NO: 5151 - DNA, 720 bp, Macaca Fascicularis
  misc_feature (1)...(720): n = A,T,C or G
ggggccagccaanctgaggccgatccgggacccgcctccttgcgtctccggttcccaggattgagccgcctctgccaatccacgtcgcccttccagcccatgaactcccgcgccgaggagcgggatctgtcccgtttcccnnnnnnnnnnnnnnnnnnnnnnnnnnnnnnnacagattccttctattaagggattggctcgctcagttctaagctctaaatgggtcaattccgttgtttttcgcctagcgacaagggctttgctcgcacgtcataggctccatctcctagtgggtgggcagctcttatttttgattggctcgaatcctttaaagggcttgaccagtctccgcatagtcatcttccgcttttcacgagttctccctcctgattggctccagcttcctgtgggggcgtggccaagccctcctgttcccagaattggcgtggggccttcaatttacattctttacactacgggggctggggtcgttgcctctggcaccccctttcattggttccatccatccccacaacagcctgccaatcgaagcccgtccctgcatccaggatggtaccagctcccgtccctcgccccccacctccacaggtgccttaaagggccctcgtccacccaaggtggggggcaggggccctcactctccggccctggtgtaggggagagagtgaggggttgggggattggcagttgnaagggcgc

SEQ ID NO: 5152 - DNA, 787 bp, Macaca Fascicularis
  misc_feature (1)...(787): n = A,T,C or G
atgttagtgatcanntaatcacagagccaaacactttcnnnnnnnnnnnnnnnnnnnnnnnnnnnnnnnnnnnnnnnnnnnnnnnnnnnnnnnnnnnnnnnnnnnnnnnnnnnnnnnnnnnnnnnnnnnnnnnnnnnnnnnnnnnnnnnnnnnnnnnnnnnnnnnagaggctttgaaagtaatccctggggtttggattattttcacaagggttatgccgttttattcaagtttgttgctccgttttgcacctccacaataaaagcaaaatgacaaccagtacataaggggttagcttgacaaagtagacttccttgtgttaattttaaagttttttttccttactatatctgtctacaggcagatacagatagatgtatgaaaatctgcttgcctgtaaaatttgcatttataaatgtgttgccgatggatcacttgggcctgtacacataccaattagcgtgaccacttccatcttaaaaacaaacctaaaaaacaaaatttattatatatatatatatatatataaaggactgtgggttgtatacaaactattgcaaacacttgtgcnnnnnnnnnnnnnnnnaaaggaaaagcaaaatctgtataacattattactacttgaatgcctctgtgactgattttttttttcattttaaatataaacttttttgtgaaaagtatgctcaatgttttttttccctttccccattcccttgtaaatacattttgttctatgtgacttggtttggaaatagttaactggtactgtaatttgcattaaat

SEQ ID NO: 5153 - DNA, 816 bp, Macaca Fascicularis
  misc_feature (1)...(816): n = A,T,C or G
ctctgacgtanatnagtgtgagagagtgacgtgtcagagcgctgccactnnctgcaaaactgaagaagcagaaaagctgctgatgagagtgagagaggtatgaaggttatgaaaaccgggccttaaaagatgaagaaaagatggaactccaggaaatccaactcaaagaagctaagcacattgcagaagaggcagataggaagtatgaagaggtggctcgtaagttggtgatcattgaaggagacttggaacgcacagaggaacgagctgagctggcagagtcccgttgccgagagatggatgagcagattagactgatggaccagaacctgaagtgtctgagtgctgctgaagaaaagtactctcaaaaagaagacaaatatgaggaagagatcaagattcttactgataaactcaaggaggcagagacccgtgctgagtttgctgagannnnnnnnnnnnagctggaaaagacaattgatgacttggaagataaactgaaatgcaccaaagaggagcacctctgtacacaaaggatgctggaccagactctgcttgacctgaatgagatgtagaacgccccagtcccaccctgctgctgctcctccctctgacccagactccgcctgaggccagccnnnnnnnnnnnnnnnnnnnnnnnnnnnnnnnnnnnnnactggaaggctgctttctcctttcgccgccccctccttccctgtgtctttttcgccaaactgtctctgcctctacccggacattccagctgggctagaggctgagcaccttggaaacaacatttaagggaatgtgagcaca

SEQ ID NO: 5154 - DNA, 737 bp, Macaca Fascicularis
  misc_feature (1)...(737): n = A,T,C or G
aagtcaaacatgtannnantgtcacaagccnnnntgctaaatgtcattcagtctcactcattatattccgtcttaaagtattctcctgtatgacagtgcttcaaagctggatgttaattcaccaccttgctagggctgcatcctgtcaaatggaaaccgttgttgcggattcagatgcaggttagatgagaggtatgttctccttagagattgacctttgtccctacaagaaacttgacattcatccatggacctgtatctatgaaagctgaatgggtgtaactgagaagtacagcagagtgggacctcttggagaacttatatgtgtgtgtgtatctgcctnnnnnnnnnnnnnnncataaaggctgtttcctcgtccatgcctttccatttcctgaatttgtggaaaagccctgccataagatggacattgtaagagtaaaaggctggactctggaactggacagacctgagtttcagtctccacctcatgggcgagttatttaacatctccaacctcagtttcccactctgtaaaatggggataacaatagtaccataggggtttatgaagattcagtataataacacatgagaggtgatcctggtaatcatttagtaaatggtagctgttattttggttattacctgattgaattatttgttgtaagaatattgctaaataatgaactcnnngtgttttaaaatataaatgcatgtgtaaaacaattaatatt

SEQ ID NO: 5155 - DNA, 2196 bp, Macaca Fascicularis
gcaggtggaggcggggaagcgattccagccacctttgtgatgggcgtctcactacctaccaagtcagcccaatgatttcaagacaaccctggagacagtgcttcctgcccccctgccagcttctgcttctctgtaatgtgttttgggtggtctagcttagtcatctggagacacacacaggctttgctcactctcctgggagctccggaaagctgcacttgtgctcccttcctcgtaggtttgctgtgcaacagtcgtggcttctgtggctcctcaggcccgggggcgcccctcgaaccctccactcttgctccaagcaccttccctgggaagctgcatctgccgggttcgcagacaggaacggaaacatggacggagccacgtggctgagcctctgtcctgataacgaagctccgctttggaggaaaaagcacaaatcgctacaagcccggggcacaggcgacctcgctctgcagagaagagcggatgccaagctgtggaaaagctaccagctccagcgcttggctgaggagttggggagagggtgtcgggaggcgcggtacctgcacgtcggaggcctggaccgactgcagtcagcgcgtctgttaggctggggaggaggacgggccagggaaaatgagcccgcctcagaggggcccgtccagcggagatcagccaggcccccaagggccaaggagaagcacagagcggcccctagtgaagagaggagctgcagggaagagttgggccagcaacaccccaggcactccagggcccggaagacagcagcgagcccagagaaaccacagactacaaaagccatgggtcagacgaattctcacctggccctgcctgagaagagaaagggaaggcgagaaccttcgaccaagtccgggggtggccgcggtgccatccaccctcggaggagcagggggccggacctaaaaaggccagacccactcgtggctgctgtgggagaaatcaggcgtgtggagggaaaagagaaaggaacagctcgggcagggaggaggccactgggacagggggcagtttgctttgttccagccctgaccagtcgctctcggggacagagtccagaggggaagctgagagacctcgggcagctgtggccagctggtgccagccacagaagggaagctgtgtccccagcatctcagtgcacgctccgggagaagaacaagtggcagaaagagctggagttggcctttgaagagttgtttaacataaacagaaagctgaaaaaacacctgcgcttgtacctggcactgaagcccaggatggaccagagccccggggaagagcatgccttctcagagatgcaagaatgtggcgctgagaccccaagagggaagaaaacagcagacgcagagatgctgcccgccggggaacccaggagcctagcagaggaggtggagcagcaggcagcatccaagaccaacttgaaaacgttaatgggcaaggtcaagcccacgtttagaaatggaagtcaaacattgtctcctgaggcaggtatatttatcagtgaaggggactcattatcgtatagcactgaatctggacaagagacccccaaactgggcatgctggcagagggctcccttcagctccaccttcaagaccagacagacagagcgggttcaacggcatccaggcaaaggcagaaagcagagatggagcagagaagacaaaaacaactggaatcgcttgaacgaacgcaacacccagatatgagcttggaaatccactacaaggttgagttagaaaaagagaggagggagcaaagaagggctcgactggcgcatctgaagtcctcctccacaagagcccgggaaagggagagaggatctgagctcagcaccaattccccatcgggcaccagcctcgccgacgacgactggcacagtcagatgatccgagaccagcagcagcagattttagagcaaaacaagttgcacaagcagtttcttgaagaagccaggaaacgcttgcaagagttccagaacatatgctaaacgcgagaggcccacccggggtaaatacatcattgataatggtgatgccagagctgaaaaaaaaaaaaaaaaaaaaaaaaaaaaaaaaaaaaaaaaaaaaaaaaaaaaaaaaaaaaaaaaaaaaaaaaaaaaaaaaaaaaaaaaaaaaaaaaaaaaaaaaaaa

SEQ ID NO: 5156 - DNA, 3072 bp, Macaca Fascicularis
atatttggctgtttgagtttaggggaagaaaatcttatgtgactgtattttttttaatatgagaaatgttcttgattatatgcacataatacatctctatacatgcagatatccttagttaacacttgaagaaaattggttttgattgaccatacattcttcagactaaagtaggttactcattttccctcctcaggtttgtccctgatagttgcttttctgtgtttagctgatgattttcctacctcccattgttgctgaactggagcagtgttatgtttctcattgaaatgttatgtaaaacatctcaatgaggttgcctgcttgcagctttatgagttctttagtttacatataccctgcactcactgtaacgcttatgaaaccaaagcatttttaaaatccatagtgctaaccccttccaatcaatacttactttcttggtgttattttccttgtttgttcttgtttttgttctggtttgttttgttttgttttgttttctcctgattccacaggtcttagagctccaagatgttccataagtgtttttacttgtaaggaatgagaagccatccatggaaatttgaactgagttggggtggagaaagagtgcagatccctttgcttgtgaaagaattttcagtgagtgaaaggccgtcaccccaggaagccatatgagggagcagcaacatgtatatgagcttcctatggaattgtccttctgtgaaactttgaaggtatgcagccactctcccaggtcttcaggttcctaccatttccatttctgttaaagtggagctgcatatcttcagcttactgggtgaccctgatgctgacatctgctgctgcagaaaggaagacttctcatgttgtaatttcacttagacccttttatcagtggagctccagttttcttacctacttgtcactttttttaaatgcctctgggggttatttttgcttttcttggcccccaccaatttatacatctccattttctgacctctgaactttgttgctcagcaaggttctgaaggagagtttcttgcattagacaggcccaatcttctcccatcattgccctgctgtgactccaaagaaaggagctgcttgttgatagtgccatgtggagcaaggctatgtttcctaccccacatggtgctcagtgggtaccagtcttagtgtggctttgtgattgctgccctaaaggagaatgctttgtgattgctgccctaaaggagaatgctctttccttcctcactggtactgcctactgttttctaagcattgctcctgcacagacatggagtcccagccccagcaaggctcttctgttcccatccattgacaatgtcttgtggagcatttttgctgaggaaaaggtcacttgtaaacagaggagaaagggaaagagtacaaagggccaaagtttattgtaagtgaaaactgagggaattcctgtcttctttaggagtaatgattcatggatctaaataggtggaaatatcattcaaaatagtcacttgagctcacaaaaaaagcaaggaagaattctcatgtcctttgtcttccttctgtagcgatgaactgctgatccatgtgaagaagacaggcttcccttccttctccctccttagtgatttttttcatttaacagcataagtaaagaggactttctggttcatttttgtttgtttgttttgttttgtttagagatgaggtctcgctgtgttgcccaggctggagtgcggtggctattcacagatgctatcataacacactacagcctccaactcttgggctcaagcatcacgcctagcagtttctggttcctttaacagcaaaaggaaagagaggttctgattcttacctcagggttttttggttgtttctttgtttttgtttttgttttgacactctagcacaaggctaaaggttatagctgagatctttggaaccaaagcagagcaagcagagcccattgtctgggcaccacaccactgcaggcaggtggatagaagtgtgacccctctcacaatatgcccgtaagtcagagtgtagggcagaactccctgtcaagttgctacaccatcctgtcttctcagcatctccttgcctgttttctttattagtccaaaggaaaacagcaacaaaatctgtttttaaaatgtcttatgtgaacatacatcagatatccatgtgctgaaacccacataccatcacttggcaaatttttagaataagaccccattattatctattgctataaacctagccagctctcttgctcttctgtattttcctatttccctgccatcatctgtatttctgccgcttctcttagactccttgtctgcaaagtccaagccagaattcactgtctatggcagaaggacatccagagcccattctggaggttggtttcttccttctgccagatgctttctgtcctctcttccttcctcctcatatttctgttactcatttgtgttcagttttgtgcagcattgttagcactgcttttgtgaccagaaaaggccataacgtggtccaggatcatcattctcctgactctagatgggacacttgacagtgacttgaaacatttgcatattcaggaatacatgagatctcaagagagcctacagtatgaaatcattttcagaaaataagcagcttgcttttgaaatgctctctttcccagtaaatgaagttacaggctagcacaatacctaattcatattgcccagtacacctgtagatattactgtactttatgttctcaagaaataagctgttgcctgttcagtgttacagatttctttgtttctttttaattaaaacagaaggagcagctgaggaaagggagacaaggtattttatttctgactaattttagaaaaaacttgtgtacatgtgtttggaactgttgaaatgccaagttttctgtataagtgtttttgtaattaaactttcagattttctttgttttttaagaagttgatatgcttgtttgacatttgtctcattaaaacttttctatgttgaaaaaaaaaaaaaaaaaaaaaa

SEQ ID NO: 5157 - DNA, 200 bp, Macaca Fascicularis
ttgagatctgagtattataagagagaaatcttatgggtttctcccgggtgtgagagaaagcgctttttatcacttttcacccccctccgtgataaaatgtgtgcgcactatatttgagaggggggttttttttctcgttatagagaatttttcaacaccaccactatgcgcaaaatgcgcaatatatcccccacattttt

SEQ ID NO: 5158 - DNA, 571 bp, Macaca Fascicularis
  misc_feature (1)...(571): n = A,T,C or G
ggagccgtcttcccagccctctatcccaatnnnnnnnnnnnnnnnnnncctggacctccttggagctgtggtcactggaactgtggttgttgctgtgatgtggaggaggaagagctcaggtggggaagggagagaggtagactgagttttcttgtcccactgagggtttcaagccctaggtagaagtgtgtcctgccttgttactgggaagcaccatccacacacatgggccgaccaagcttcatgtagtgacagtgcccagggatctgatgagtctctcacagcttatannnnnnnnnnnnnnnnnnnnnnnnnnnnnnnnnnnnnnnnnnnnnnnnnnnnnncccctttgtgtcttaagggactgtggcttctctttttgcaagggcctctgaatctgtctgtgtccctgttagcataatgtgaggaggctgacatacactccacctccatgtctaccatgacccccttcctcacactgacctgtgtgccttccctgttctccttttctattaaaaataagaacctgagcagagcatggtggctcacacctataatcccagcacttagg

SEQ ID NO: 5159 - DNA, 2438 bp, Macaca Fascicularis
tatttttaaaaagcacctcattcacacatctcatgtgtctattgcaggtgtacgatgggaagtgcagtctggagagtccaaccagatggtccacatgaatgtcctcatcacctgtgtctttgctgcttttgttttgggggcattcattgcaggtgtggcagtatactgctatcgagacatgtttgttcggaaaaacagaaagatccataaagatgcagagtccgcccagtcgtgcacagactccagtggaagttttgccaaactgaatggtctctttgacagccctgtcaaggaataccaacagaatatcgattctcctaaactgtatagtaacctgctgaccagtcggaaagagctcccacccaatggagatactaaatccatggtaatggaccatcgagggcaacctccagagctggctgctcttcccactcctgagtctacacccgtgcttcaccagaagaccctgcaggccatgaagagccactcagaaaaggcccatggccatggggcttcaaggaaagaaacccctcagttttttccctctagtccgccgcctcattccccattaagtcatgggcatatccccagcgccattgttcttccaaatgctacccatgactacaacacgtctttctcaaactccaacgctcacaaagctgaaaagaagcttcaaaacattgatcaccctcttacaaagtcatccagtaagagagatcatcggcgttctgtcgattccagaaataccctcaatgacctcctgaagcatctgaatgacccaaatagtaaccccaaagccatcatgggagacatccaaatggcacaccagaacttaatgctggatcccgtgggatcgatgtctgaggtcccacctaaagtccctaaccgggaggcatcgctatactcccctccttcaactctccccagaaatagcccaaccaagcgagtggatgtccccaccactcctggagtcccaatgacttctctggaaagacaaaggggttatcacaaaaattcctcccagaggcactctatatctgctatgcctaaaaacttaaactcaccaaatggcgttttgttatccagacagcctagtatgaaccgtggaggatatatgcccacccccactggggcgaaggtggactatattcaggggacaccagtgagtgttcatctgcagccttccctctccagacagagcagctacaccagtaatggcactcttcctaggacgggactaaagaggacgccgtccttaaaacctgacgtgccaccaaagccttcctttgttcctcaaaccccgtctgtcagaccactgaacaaatacacatactaggcctcaagtgtgctattcccatgtggctttatcctgtccatgtttttgagaggatgatgttgtaagggtaccttaaaacaagagacttgcttgtattttaagagaaccaagtggccaaagaaactctttctaactttggcaacatcagaacttgccacatgtagctactgcagcaaggcttctgtgtacttgcctgaaaacaaaggaaggtgctggtcattccatttcttttgtttgaagctaaagagatgtgtagctcccaggggctaccttaccagtataaagagctgataacagtactcagaagaatctgtgaacaaatacttgaaaatgggttcaatgttgactgccattatgtgtggtcttcccattaaatgtgaacgttttaatatgtatgcattcaccttgcctcttgcacaaatgtcgaaaaaagatggtaatgtctcaaagaaatgaacttgtagattaccacgcagtttgctaaaaattcaatctttgacccaagctgtagcattttttttttcatgtgtggcatttttttcatgccaccaacaaacttgttgcgtgtgtgtgtgtgtgtttgtgtgtgtgtgtgtgctgtacccactaggatttgtttaggtgcccattgcatctttttgtgctatggagttgtttacattgagcataactgaacgagagacaatactacttcccacaggagtccattgggttcagctttgaaagaggaatagaatcgaggctcctttgaccatcaaaatgatgaactttacttatgtggtacccaatgccagaatgtaagagttgcaagtgattttgtgctgctattcattaaaacttctattccagtcttgccagcttaaggagatcaagatattaagaggtatccttgatttattttccagtattcagtagtaaaattttcctgtccactgtgaatcaaagcctgagtcactctatttaaccttagacacattaataaggttttatttttattgtgtttggttttttcccgcatagtaaaatttctcctcctttaactcctcctaccccccaaggtaaaaaacaaaaaaaaacaaacaaacaaaaaaaaaaaaaaaaa

SEQ ID NO: 5160 - DNA, 84 bp, Macaca Fascicularis
atagaagatatggaaatcagcctgccaaacattcactacttcaatatagacatgtccaaaatgggtctgatcaacaaggaagag

SEQ ID NO: 5161 - DNA, 717 bp, Macaca Fascicularis
  misc_feature (1)...(717): n = A,T,C or G
agctgtgcatccccgggacannnnnnnnnnnnnnnnnnagctcagctctgagttggtatggatggatagggagggctgggccaatagggccagagccctgtggggtcccgtctggtaacccccaagggtcagaagagtggccagatgtgctgagcctcaccaaaccactttttttcttgtagagcacgctgctctccagcctctcgcgctacttccgccggggagcccccagctcccctgccactggtgtcctcccctcgccgcagggcaagtccacctctctctccaaagccagccctgagagtcaagagcctctgatccagctagtgcannnnnnnnnnnnnnnntgtgcaaagatagggcagtgctgtgctgctgtgctgcctacctacccctctccaccagcctacaccgcaccctggctgccagggcctatacaacggaggnnnnnnnnnntcaccccctccccgagtagccacttcaaccacccacnnnnnnnnnnnnnnnnnnnnnnnnatgaagaggtcaacagcaggcatggggagtggagtcttctgtgcttaggccctcacgctgccgacgcccccagaggagcattccttcccttccagcattccccacagcacggccagccaggggaggcgggagcccaggagagggctctatgcacgggtttcagaatctgttttccatgctctgtccctgcagttttggtaa

SEQ ID NO: 5162 - DNA, 775 bp, Macaca Fascicularis
  misc_feature (1)...(775): n = A,T,C or G
ccagaactagatgcatgcatnnnnnnnnntgatatacgatatcagagactggtggtggagnnnnnnnnnnnaaacgaagacattttattttaaatttttaatttgaggggaaaagaaatgttttacagatgaaggaatgttttatagtaatttaatttgctcctgtagctgcattatttcttggttagaggtttgggcatataaccagattaaagtgaaggaactttctgttgtttttgtagcaccgctcagctgtcttgtaaaacagtgaacacacgctttccggttctagtaatcctgggtgtttatcacgttcagagaaactcaagctattgcatgattagccccctatctggcaaggaaaccccatacagaagaaacaacaaacctgcgcctgcaccgcctctgcgtcctgggtagtctgtgcttgtaatccagcatgtttcacagagtaagcctgttgtgactttgcttttggggtctatgtcattggtttctgatgcttgtacaaacatgcacacacaaatggataaaacagcacctctggctgttgcattaccatagaccatatcacatgcctacattttgcaaatgatttctggtttctcttagttcttctctaacatagtactttctttccagcaaaagcaaaaggtgttttcagatttgttactttattaagttatccataccaataaaaagtgtacaacacagcattttctgttaaattattattggttttcagttgtaattttgtattttttctggcatgcat

SEQ ID NO: 5163 - DNA, 2516 bp, Macaca Fascicularis
  misc_feature (1)...(2516): n = A,T,C or G
taagatgtttcaggttcatcttgcactgttcctggcccagcccctattcttgaatcacctgttccttcaaggaggcctggttctttttagttatacttacgaaaggatgacaagtttatgttgaatgattgcatttgtgttttcttccggattggtctagactgaacaaggttaggaatccagtctgcttaagcatgtatatagaaatggcacagtatgaacttgttgattaaatcattgtttcttctagcattaatcttaaattttctttttaggatagcaaacctaaaaacacctaaaatcttttaacctttgaatatgagataactttttgtctgtgcaaaattacacgaagccattacagtcataatttttagaggaaggcttagattaaaatgtaaagatgtggtagacttctaaatatgcaaagaatcacatggagtatgattgtcaattataggtttaattatagttttttttttcttttaaaggaagtatctaacttctcgttagtataatacactgttatgtaaactgtctcatttagtacacagagtattgaagcatacgtttatatctttcctttctgttttttgagataagagtctccnnnnnnnnnnnnnnnnnnnnnnnnnnnnnnnnnnnnnncaaaaaaaaaaaaaacaacaaaccaaaaaaaggtctatccttaaaagccttagttctgtccttaaagtcaatgccatgatttttaccaaattgccctactttatttatatgtgtttttcttcactgttgttttgtgaacattgtgaaagtgaatgtatatgtgaattcagtaagtacaaattactttaaatatctttttctcacttagaatctgaagaagaagtagaggaacctgaagaaagacagcaaacacctgaggtggtacctgatgattctggaactttctatgatcaggcagttgtcaggtaagaaaattttgttcacatgtctgcggctgcataagaacttgcattgtctagtctttccctttgttggagggcatttacatattctgagaattaacctcaaaataataatttcttagaagaatggttttgtttctggtaattctgagtaaacaaaaatatgtagcttattgttaataataaattgtactgtgaaggcaatctactattgcttagtttaaataatatcggtttctttttggttcaattttttcttggtgttaagtgaaaacttgcacattgtttatcaagagttggatgtattgaggtattaaatgctttgacggaatatgaagtggacagacacctattagagattgggcataaattgatataaataccaatatgtgagttaagtagcaataaagaatttcattaccttcgtaagtgcatcattgtacctttgggttttttccccccttgtgattggaacagaaatgtatttgatagcaaaagaaatccatatttacttggtaccatgtgacactgaatgttaatatcagtgcctgaagggtgttttcaagtgtttttcaaggtgtgatgaactaatcaggttactcacttggattgcttgagttcaggagttaaagaccagcctggtcaatacagtgagacttcatctctgctaaaaagaaaaagtagctggatatggtggcacatgcctgtagtttcagctgcttgggaaacaggtgggaggatcacttgagcacaggagatggaggctgcagcgagctgtgtacatgccactgcattccagcctgggcaacagctagattctgtctcaaaaaaaaaagtgagtagtttcttgaacctaagcctctcagatttgcctgatcatcagtcccaaggaatttcaatactaaattttgaatagctgaaagagaagaatcttaatatatgtataaactccatcctgcctgtgagaatgtgttaccatttgttttgtacaggaaatcaagagttagtagcttttatattgttttgatacatggtataattatgtaatgttggtattgcccccttagacgttttcttgggcatctgtgaccagtaagaaccttccacccagtggagctgttccagttactgggataccacctcatgttgttaaagtacccgcttcacaggtaaggtcttaataaaacttgtacattaggcaagtgtacttatattttggtaatttgattcaacagaggtctagagagtgtgaaaactggtcaggtgcagnnnnnnnnnnnnnnnnnnnnnnnnnnnnnnnnnnnnnnnnnnnnnnnnnnnnnnnnnnnnnnnnnnnnnnnnnnnnnnnnnnnnnnnnnnnnnnnnnnnnnnnnnnnnnnnnnnnnnnnnnnnnnnnnnnnnnnnnnnnnnnnnnnnnnnnnnnnnnnnnnnnnnnnnnnnnnnnnnnnnnnnnnnnnnnnnntccaggaggttgaggctgcagtgagtcctgattgtgccactggactgcatcatgggcaacacagtgagactctggctcaaaaaaaaaaaaaaaaaaaaaaaaaa

SEQ ID NO: 5164 - DNA, 810 bp, Macaca Fascicularis
  misc_feature (1)...(810): n = A,T,C or G
ccagcactgtagtaagtacccaaaattgaatagaaataatggcnnnnnnaaattgcgcaaagcaggccaggcacannnnnnnnnnnnnnnnnnnnnnnnnnnnnnnnnnnnnnnnnnnnnnnnnnnnnnnnnncagaagtttgnnnnnnnnnnnnnnnnnnnnnnnnnnnnnnnnnnnnnnnnnnnnnnnnnnnnnnnnnnnnnnnnnnnnnnnnnnnnnnnnnnnnnnnnnnnnnnnnnnnnnnnnnnnnnnnnnnnnnnnnnnnnnnnnnnnnnnnnnnnnnnnnnnnnnnnnnnnnnnnnnnnnnnnnnnnnnnnnnnnnnnnnnnnnnnnnnnnnnnncaaacaaaaaagaaaagaaaattgtgcaaagcatagataaaattttttctttattaagcttctcactgataagccttctttcttttggtaaatgtcactctgttaggagatgtctgcttttccgtgaaatgaaatagtgnnnnnnnnnnnnnnnnnnnnnnnnnnnnnnnnnnnnnnnnnnnnnnnnnnnnnnnnnnnnnnnnnnnnnnnnnnnnnctttttatagtagaagcaggtccatgtcttttgtggtttccttcacatctttggagtagttatgacttctcagtttttccctccttaaactgcattgcctgttctcttttcctgacatgctatcaggtatcagtgnnnnnnnnnnnnnnnnnnnnnnnnnnnnnnnnnnnntactgtcattaccattagaagaattacannncttgtgnnnncatgaccttcagctcagttgttgactgtcattcatgaatg

SEQ ID NO: 5165 - DNA, 715 bp, Macaca Fascicularis
  misc_feature (1)...(715): n = A,T,C or G
catagcttagaaggttnnnnnnnnnnnnnnnnnnnnnnnnnnnnnnnnnnnnnnnnnnnnnngggaatggcggtctgtgggcgaccctaacgtgtgcagcgtcctgagacgtgatcgtggtgctcacgcttttaccaagggtctcccaggagtaccagaggctctagttctgccgtccgccagcnnnnnnnnnnnnnnnnnnnnaggaacaaacagcaaaagacagatgtacacggtgttgttgtggcatagannnnnnnnnnnnnnncactttgttcttacagttttaaaaaactaataatgaagtccttaaatatgtatcgcatttcaggattttcaagtagttgtgggtgtgtctgtgtctctctagctcccgtttgggtgctccctgcgaagagagctcagagacgtcacctttctttgatgaagtgacagggcctggagaggtgtgaaccccgtggtgggggggtgactgacctggaggggaggctgggtcaacgtagggatccacccgcactccacattcctgtagggaatccacannnnnnnnnnnnnnnnnnnnnnnnnnnnnnnnnnnnnnnnnnnnnnnnttttttaagaagtgccatgttcctttttcctcatacttctctgtgtttaagaagcattgaaggataaggcactagtagcatgttggtttgnnnnnntcttggttattttacattgaatctgatat

SEQ ID NO: 5166 - DNA, 765 bp, Macaca Fascicularis
  misc_feature (1)...(765): n = A,T,C or G
aatgacagatgagacatgttgtaacacatgacagaaaactaacatgtgtcctctattaagcattcttaaatgtcagtatggaaattaataggacctttatttannnnnnnnnnnnnagattagttttataactatttatagccagcaaacatgaaaaaatatgccacttattattgataaaatcctaatttaaaaaatgaaatattgtttgttacctgtaannnnnnnnnnnnnnnnnnnnnnnnnnnnnnnnnnnnnnnnnnnnnnnnnnnngtgaatatattaatagaagttgattcacttttccaggatatcagattgagaatgtatatcaagactcttcaaagtgtagatttcctnnnnnnnnnnnnnnnnnnnnnncctcacttaggaattaaacacaaaaatatgtattattctcagtgttgttcgtttgataggaaaatatgggacacattattaatgacaacaacaggaatatattttaataagttatgatttatccacttgatgaatgttatggatttatcaaaatcattgaaagagtagttgataacattgtaatatttgtatgaataaaatnnnnnnnnnnnnnnnnnnnnnnnnnnnacctacaggtacttgctcaatgttatgaaaagaaaaaacaaaactttatatatacatacatctaggcatagggaaagaaacttgcactgtaagtcttttattgatttatattttctaattgtttcttcatttttatgtacatatatatatcaattt

SEQ ID NO: 5167 - DNA, 2120 bp, Macaca Fascicularis
ttgcgtatgaaggtggcaccactacccctatgtcaggcaggggagcacagtgctttaacttgtttactcaagagaggggatgatggtgctgagctctgctccccagggctttcctggggcccattgtcataacagcttgtatgtaggtgatggctgcctggtctgtgaggactataatgtccatggtgctccttggttacacaatggaggttcccctagccttggcaaggtatccattgccaggtttgaactcatgaccttaacctcattaacatcatcagccacctgagccaacccgcagagagggggatgctgggagctgtctcagtagctattatgaccatcatctatatcttcagacttgacccttgttgagtccaaccccgttcccctatcaaagcaaccagcagggacagatggaggtaggggctcccctacatgcaggaaggttctcttcctcaaactaacctagtttacttttcctttctttctgcttcccttcccaccaaatctcagcttcatctctcatagtttgtgtttgaatatttttaaagaggaaaagtgcaataaaataaatagtgactgttttctttagcaatagctctttcaaaatcttgctctcaggactgaaaagtgatagatagtacctggattatcagataatgcccttgacttctgggggctcgttcacagtctctgtagtttcttcttcccatgtgttcacatgactcctgtcctctgagatctgacctccttctggaatggacacatatgctaagatgcagtgtatgcacacggaaggcctgtgagagggctttgtcgctctgtctctttcctgtgtgcatctctctgtctccatgtgtgtctccgtctcctctccctctgtctccccatttctgcctgctgtcccacagcatccttacaacctctaggcacaaaaatcctaagtttatgtgacctcttcagcccattttgttgactttccctcagtctggcagatgtaatggaagcctacaggaaagcacttcccaatagataagaataaagcatcctgagccattacagaagatcatttccatgcactaaaagccattacttgatccttttgctgcccttcctcccttccccagggagatggatgctgagggaatgtggcctggaggtttgcacttgggatcagtagcctgggcagatttgggaattgccctctaagtctccttcagaataagctgacttgctcaaccaaagggactccatgagagctgcagaaggaagcaagttcttgtgggtttcggtagaagtctacagggatagaagtttcggtggttagggcatgacattagtgaaataaagactctaccacccgctagagtgtgcagctgcacaaatatttgcacacataaccaggggattcagaagagtcccctttcctaaaacatctgtgaggttaaatgctcagaatggacaatcagggaaggctggcaaccccagggtcccattccattcttttttgatctaccttgctctatacacatgtgtacagcaaaacctcagttaactgatggggaaacctcagggacgggaacatcctggttgctttgcaattctggttatttgagtgggaatgggaaagcatgtctggttcaacctttgttattgagaaaaatatttcctaagtaggttagcataaactttcctgccttagttaagtaaagtgtttgaagataacagggaccttgccttgctcagggtcaacactgtaaacctcagtgcttattgtacagaagtggagataggtggagaagaccaaagagacaggctgaatgactgctggctacaagatagacctggaaatgggccactggggcacatcctggctcatcagatagagcccttgctgtcatttgcctctttctactgaaagtatagtaagaaaacataattcttgtccatcaaggttttggttaattggtcctgagtttttagaggttttccatatatacatatatttgtgtgtgtgtatatatatagtatatgtatatatgtatactattttttaaattatagaattatacattgaccaatctccttagtttcactcatgtggaataaatttggca

SEQ ID NO: 5168 - DNA, 736 bp, Macaca Fascicularis
  misc_feature (1)...(736): n = A,T,C or G
cggnnnccccccagggctgaganntcggagtcnnncagtgactcgcnnnacgactcgctatcctcctgtgggagtcagggctgagggnnngcgccacaccatggccccactggatttggggaccacagactggatcggctctcttcatgcccctggagccagggccctccctgaagggaccaaggaggcaggtggataagaaggtgaaaagggagtccctggcacaccccaccacccactgctactgcggatgagatgaccatgctcagctcagggagagaccccgcccttggtcccttctctcacccagagtaaggctcttccttgaagggactgggggtttaaggccactgtgtcacagccccctagctcctacttcaggctgagccatcttgtggtgctgggcttcctgcccaccagccgtgccatctctgcccaacctggctgctcctctgccccgaagccctcgcaaggtcctcctggaggcccctgtgcttgtggagtttgggggctgggggacaagttgccttctctctctgtcctggtcctccctgctgtctggatggtgctgccctcccctgccccatgcctttggggtctatttgtccgtctttttcgttgttgtttttatatattgaagcgtctggcccagcccccagccccgcactgcggttaatttatctgttgtttaaaatgcggctgctctgctccctgcctctgcttctgccgtatccca

SEQ ID NO: 5169 - DNA, 893 bp, Macaca Fascicularis
  misc_feature (1)...(893): n = A,T,C or G
gagannnnnnnnnntataggaaagatactaggtatggagaatcagatgttaacttgtattgctatttggtttggttttnnnagacaaggtcttgctctgtcacccaggctggagtgcagtggcatgatcagggcttactgcagcctcaaccttgactgcttgggctcaagcaatcctcccacctcagccccccaagtagctgggcctacatgtttgcactaccatgcctggccannnnnnnnnnnnnnnnnnnnnnnnnnnnnnnnctatgttgcccgggctggtctcgaactcctgagctcaagggttcctcctgcctcagcctcccaaagtgttggagttacaggtgtgagccaccgtgcctggcctgtgttgctattatttttggcaggaacccaggagtccagaacatttcatctgtgatgggttagataatgtgtctagttgtttgcatgccaatcttagtagcctcagttattcaacctaggagatttttctacctctctactaccctgctgaagttgctcttcagcagaaaatctttgtggaacatactccacactttgaaatcttcgtgggacaaaagatctttgtggaaccaatctttgtggaacatattccagctttttgaatgagtgcatatccagtagtacctttaaagttatactttgtacataacaaatactcagcaaatgtgaacctttatttgctcttacttcaaaattagtcccaaatgttggaaataaaatataggacattgatctagatatgaggtttttctccttcattctcagatgttgaagaaatcaaagtagcatatgcacaaggttaaaaaccacatatacaaatattatagaacagcttataatgnnnnnnnnnnnnnnnnnnntaaa

SEQ ID NO: 5170 - DNA, 683 bp, Macaca Fascicularis
  misc_feature (1)...(683): n = A,T,C or G
ttaaggaatagggggaagctaggaagaaactcaaacatcaagtttttgaatacacttcttggcctccttgctataattatcnnnnnnnnnnnnnnnnnnnnnnnnnnnnnnnnnnnnnnnnctgtgattatccacaagtaacacacccaagtgcagaactttgttacttaaacaccatcctatttgcttctttcctcaggnnnnnnnnnnnnnnnnnnnnnnntnnnnnnnnnnnnnnnnnnnnnnnnnnnnnnnnnnnnnnnnnnnnctgttgtgtgcctgctgaataacttctatcccagagaggccagcgtaaagtggaaggtggatggtgccctcaaaacgggtaactcccaggagagtgtcacagagcaggacagcaaggacaacacctacagcctgagnnnnnnnnnnnnnnnnnnnnnnnnnnnnnaccagagtcacaatgtctatgcctgnnnnnnnnnnnnnnnnnnnnnnnnnnnnnnnnnnnnnnnnnnnnnnaacagaggagagtgttagannnnnnnnnnnnnnnnnnnnnnnnnnnngctccttagccccagcctcaccccctcccatcctttggcctcnnnnnnnnnnnnnnnnnnnnnnntacccctatttcggtcctcgagctcatctttcacctcatcctcctcctcctcctcggctttaattat

SEQ ID NO: 5171 - DNA, 708 bp, Macaca Fascicularis
  misc_feature (1)...(708): n = A,T,C or G
gaagtnnnnnnnnnnnnnnnnnnnnnnnnnnnnnnnnnnnnnnnnnnnnnnnnnnnnnnnnnnnnnnnnnnnnnnnnnnnaaaataaaataaaaataaagttgttctctgaagagcaaatgtctcattccagtaatgacccactcagccggaatatggtggagttcagtccnnnnnnnnnnnnnnntatccaaaagactacaagtcattcataagttgagcaaaagcgtttctatctattagcagaaagggcctctctggcagcagaggttaaaaattggcccaacttcatttccatacttcagggaatagcaaattgaagatttacttatctaggacttgaattccttctttgggaccaagttaataaaacaccaagaaactcctgattaaactggataatgaaggattctgtagacagggctgcacgtatcggctttgtttgacttctcttttctcagttaacatctcagagctggaacattccacattccccagcagcgtgtgggggccgagtaaagtttacaattccgactaaaaatcaccctgtgtctggcttatctgaatcccttacccaccccaccaccccactcctatttattcagcaccacactacccaggaaatacactnnnnnnnnnnnnnnnngaataaaatccacacttttctttagattcttgcaactgtatcatatgtaatagtatcactttt

SEQ ID NO: 5172 - DNA, 758 bp, Macaca Fascicularis
  misc_feature (1)...(758): n = A,T,C or G
taggattcatattgcnacgtactgttatttgcttatgtgtagagggaatgaaactagtttccagagttgttattaatctgaatatatatcatgtgttaatattgagaaaggaaaaatacattcccagtgttagtagttcttcatttcctgtctccaacagaaaattaactcattttaaaactagtgtaattcttgataataaattaagagttttgattaagaacagcaaagagcttcaaaatgtaaagtgaatgattagtaaaattatgtctcattttattttttcagcacccataccacaattaacattaggctggattgccatgggaaacatttttttttggtgttaatgcagcaacataatactcactttatgtattactacatagttaaaggatttaactgaatgtatgaatcaaattatatttatttgacctattcaaagctgtggtttataggaatttgagaaaggtataagaaataggataaaaagaaggtcaccaccatgtaccaggaatagctttactttccataaatagaaatataaatttaatggtatcctatattactttagtgttgtatacttcataagacttaaaaatattttattctattgattccacttctttagtatgttaagacatttctttaaagatgaccaacaatatccttattttaggtgctactagcaaatgtaagcatatatttagttgcagttagatgtgacagaatgagataatttatgtaaagtagtagag

SEQ ID NO: 5173 - DNA, 692 bp, Macaca Fascicularis
  misc_feature (1)...(692): n = A,T,C or G
ctggtggagacgtggagagggtggggcgggctggagtccgagggtcccacccgccaccctgctgtgcttgggaacctccactccccacatcccagtagcctggtgtccccagtggggttggtgtgcatgtgtacatatgtatttgtgacttttctttggatttgttttgtgtttttgttgagcagtcctggaaatgtttgaggctagacggggaggggccgggacccacccactgctcctgggagacggggtcctggttttaaagccccgtcgtttcaagtgggtggatcttccgcattcgctggagagactctccccacctctgtccagcgggtgtggaatcctcgccgcccgcccgtgcggggggagccggtgcacgnnnnnnnnnnnnnnnnnnatggtcaaggtcttactgtttcggggtttttaaataggaaaaccaaccctgccttcgcccatgcccgccctgcccacagcagcccctgcagtgccaaagagccgccttgtcgctgtgggcgtcggggcgtggccggctcagggcacagcccacgggggcctccgaggctcctcctgggaccggaaccgccgcagggccggagggaaggggtgagatttgtgttggggctggttctgcccatgctggggggcgggggacctcccaggacagatcagccttctttctcatgtaatgc

SEQ ID NO: 5174 - DNA, 2702 bp, Macaca Fascicularis
gtgcgtgttcattgtttagtagtactcaaagctgccagtgtgagaggatttggaaatcacgggatctgctcaatatgaaaatgttttttcgagtctttctgcattttatcaggagtctttctgccactgcagtggatttccttcctgtgatggtgcacccgctcccagttttcaaaaggtacacgggaaatactcatcagaaaaaagccatctttgggcagtgtcggggtctgccatgtgttgcaccgctactgaccacagtggaagaggctccacggggcatctctgctcgagtctggggacattttcctaagtggctcaatggctctcttctgcgaattggacctgggaaattcgagtttgggaaggataagtacaatcattggtttgatgggatggcactgcttcaccagttcaggatggcaaagggcacagtgacatacaggagcaagtttctacagagtgatacatataaggccaacagcgctaaaaaccgaattgtgatgtcagaatttggcacactggctaccccggatccatgcaagaatgtttttgaacgtttcatgtccaggtttgagctgcctggtaaagctgcagccatgactgacaacactaatgtcaactacgtgcggtacaagggtgattactacctctgcactgagaccaactttatgaataaagtggacattgaaactctggaaaagacagaaaaggtagattggagcaaatttattgctgtgaatggagcaactgcacatcctcattacgacccggatggaactgcatacaatatggggaactcctttgggccatttggtttctcctataaggttattcgggttcctccagagaaggtggaccttgaggagaccacccatggagcccaggtgatatgttctattgctcctacagagaaggggaaaccttcttactaccatagctttggaatgacaaggaactacattattttcattgaacaacctctaaagatgaacctgtggaaaattgccacttctaaaattcgaggaaaggccttttcagatgggataagctgggaaccccagtgtaatacacggtttcatgtggtggataaacacactgggcagcttcttccagggagatactacagcaaaccttttgttgcatttcatcatatcaatgcctttgaggaccagggctgtgttataattgatttgtgctgtcaagataatggaagaatcctagaagtttaccagttacagaatctcaggaaggctggggaagagcttgatcaggtctataattcagcaggcagatctttccctcgaaggtttgttttgcctttaaatgtcagtttgaatgcccctgagggagacaacctgagtccattgtcctatacttcagccagtgctgtgaaacaggctgatggaacgatctggtgctctcatgaaaatctacatcaggaggacctagaaaaggaaggaggcattgaatttcctcagatctactatggtcaattcagtggcaaaaagtatcgtttcttttatggctgtggctttcggcatttggtgggggattctctgatcaaggttgatgtggtgaataagacactgaaggtttggagagaagatggtttttatccctcagaacctgtttttgttccagtaccaggaaccaatgaagaagatggtggggttattctttctgtggtgatcactcccaaccagaatgaaagcaattttctcctagttttggatgccaagaactttgaagagttgggccgagcagaggtacctgtgcagatgccttatggattccatggtaccttcatacccatctgatgggacaaccacaaggtctggaaactaggtttaaaataagtgtgcacttggacataaagactagagcaatagacactgaggacaccaaaaggggggcaaggaggaagaggggcaggggttaaaaagctaccgattgaatactatgtttcctatttgggtgatgggatcattagaagcccatacctcagcatcacacaatatactcatgtaacaagtctgcacatgtaccccagaatctaacataaaaataaaaagaaaaacaaagaatgtactgtatagaaaagacagagcataaagggcaccgtacctcccaaaccaatgtcccaaatagacatttggtttaaaaatttctgttaaaaccataattcactatttccttgccactgccaagtcacgccatggcagaggctcgagtgcatatgaggttctgttttacctttaatacaccatcatggccaacggaggcattgctgctggaggtgtcatggccattaacactactttataagaggtgcggaagactgccctcacccatgatggcctagcatgtgcaatttgtgaagctgccaaagccttagacaagcgccaagcccacctttgtctgcctgcatctgcagtgagcctatgtatgtcaagttggtggaggcccatggtgctgaacaccaactcaccctaattaagattgatgacaacgagaaaccaggggaatgggtaggcctctgtaaaactgagagggaaacccccgaaaagtagttggctgcagttgtgcagtagttaaggactatgtcaaagaatcttaagccaaggatgtcattgaagaatatttcaaatgtaagaatgaacaaataaaactttggcactcatgaaaaaaaaaaaaaaaaa

SEQ ID NO: 5175 - DNA, 750 bp, Macaca Fascicularis
  misc_feature (1)...(750): n = A,T,C or G
ggcagcagcaggagcaacagcaagccaaggttgatgagaattgtgcnnnnnnnnnnnnnnnncagctgcgcctcgccatggacgcgcaggccacccatctggccaggctggaggagtcctgtcgtgcggccatgatgtgtgccatggccaacgccaannnnnnnnnnnnnnnngnnnnnnnnnnnnnnnnnnnnnnnnnnnnnnnnnnnnnnnnnnnngccaaccttgcggagnnnnnnnnnnnnnnnnnnnnnnacctactgactgaaaacccccaggtcgcccaacaccgtacggctccccaccgggtcctgccctattgctggaaggnnnnnnnnnnnnnnnnnnnnnnnnncatcaggaaagagcaggaagtacaacgctctaagaaggaagcnnnnnnnnnnnnnnnnnnnncacnnnnnnnnnnnnnnnnnnnnnnnnnnnnnnnnnnnnnnnnngcattgctggagctagaagagcaggagagggaattgtgtgcnnnnnnnnnnnnnnnnnnnnnnnnnnnnnnnnnnnnnnnnnnnnnnnnnnnnaaagcccnnnnnnnnnnnnnnnattcagtaatctnnnnnnnnnnnnnnnnnnnnnnnnnnnnnnnnnnnnnnnnnnnnnnnnnnnnnnnnnnnnaggatgtttatctcttccttctcctccatcaagctcacaggcggttaggagtcaaagagaaaaatgctgcatactcccnnnnttctaacctaggtaaataaa

SEQ ID NO: 5176 - DNA, 782 bp, Macaca Fascicularis
  misc_feature (1)...(782): n = A,T,C or G
cagagcagaccctgtcccagctgccacaagtccagaannnnnnnnnnnnnnnnnnnnncacctccaccnnnnnnnnnnnnnacgatagnnnnnnnnnnnnnnnnnnnnnnnnnnnnnnnnnnnnnnnngctgcagcagcagccgctgctgctgttactgcannnnnnnnnnnnnnnnnnnnnnnnnatnngagccccctgcgtcgcgctacagccccagtccccactgttggagagggctnnnnnnnnnnnnnnnnnnnnnnnnnnnnnnnagcttcagcagccgcgcggaattctctgtacgacatnnnnnnnnnnnnnnnnnnnnnnnnnnnnnnnnnggcgcggtactcagccttttaaagcttgaggtgggatgtgtgtgggctgaaattccgagatgcggttgtgcatgagaatacacccttcgtggtaccccatctccgggacgttctcggctctgtgcgnnnnnnnnnnnnnnnaccgtggaccttaatnnnnnnnnnnnnnnnnnnnnnnnnncttcctttcctttcctttcctctcctgcccattttcctgttcttctgtccttcaaaacttctgtagcttcccattcatgttctgttctcccagcaggcctcattgtgtgcagaaactgtggtgggggctgtgctgtctcctccctgcctcctgcctcctgcggctgttggatttgggaatgaccttggtgagagtctcactgctccagggtctctttttggtccaaaggctnnnnnnnnnnnnnnnnnnnnnnnttttctt

SEQ ID NO: 5177 - DNA, 695 bp, Macaca Fascicularis
  misc_feature (1)...(695): n = A,T,C or G
tttatgccacttttctctnnncataccttccnnncatgtgtacttagccacctgtgttgctttgaatctgctaccagttctggctcaaatgtggcacaaaatcagtacatcagacacaccatgaaatccctgtggctgtaaattctaaggaatcttttgacacttccagcccaaagaacttatttttatttcatattatataagagtccccacctctactccatgtaccccaaaaagataagctgtcctnnnnnnnnnnnnnnnnnnnnnnnnnnnnnnntggatattgccaaggcaacaatcaaaactttgaaaatgacctgccaattttgggtagcaggttcagacaacaagagagtaagaannnnnnnnnnnnnnnnnnnnnnnnnnnnnnnnnnnnnnnnnnnnnnnnnnnnnnnnnnnnnnnnnnnattgggcctgtgctaatccaggaaggttgttttgtttgcttgtttcttgtatttactcgtgactaaattttattcatttaagtcagaattttgatatttgaaataagactactttcccttttcttaatatctataaaaaagacgaggcagggatgctgtgttctttctgtccaattctaaatgtgatccttgccattgattatttgaattcaagaaagctgtactttttcatcacatataactcacagtttcattttcacattt

SEQ ID NO: 5178 - DNA, 747 bp, Macaca Fascicularis
  misc_feature (1)...(747): n = A,T,C or G
ggaccacaagagacttggacatcagcaacaagacatgaaaggtctatcttcatgtaatgggtcctcctttagaagnnnnnnnnnnnnnnnnnnnnnnnnnnnnnnnnnnnnnnnnnnnnnnnnnnnnnnnnnntcactttgttatttacaagatcttcttaagtgggctgctcctgagctcagtgtgaaggttatttaactgtagtgccagtgatttacacagctcagagaattgacctgtccagttaacagatcactgcttcatacgtttttaaattattttaatttaatattctttagtagaaatagtccacaaaaacattttcttgaatttaaatatacaacttttatatcatgtatcaaaccagattttatattcaaactatcacattttaaattctgtacagaacagnnnnnnnnnnnnnnnnnnnnnnnngaagtttgaaatgtcatttagatcaaacacaagggtcaaagcccaggccaagtattaaagttttacacttaaagagtactannnnnnnnnnnnnnnnatgggtggattaaaaaaataaataaaaaatagtgctaaagggcttacttcaggcaaaagtgttcctgatgtaccaaaaaataagatatagtttattttcatgcctccctgctcctaataatgtatnnnnnnnnnnnnnnnnnnnnnnnnnnnnntgtgaaatgtattctggatgtatctgatgtcatttttctattaagacccaagtataatgt

SEQ ID NO: 5179 - DNA, 730 bp, Macaca Fascicularis
  misc_feature (1)...(730): n = A,T,C or G
tgccagcagncctgctatgtgcctgnctgctgcaagcctgtgtgctgtgtgcctgtctgctgtggggcttcctcatgnnnnnnnnnnnnnnnnnnnnnnnnnnnnnnnnnngcctcttcctcctgccagcaggcctgctgtgtgcctgtctgctgcaagcccgtctgctgcaagtccttctgctgtgtgcctgtgtgctctggggcttcctcacnnnnnnnnnnnnnnnntagctgccagccggcttgctgcaccacctcctgctgcagaccctcctcctctgtgtccctcctctgccgccccgtgtgcagctccacctgctgcgtgcccgtcccctcctgctgtgcccccacctcctcctgccagcccagctgctgccgcccggcctcctgcgtgtccctcctctgccgccccacgtgctcccgcccggcctgctgaggcctcttctcaggccaggagtccagctgctgacaggcatgtcccccagggccagccaggttcaggtcctgacctgggttaggtggctgcccccacctgggatggggtccccgtgtctcccctgtgctgaggtgacctccccctccttgctcccaggagtcccatccttgctgctccccagctcctgcctcccaccatgtgcccacatgcctgctgggtcccctgtcctccctcccagcttctctgcactggatcacctggcctcaacttgagcctctcagcacctcctcct

SEQ ID NO: 5180 - DNA, 604 bp, Macaca Fascicularis
acacaagccgctttaggagtcgcgaggttcggagccatcgctgctgcctgctgatccgcgcctagagtttgaccagccactcttcagctcagctttcccggcgccgagatgctgtcctgccgcctccagtgcgcgctggctgcgctgtccatcgtcctggccctgggctgtgtcaccggcgctccctcggaccccagactccgtcagtttctgcagaagtccctggcggctgccgcggggaagcaggaactggccaagtacttcttggcagagctgctctctgaacccaaccagacggagaatgatgccctggaacccgaagatctgtcccaggctgctgagcaggatgaaatgaggcttgagttgcagagatctgctaactcaaacccagctatggcaccccgagaacgcaaagctggctgcaagaatttcttctggaagactttcacatcctgttagctttcttaattagtaaagtccataccagacctctgatccctcacccctaaaccccatctctcttccctaatcctccaaatcctcagcgagacccttgcattagaaattgaagactgtaaatataaaataaaattatggtgaaatt

SEQ ID NO: 5181 - DNA, 772 bp, Macaca Fascicularis
  misc_feature (1)...(772): n = A,T,C or G
gctaattactcatagcaaacagaattatgtatattttgcaaactctaacacagaacacttaatgtatcagacaaccatgattatgatgtatacatctggtataaacaatcttttttgcatattgaattctgcatttttttcttccttgatatgtatgagattcaccagtaccagtttttctcttgtggtggcatagagttgattgtcatttgcattatctattaaaaacctgtggcagctcatggtattattgaccatatgttctagtgtctttttgtagatttaaatattttattgcagtgtaaagtttaatatttagatgtgtgatacatctttggataatctgtaattaaattgatcttttgtaannnnnnnnnnnnnnnnnnnnnnnnnnnnnnnnnnnnaagcaattatttttctcttttaactggaaatcatatttgtaagttgtggtacatattatnnnnnnnnnnnnnnngatttgatttatattttgtgtatctggttataaattttatatagcattcaatttgacaaaatataagtctgtttgatttgaatttaatgtgtgtgtgtgtgtgtgcgctcttccttgagccttaggaaattaattctacaaatcttatacagatataaatgtatcagacttatatttttgcaatgctatatatacatttcttctgtttattaaaatactggaattagtgttatgtagatatagttgtagatatcagaataaaagttgaatgttgtgaaaattacaacttaataa

SEQ ID NO: 5182 - DNA, 746 bp, Macaca Fascicularis
  misc_feature (1)...(746): n = A,T,C or G
cagtgtatgtgaaattgacnnncagtcagagtagtatgctgttgactgtgttaaaaattaatttgccagagttctannnnnnnnnnnnnnnnnnnnnnnnnnttctaaattcattgttttatgccttaaaaattataaataatgataagnnnnnnnnnnnnnnnnnnnnncttagaggcattgtagttgatattatagtaatctttttagatgttagtaatttttttgtaaaacttaaggtagctttacctattaaagtagcacctattcttttgaaagggattttctcaaaggatttttagggcttcataatttcttggtgctctgtgtaagtccctctgatnnnnnnnnnnnnnngattttaaacagaaatannnnnnnnnnccagtagatggcagtgaaaaataagcnnnnnnnnnnnnnnnnnnnnnnnnnnnnnnnnnnnnncctcagnnnnnnnnnnnnnnnnnnnnnnnnnnnnnnnnnnnnnnnnnnnnnnnnaaatannnnnnnnnnnnnnnnnnnnnnnnnnnnnnnnnnnnnnnnnnnnnnnnnnnnnnnnnnnnnnnnnnnnnnnnnnnnnnnnnnnnnnnnnnnnnnnnnnnnnnnnnnnngaacggtatgacaataaatttagaaatttattgcacacacactactatagacatgtaagannnnnnnnnnnnnnnnnnnnnnnnnnnnnnnnnnnnnnnnagaatggtgcctgnnnnnnnnnnnnnatggat

SEQ ID NO: 5183 - DNA, 727 bp, Macaca Fascicularis
  misc_feature (1)...(727): n = A,T,C or G
ggctcacagctcaccctggcctgtcccggtgattaannncgggcaggcagttgcctgtgtgggnnncagctttgacgtgtgtgaactggaagtcaaaatgtaccgcccagagaggtctgggtgagacggggtgaggcgtccctattccccgggtgaacatttactgaagcaagcgaatgaataactgtgtcattaccacgaaggctgtggtgcatgtgggtgcgtcccaggtgcccccgaggaagcaacttannnnnnnnnnnnnnnnnnnnnnnnnncccagcacctcgatgtacgnnnnnnnnnnnnnnngctgataggatcctaattcccaggggtcccatttagggtgattcttatcctcctgccgccccagccttaagnnnnnnnnnnnnnnncaaaatccaggcctcctgactgcccctccctcgctccctcaacaaaatgtggcccaagaagtaagcagggggctgcagagagggagggcaggagaggggcaggggccggacccccacccagggagatcccaggaataggggcccacgcgccgccctggatcgggnnnnnnnnnnnnnnngggtgccaccacctccctgccaccccatccgtcaccagccagacacattttcggtcctgccaagctggggtggggcagtgtggcacagaggatcggctcagcttccctgctcccccaccatcctttctgctgcctgcggnnnataacaga

SEQ ID NO: 5184 - DNA, 762 bp, Macaca Fascicularis
  misc_feature (1)...(762): n = A,T,C or G
cccaggggcagaggagggagcgccannnccacccgggcggggagagaccccgagagagactgcacttggccacagcgtctccatnnnnnccagactggtccagacgtcggggaggtgaaacacggctcttctctaccagctgccgcggcgggggcaaagcccccagagccctcactggccccggcgggacgaggagatcatgccgggcgcacacacggcagcttctgtctgaaaacggtgaccttcgggcccttttctccagcaactgcagaggcatttcaggagttggagagcggagtgcattttttaaattttttgttccattctgatcaactaaagaaaattaaggtgtccacctctcacaaacagtgacctccaggtcagaggggcaggagccccatcccagccgtggtcctgttgccacagagctgcgacggcctcagactgggcataagacctggtgcggagccaggcggagggacacagagccaggactcccaggcctatttttaatggagtcaaatccacgtggtttgtatcttctttcctttaatcttgggcattttgtttctctttctgagaacataacttgaaacactacagagccaataatcatataaaaagtgtatccgtaaacgctgtacagttttatatacattcacaatgtacttttgctgccttctagataatttattttgcaacacattactgcacagttgtaaataacttatgtactgtaacatcactttcagttatgtgtaa

SEQ ID NO: 5185 - DNA, 721 bp, Macaca Fascicularis
  misc_feature (1)...(721): n = A,T,C or G
cagtaatgggggcccacannnnnntcagnnntattttcctgncatnctgatacactgtcagacttcatgtccaaggtnngcaccagctcccattactgtgtctgcatttccacccagagggaggagggaaagaaggggatgggccgttctctttttctttttactctgtttcaacaagcttgctgggttttttttgtttttttgtttgtttttttttttgagcacctgcctttttctggacacttagattcatcagtgaatgaaacaaaatgctgtgcccttgcagtactttccttctagcaggacagtcagaaataacatacaaataagtgaatgatatactatgtttgaatgtcatgaatgcaggggaggaaaaaaggatagaacaaggtaaggggactctaatgtgtgtgtgtgtgggggggcaggttgtacttttaaatagtgggctagggcagaactcactataaagttgaggtttaagcaaaggcttgtaggaggtgtaggaagagtgttccagacaaagggaagggccagaggaaaactgagatacaggcacactcggacagctctaagagtagcctggagacactgtggtggggcagagtgagaaggggaggatggcaggaggtggagtaacagaggtaagggtggggaattggtggggggtagnnnnnnnnnnnnnnnnacaatctggggcttgtgtccaaaatggtagcca

SEQ ID NO: 5186 - DNA, 741 bp, Macaca Fascicularis
  misc_feature (1)...(741): n = A,T,C or G
gatatgaccagannnnnnnnnnnnnnnnnnnnnnnnnnnnnnnnnnntcccagagctagatttgaactggaatggccgtccttgggnnnnnnnnnnnnnnnnnnnnnnnnnnnnnnnnnnnnnnncgnnnnnnnnnnnnnnnnnnnnnnnnnnnnnnnngtgacagttccnntccttgccagaaagagagactgcaggagtttagccagaagatggaccagatcatcgaaggtaacatgaaggctcactttattatggatgatccagcaggaaacagttacttgcagaatgtgtatgcacctgaagatgatcctgagatgaaggtggagcgttacaagcgcacctttgaccaaaatgaggagctagggctcaatgacatgaagacagagggctatgaggcaggcctggcttcacaacggtagcagtgggggggtcaagggccagcgtnnnnnnnnnnnnnnnntgtaggttatttattagtatcagaagaaggctgggagtgtcctccccaccagcccttgcccatggtggggaggacatctggtctgggtcagactttctaaacagcttgtgatgtaagtgtgagcctcttgtgttacttaaccttattttggaagttttgannnnnnnnnnnnnnnnnnnnnnaaatgaaccaggggtatgtcattatcacttttttcatagcaagtccttaccctccctccacttaatgctctgtcctctaaggttagaactctgaag

SEQ ID NO: 5187 - DNA, 730 bp, Macaca Fascicularis
  misc_feature (1)...(730): n = A,T,C or G
taatccagcactttgggcggctgaggtgggtgaatcnnnngaggtcaggagtttgagaccggcctgaccaacatggagaaaccgcggctctcctaaaaatacaaaattagccacgtagggtggtgtatnnnnnnnnnnnnnnnnnnnnnnnnnnnnnnnnnnnnnnnnnnnnnnnnnnnnnnnnnnnnnnnnnnnnnnnnnnnnnnnnnnnnnnnnnnnnnnnnnnnnnnnnnnnnnnnnnnnnnnnnnnnnnnnnnnnnnnnnnnnnnnnnnnnnnncaactaaagttggtagaaaaattatttgtatgtaactttaaaaggagtaggaagggttttttgcagagttattatgttcaaagtatactttatttcttgaagaaattacagattttttgtaaataatgatgtaattcaactctcaaaatatttcctactgtttattttggttgnnnnnnnnnnnnnnnnnnnnnnntcagttattgcngcattaannncgtgagagtcttttctacttaagtggccattatgatcttctctatgaaagagtaaggacattaaaatgtaagatgcatgatgaaaaattaagtgaagtggctctttgtggttaacttatattgaatgatgcattaggtaggtgttcacagtaatatgattttgcattatgagaagaaaacatttttaattttacttaaaattaaatgaaaataaattagtatattattgtacta

SEQ ID NO: 5188 - DNA, 739 bp, Macaca Fascicularis
  misc_feature (1)...(739): n = A,T,C or G
gagtatgnnnggccaccatctgatgtggcccttctgtnnnngcccctctctgcaggcccctgattgctgactctgcccgcctgccacactggctgtgtccggagccactcgggatccagtccacacacacccctcagacaggccctgtggccagagaaatgctcccacggcccaaagcccctgcctcccccagacgcccccagaccccaaccctgagtgagcaggacgcggannnnnnnnnnnnnnnnnnnnnnnnnnnnnnnnnnnnnnnnnnnnnnnnnnnnnnnnnnnnnnnnnnnnnnnnnnnnnnnnnnnnnnnnnnnnnnnnnnnnnnnnnnnnnnnnnnnnnnnnnnnnnnnnnnnnnnnnnnnnnnnnnnnnnnnnnnnnnnnnnnnnnnnnnnnnnnnnnnnnnnnnnnnnnnnnnnnnnnnnnnnngatgcggacctnnnnnnnnnnnnnnnnnncccgaagctgcagggaggccgccagcctggtggaggacctgacacagatgnnnnnnnnnnnnnnngagaggcgcaggctccgagccctgggacgggcagggggcctgacgtctccgaggaccgaactgccctcctgcccgcccgcatcgctcccacccctgcccggtccctcccgaccagcaaacctctcctaccctgcggctgtgtttttaattatttttacatataaatgtgctgcacgcctcatctgcctcgggttctcactcaggataaa

SEQ ID NO: 5189 - DNA, 600 bp, Macaca Fascicularis
atgaaacacagcctccccgacctgccctacgactacggcgccctggagcctcacatcaacgcgcagatcatgcagctgcaccacagcaagcaccacgcggcctacgtgaacaacctgaacgttaccgaggagaagtaccaggaggcgttggccaagggagatgttacagcccagatagctcttcagcctgcactgaagttcaatggtggtggtcatatcaatcatagcattttctggacaaacctcagccctaatggtggtggagaacccaaaggggagttgctggaagccatcaaacgtgactttggttcctttgaaaagtttaaggagaagctgacggctgcatctgttggtgtccaaggctcaggttggggttggcttggttttaataaggaacggggacagttacaaattgctgcttgtccgaatcaggatccactgcaaggaacaacaggccttattccactgctggggattgatgtgtgggagcacgcttattaccttcagtataaaaatgtcaggcctgattacctaaaagctatttggaatgtaatcaactgggagaatgtaactgaaagatacatggcttgcaaaaagtaa

SEQ ID NO: 5190 - DNA, 1777 bp, Macaca Fascicularis
ctaccactttataatcccttcattgtaatcccatgaaaactaccaatttaccatgaaacaaaacgctagatgaatatatggttagaaactaacaggaaataagtttaaatatgaaaataatagagagttacgtttgtttctggataatattatcatggcatcctggatgacattatggattggtaccctgtggctatatctgcttgttggattattgggttgagactgactaattacccaattttattatcatctcataacagattcccggtatgctctttgccattgaattttctgaaagcataatgaaaatggaaaatattatttgttctattttatgtcctgtgaagacaatatcagtatgtctcttggtaaatcacatgttaggatgccatgtagaaatcctgatgaattcatgtgtaatcctgatgcagaggcaatgattactttattttgtggactgtagaatggaagctaaataagttggtgacatcttctttgcacctgttttttattttgtaaatattagcattagagcttcatcttggtgaatttgtcaaacatgcttctcctatggaaaagcattgtaaaaatgtgagttagaaaagatgttgtattccaagggagcagtagtagtcatcactatttaagtagaattgtttcattgtgacattttataagaggcttaatgaatagggtataaaattttaaatttaaatgttttaaatatgaggtttattacaaatatagaacaatgtggacaactggtaagacttcaagtattcattcattcattcatccatctaacatcattattgataaccaggtaatagtgaggctgtgatgattcccaagaaagcctgaaattgagctacttccatttatctaaccacatattccactctacagttaagagtttattcagcccactaaaacattttcgtaacatacattctcaggtttgctaactctgtgactaattttaaaattccatatgatattaagcttcagccactatttaaaattttaaaatgtccctgctcaatttcaactgcaggtaacatttctgaaaagagatttgatttctttttaaatggaatggctctgacttctctttccccaatgaaatgtatcatctttaatgttatatggtggaaaaattcagtgaccttaaaagtatatttcatgggaatcttttgggcctcagtgacacccacaggaggatgctttggtgttagagagagagattggaattgaaaggtgcctccactttttgctttatactcttgcttcataggtgggtcaagacatacaagacaattgccagcaggtcaggttatcgacctggggtatctaaacacctgagtaacagtggcttctatatatattacatagaaattaaagaatagtgagttttcactagctaacaattgctaacactgagaactgcattttattattaggagatgtaaattaaaactgtcttttcctcaaatagcaacaaggtactcagtatgaattgcataacacagctgaaaatatgtttcagtgtcttccaaaaatgaatatgcctgatgttcagttatcagtgataaccactttcggttatcagttgcataatgtttagttaaaaatgacaattatttttctacctcagtatctcaaagtagaatgacattccaatgtggaaatcagcattttctgatgggtttctttgcatatgaacagccctatgagcatgacccaaatgtagattaaagaaaaaaaaaaaaaaaaa

SEQ ID NO: 5191 - DNA, 731 bp, Macaca Fascicularis
acatgggaaaggagcctgatgctagccccacctctgagggctggagtgaccgttcagtgcctctcactgagggaccagggcagccagggtccttccaggcacacaccagctgtcccgccttccatcctggtgtgccagaaggggccaggagctcgctcagcagggccagttccccttctcgccccatctgcagagctgtctgcgaggtgagtccagggcagctgctggatctcctgtccagagaaagcaccagccagcacactgcgctctccttggccctcacctctttttatttttagtaatcccagaaggtgttgatagggattgcagccggctcttagttgtttgtctttttttttttttttttataatctatttttgttggggaaacctggatttcccacaatgtggaagcaatgaggagggggtttctggtcctggttctgaaggctgtgaccttcagcacacctctatacaatgctgatagccccggtacctctctctctcgggtagttttaaggattaaatcagataatgcacacggaaatacgttacaaatggaagtgttgttcttcttccaagtttgcaaggagaggcagcggcagtgtgtctgagttccacatgacttatattggattattatataaatcctgtaaattgatctgtcatactcttttatgtccattctttatgtcatatttctctctcacatatacacacaccagttgtat

SEQ ID NO: 5192 - DNA, 2430 bp, Macaca Fascicularis
gttgactaaggaagttgataaatggcaccatctgaaatagttactcgccctgaataggcaggtggagaatattagctacagatgagacaaatcccattatgagaaatatcatcacaacaagaatatttcattccagattttagaatcccaggttttggctcacttcggtcaagaaaaactataaataattgagttcgagataaataattaaatgttagcctcttggagtgcatggcaattggttttgatctctatattaaaattcacaagaccaaggacataagtcaaaacaggtccccttcgtctccctagtcaccatatccagggctaaaaaacaaacttgaaatgggtgccagttagactataggaaacaggatctacaagcaccaggagctcatctatggctatctgacatggcctggggacgcatcactctctggcagctggagattgttaacatcgccaattcaatgttaattgaatgcaaaggaataagaaataaattctggttcccaaagggcagctggaaaggtgttgggcttctcaaactcaggcctaaaaccaagcatcctccttgccagaggaaacggaaagcccctcccccatttttagaatcaggctggaaaacacggctcccagaaagtggggttagaaaacaagagcttgcgtggcggcgccctgtggtccctcgaggaaacaggagagacacaaagagggcctgctcctgggaagccctaacttcgaacccaatccttcctcctagacattacctacagcttcaaagggcagggcgcacacctcccctcccgcatctgtagggcgaagggcagccaaagaggcgcagagaagagtgacaatctgcctagcaagcggcgggatcaaagcctgggtctctacttcccaagctggagatcttgggcttcctgctcctcctgcgcggggcgaaaagcccacctgggatccgagcgggcggccgcgccactctcgcaggctccatacgcccaccgctgcccgcctgtaccacctgcagcgggcagcgacgcctccttgccggtcccgcagggcgcgctgcaggtgcgcggggcgtcccgaggccccgccctagcgtccctgccccgcgccccgctcctcacgctcggtacccgcgccccgcagcggcagcgcacaacgcaccgcctccgccagagccagggaagcgctcgggcgaagaggaggagccaagggtaccgagcgggtggagtcgggagccagagagcggtggaggcggatttcctgggcccggccctctggagctaccatggcgtttggcaagagtcaccgggatccctacgcgacctccgtgggccacctcatagaaaaggctacatttgctggagttcagactgaagattggggccagttcatgcacatctgtgacataattaacactacccaggatgggccaaaagatgcagtgaaagctttgaagaaaaggatttccaaaaactacaatcataaagaaatccaacttaccttgtcacttattgacatgtgcgtgcagaactgtggtccaagtttccagactctgattgtgaagaaggaatttgttaaagagaatttagttaagctactgaatcctagatacaacttgccattagacattcagaatagaatcttgaatttcattaaggcttggtcacagggtttcccaggaggtgtggatgtaagcgaagtcaaagaagtatacctcgacctgcttaagaaaggcgttcagtttcctccctcagaagcagaggctgaaacagcaagacaagagactgctcaaatctcatcaaatcctccaacatctgtccctactgcaccagctctttcttctgtaattgctccaaagaactcgactattacattggtcccagaacagattggaaaattgcacagtgaattggatatggtgaaaatgaatgtgcgagtgatgtccgccatattgatggagaatacgcctgggtctgaaaaccatgaagacatagagcttctgcagaaactctataaaacaggtcgggagatgcaggagaggatcatggacctgcttgtggtggtggagaatgaagatgtaactgttgagctaattcaggtgaacgaggatttgaataatgccatccttggatatgagaggtttactagaaaccaacaaaggattttggagcaaaataaccagaaggaagccaccagtactaccagtgagccttctgccccatctcaagatctcctcgacctaagtcccagtccccggatgcctagggacactctgggagaactcaacaccatgaataatcaactttcagacttaagtaaataaacactcaggtcttttcagaccagcagaagagcttgatgtgaaacagttctccttaattacatgattaaataccacctaaaaaaaaaaaaaaaaaa

SEQ ID NO: 5193 - DNA, 667 bp, Macaca Fascicularis
  misc_feature (1)...(667): n = A,T,C or G
ctttaaaagcaacttggaacannngatccacctccacattcaagtaatttatgaatatgcagaatagggatctgttcatctagaaatttttaccatttgtcttctgtgtagctgcaaggaacactaatgtttatacaactgtcagtccacccagtggtgcaactggttctgattcagtcttccgattcctttttgtttttcactttttcctatttctgaggttttttgtttttggttttgttttgttttgttttgtttgttttttgtgatcttgattttgatgaggggttggggagcggggagggagtcgaaccaagacttggagttaannnnnnnnnnnnnnnntgcatccaacaggcagaatatgatctgtgtccaaaagtgaacttgagtcaggaatgaatccatttcagcataaacaagcacaaaaatttagtctgctggctgactggaagcaaaaaaagtcaagatggaatataatgaattccaacacaatggggcaccaaggcctttaggcctctctttttattttgctttggttttgtttgtttttctttagagacatgctctttctcatgggacttgaagtgggctcatctttgtgcagtgctggttttgccatactcatttcaagtattatagacatatgtaatggtgaaaatatatg

SEQ ID NO: 5194 - DNA, 725 bp, Macaca Fascicularis
  misc_feature (1)...(725): n = A,T,C or G
gaaccgccgcggaggnnntggaacgtcncgcgtggtgcccaccgctgaggaannnncgtttngnnncctgggagggctgnnncttcccggattctcggcagcacagctctgcggcagcccggggacaaagtctcgtctccaactcctgacctcgtgggccttgactgggcccatctctgaggaccaggaggcgtctgcacagcgtcagtgtctgcagctcgggccgcccaagcgcctgggaccctccttctgggtccccaatctcaaagcctctgcgacacctgcagcctaggaccctcggtccctccacgcctccctcggggccctcgaccccaggcagctccccaggcagctcaaccaccagacccacacaccacggagcctcggtcccnnnnnnnnnnnnnnnnnctcgtaaagccacacacacttagggagcctgtgtctcccccaccctacaggacctgggtccccttacccccatgccccatggagcctcttccactcctgtcctacccgcctcggcctcccaannnnnnnnnnnnnnnggtgtgagaccccgtgcctggccctgcaacctgttttatcagcaggatctttgggacctgtatccgtgtcaacctcttatgtggtcctatgactgggaagcccaggaaagtagcccaagaaggagcggctccggtttgaacgcctctgacattagcagctactgtttgcacaagcaaaaa

SEQ ID NO: 5195 - DNA, 1252 bp, Macaca Fascicularis
  misc_feature (1)...(1252): n = A,T,C or G
tagacagcagaaaggtgtaattttctttaatataaaagaagcttttaacttttccagcctattataataactgggttatattcactgtgactcaagctaattggcattgtggaacatttctttaccttcaaagttttctccaccaatcatttcagttctattgcagtcctggtgccatatgtcccctgcaaattgtgaaagtaattagtgacaaaatagcaacctgctccttttcgatggccaaactgtcagcattagcagatttgggtaagctcgtggtactataacacgtactggaaacctgttcctcatcaccacctannnnnnnnnnnnnnnnccatcttctagaagacggtggcatttatggtggtcttcttttgaatggaacagtaatttgtgtggatattgttaaagtgtttaaagaatattttgacaattaagtttacattttacaattgctttattttttattaaaatagttgtatataaatattaccctatttcactgttgttcaagtaaacctaaaccttgtagacaagtgagtcacctgatatgtatagaagctgtgacatatagagtacatttattgtgtaaatgtttatgaatataattgttcctgtgtttttataagttggggatattttgttgttttacaacaacaaaatttattgcatttaaatggtttttatgtaatagaaatcatgcaaaatagtgaaggatttaaaatatgtatatgatatatgtaaatgtacaaactttagaaggaaataaatccaacaaatttcaatcatttgggggaatgtttttatttgcttatttaagcaactgtaataatacttttaaaaatcaaataagatcacactctgcctgcctctgtagaaagacaaccacaagccccaggtcgaaagatgtggccagagtggttgaacaaagtggtgagaaaatcagactaacgccgactcacctgcgcgcatttctgtcaagatttgtgtgtgaatacttcagagatctgtggtcttcattaaggggctttgagcaggggaggaggaaataaactttttgaagcaatttcaagagtcatttgcattcccatttatttctcatcaaggcaaagagaccatgcagctagttattgtcctaaaatnnnnnnnnnnnnnnnnnnnnnnntgcttttttctgccccgtatgtacctttgtgctcttttcatcaaacctaatgttaaaagtaagatctgtgactganaatgcaaa

SEQ ID NO: 5196 - DNA, 746 bp, Macaca Fascicularis
  misc_feature (1)...(746): n = A,T,C or G
gggaaggagannccgctggagaagaggctggtggcagaggaggaagaggacgaagaggaggtggaagaggacggccccagcagctgcttggaagacgattacactgagnnnnnnnnnnnnnncacagacaacctgacgaagaaggagattcagatagagaagatccacttggacacgtcctcctttgtagaggaactgcctggagagaaggaccttgcccacgtggtagagatctatgactttgaaccagcgctcaannnnnnnnnnnnnnnnnnnnnnttttctgagttccaagagaaggggttnnnnnnncagtgnnnnnnnnnnnnnnnnnnnnnnnnnannnnnnnnnnnnnnnnnnnnnnnnnnnnnnnnnnnnnnnnnnnnnnntcggtgctcaagatccggcccctcacgcagggaagcaagcagtcaaagctcaaagccttgcagaggccaannnnnnnnnnnnnnnnnnnngagaggccgcagacaaatgtgacggtggcccggaggctggtggcccgggccctgggactccaacacaaaaagaaagagcggcctgctgtccggggtccgctgccgccctgaggcctggagacccagccggcctggatctgcgccctgatgtagctggtgccccaacaccatannnnnnnnnnnnnnnnnnnnnnnncccgcgccaccctcaagcttcaccatggggtgtggtgggctttagtttagtctcacaanatggagaaaaa

SEQ ID NO: 5197 - DNA, 2401 bp, Macaca Fascicularis
cacagctgccagccctgggggtgtggggcccctggagtatgctctccctccagtgttcagccttctggcactgcaggcctaggttggagcagcctcatggagtagggatggactagtttgggctctggggtcttcctggggcccacggacatgtgggcaggaagctgggcagagctggcctggctctgagtggccactgggggaaaggcagccttctgtctgccaatctgggtaggcccagtggccgagctctcatgggagccccctccccacttttttttaaccggcccccattgtttctggtcgtgtggactgatacgggaactgaaggccagccaggggaggggtcggccaaagtcacgcaggctgatggcagctccagagctgtctttgccccctttgtgccccgggggacggctgggtctacaggctgggcaggggtcaggcagggagtccagggtgcctggaagagggggccacagcctgtggctgcctccctggggtcctgccttccaaccacggcgttgcaaggaggacgaggctctgagggggcagctttggagggaggccgttttccagggtgggtgggagtgggctgagggctcatccccactgaccctggacgatgtgaattttgatgtttgcccgtgtgcgtgtgtctcctgggtgtagtggatgccagtcttgttgctgtgacaagtaacaaccttttttttaaattgttttttatacaaaaactcacaatctgacatttggtgctaagggtttcctggtgcagacggtgggcctgggggttgggctgggccagggcgtgggtctccggggtttgggtcccttgctgctcagggaggcagtactgactgggcactgcctctgcccccagcacccaccctcacccatcccccagggagaagggtccccactgggctcggcctgcagtagtagggagacaagttccaggagcactttggggactggggttgcagtacacttcctgtctctggctttatccttgggccagaaggctctgaccctcagcagcccttgccagatgtgctagggagggggtgtggagacctggactcccccacccacgcacacctcggcctgatgagaggatggaggcttgggcagagatgggcgtgacccagcgtcagagggtccggggaggctctccctcctgtgtcccagagcttcactggtgcagccggtggggctggaggtggagggtggggtctgacagcttctgctggggcagcctcgggaggggaggggagcaggcactgggcaggggcctaggtgcactttgtccttgccaccaatggcgcgaggagggtggacctgaacacctctgcagggtgtcgtgcgcctgccccagcctctcaggtacttggcccttggggaggagagaagagggtctggtttttgctaggggtgagtttctgggacactcccaaagcccacagataatccctggtgtgggaagaggagtcctggataccttgatgcttagcactttaaccccctttgtctttaaggtaggcgtgggggctactgtcagaagtggctgttaggtctgacccctcctttcttccctccctctcccacatgctggtctgcagagcactcctcccaaggggtagggccctgggtggagctcagcagggtctgcccactccctacgctggcccacataggcctccaggagccctcagtgagagggaccagcatagcagacccccagagtgtggtgggcgccggccctgcccgggacccagtcggggccctttctgcagctctacctctggctcagcgcacgccccctgccctaagaacaggaaagggcccggaaaggctgactcaccgggccgacactcacgaaaatgggatgcactttatttgctggtgcaaaggcaggtgagggtgcctcctgtgtgaccgttgaccctcctgcctggtggccctgaagggaaggagccagtgagcctgaccccgggaggggccgcccccacgtgccctgtttggcgggccccaggcggctcccccaggccggggtctggggccccaggctctcccctgcctcgcggccgcgcgtcctgtgctttggtttgggttttttaatgccagttctcagtacataagtgcattttgaaagaggttccagctatcacttgtaaccatatatatatacatatatattctatctacaaagtgtttatttgcgagatgtttcgacggtgagttcgggccccgcccgccttgtgaccatctgtccccggtcctcgtccccgccccgcgccctggtcccgaatggcgtgcggacgggccatcactgtatgtattaaaatgactgtatcaaataaatgtttattgatttttttccaaaaaaaaaaaaaaaaaa

SEQ ID NO: 5198 - DNA, 745 bp, Macaca Fascicularis
  misc_feature (1)...(745): n = A,T,C or G
tgaaaannnnnnnnnnnnnnngcacccagacttncctttgtcatattcctttatagctacaacttaactgtagcttatcagagaagctctgtagtcctacactgaagtgtgttcccttggctgttatatggggctgggtttggttgaacttctattctgtataaatgttagaacacagttactacagattgatttacaaactgcatgtgctggtgcttcaggcagccaaaatggaatgctgtggaaagcatatatctacatcttaaaaaacactcagacaggagttaannnnnnnnnnnnnnntttttttgtttaccacttaatctttatcaactctgattttagttaggactnnnnnnnnnnnngaagaaaagtggaaaataacaagtgcccatttaggtttgaagaatccagaatgttttacctttgactttgtgagttacagaagcttggctttgctctaggcttcatgttcccaaatgagccatacatatgtcagtatattcacttaatttttacttatttcagtttcctgtaaaggaaacaacttatacattgatgcttaaatccagaaagtataaaaggttttcttaaactgttaaaatatagtgtctgatataaaggatgtaagttactcagctttctgctccctaagccaaacagtgtttgtcttcagtgtgaaatttaactgtaaaaactacttgtgatgtcaagagattatagatcatattattaataaaatgac

SEQ ID NO: 5199 - DNA, 475 bp, Macaca Fascicularis
ggctttcccccgctgccccggcgaaagcgagcacatctcccggcaggatctttccggagttgttgggtcctcccgggggaaggagggcgggcatgccggcctggcttctccgtcccggcttttccggggatcccagccaccgccgggacccgggagccccatgaggcgtgggtgcgggcggaggtcgtccccgccggaccgcaaggggcccctggcgctccccgcgccgcgccccggggcccccggcccagcctccgcctcccggccctgctgccagcgggaaggaagtttacttcgggcgctgggctgaactccgagcgtgggggagctcgctgcaccccccctccccgccccacgcgcacactccccctcggcccgcgctagaacggggtgcctttggaggttcagagctgctataagatgggtactggtgtcggggcgcccgcgcctgacctgctggggtcgcggccggggt

SEQ ID NO: 5200 - DNA, 1731 bp, Macaca Fascicularis
gatgctggacagttaactcagtaggtctcagattcatcatccaccttttaatgtagagattcacaaactacaagctgtgagacctttgggtggatggctggtactcttcgccatcatgttgcagttggtggcagcttgccctgagtcatgtgtggtgtgcaccaaagatgtaaccctctgtcaccagctaacctatatagtagcagcccctatgaccacgagggttttaatcatcactgatggatatctgtcctctattgagagcaccaacctgtctctcttgtttaatcttgccctgctctctctgagcagaaatggtatcgaggatgttcaggaagatgccctagatggccttacgatgttgcggactttgttgctggagcacaaccaaatatccagctcttcgctcactgatcacaccttcagcaagcttcacagcctgcaggtgctggtgctgagcaataatgctctccgcaccctacgagggtcttggttccgaaacacaaggggcttgacccggctccagctggatgggaatcagatcactaatctcacagacagttcttttggaggcacgaatctccacagtctcaggcatctggatttatccaacaattttatttcctacattgggaaagatgccttccggcccctgcctcaactacaggaagtggacctttcgcgaaataggttagcccacatgccggatgtttttactccactgaagcagttaatccatctgagcttagataagaaccagtggagctgcacttgtgatctccatccccttgctcggtttttaagaaactacattaagtcttctgctcacacgctcaggaatgccaaggacctaaattgtcagccatctaccgcagctgtggcagctgcacagagtgtgctgaggctgtctgagaccaactgtgatcccaaagctcccaacttcactctggttctaaaggacagaagtcccctcctcccaggacaagatgtggccctgctgactgtccttggctttgcaggagctgttggtctcacttgcctaggtttagttgtatttaactggaaactccaacaaggcaaagcaaatgaacacacatcagaaaacctttgttgcagaaccttcgacgaacccctgtgtgctcatggggcaagaaattaccacactaagggatactgtaactgccacttaactcaggaaaacgagataaaggtcatgtccattgtggggtccagaaaggaaatgccacttttacaggaaaatagtcatcaagcaacatcggcctctgagtccacaacccttgacggatcatttagaaacctgaaaaagaaagaccatggggtaggcagcactttattttgccaggatggtagattgctgcattcaaggtgttcacagtctcctggaaatacgacagcttttaatgaagcaggcttacttacaacatataattcaaggaaggttcaaaagctaaggaatcttgagtctggagaagtcctgcctcaaactctgccacaccatataataagaacagaagatatcagcagtgacacatttagaagaagatatgcaatacccacttcagccttggcaggagaaagtcttgagaagcatttaacaaatgaatcatgtcttcacactcttaattagcctttacctatataacaacacctaaaaaaaaaaaaaaaaaaaaaaaaaaaaaaaaaaaaaaaaaaaaaaaaaaaaaaaaaaaa

SEQ ID NO: 5201 - DNA, 1794 bp, Macaca Fascicularis
tgtaagaagaagttaaaactaatgtacttactctttgtaaggagttaagactaatatacgttagcaatgtgtgtaatatattgctaattgtagaactgtggactgtaagtgctaaaaaggtttaatcaaaagtgagtttattgagaatttaaggagtcagatatggaaggaatcgcagataaggtaggacttgaactgagtccatgcaatacagtttatagcaaatgtatagttacaatatttacaaatattatactgaagaatccagtgaaaaaatctgttcacaatataacagtaatttcaaagcactgattctcagtctttttaaaattcacaaattagtaaaactgaaataaaatttggagactgaccaaatcaccaatttttttatttttaccaaataaagaccttgaaaaagaaatactattatccactttcattatcttttcgttttaaaatgacattttggcactaaaagaataagaatttcctttcagattttaaaaattaatacgtttacctttatgaaggactcacttatttcattgtactttttcttattgctataggccaggaaaaacatcttgcatttgggaatcactgattcagagcatgctatctgtgatgcagctttcctattaatacttctgtgttatctatactttagtgaaacttgaagtgtattttaatataaaactcactgtaatataggtatgagagtaatgttacataaagattagttagcttcttttagatctttcagatcttacacactcaacttccattgaaattataggctcttgcccataatttttacatttactgggaatttgtgtatctagaaagatcaggtatgaaaatttggccagttacactaattaggattatgatattgaaaacagacagtcaaattaaggttaatgaaattcaggaaatatttgcataaagaatatgtcattttaaaaatggttttggttgtttcttgaaagatttattttgataactactctctttgccttttgtttccccctttggttctacagagacctcatgattttatctacttttgcctttagcaacatgatgagactgattatgcacgtaaattagagaaaatgaaaatgaactgaaatgcactgaactaaaagtacaaccaggaaaaaaccaaagtttttaaaaaagtggaactttttaccatatgcttaagtttagaaatttttctttcaacatacatatacagaaacaagctataataaaataaaacttgtattgtagaccaccaatattcaatttcttttacaaaattgtttccttaagcatatgtcacatttttgtaaacatggattgatgatctctggttaaaagcttagaaagaattgtgattaagattcatttttgtgaggtttgttcaaactttgctcagatttttaagaaaacaagaataagtatgtcataacggaaagaaagaattccaaatcttgaaaatttattcaaacattgaccccaatgtatcatttcttttaaaaagtcactatagcaaagtgcttaagagtacagacactagagccaaacttcctgggttccaaatcctgactctcctacctcctcgctgggttaccttgaacaagttaattgacatttgtgcctgagtaaacagcagtagaagaacatagacaataattttgagtcttgaatcattgagaaaaaataatgaggaagattgttttggataatgatacattgttactaataaaaactatttgctaaacaaaaaaaaaaaaaaaaaaggccaca

SEQ ID NO: 5202 - DNA, 1178 bp, Macaca Fascicularis
  misc_feature (1)...(1178): n = A,T,C or G
ttagtattgnngtntgtatgagtatctgtatgtgtatatacacggtatttatagagagagactatcccggagaagcctcgttttgatgccattcttccttgcaaggttaagcaaggtgggtgaaaactaagacaactgaaccctccagggcctcccgcttcaaggtcagcatgaggacagaccacagagctgtcacttttgctctgaagctgcttctccactgtcccgttcagtctgaatgctgccacgaccagccaggcaggtccacagagagggagagcagagaaagaagtcctttctctttactgagttcgaggactgcaaccgattttcactgccatctgatgccgtgatcctgagccaaggtggtgaggagcagggcgggcaatttcaccaccacatgccaagaaaagggctgacattttctttcatgggcaccaacctgcatttgtctgtgtcccgaatccacagtcgcactgattcttatggggacacagatcatggtaaagaatctctccctcctcagtaaatgtgtaactgcaactgtcatcacggaggtcacacctgcatacaaagaggtctacaggtaccatcttgtatacacatatatacccacatgtacagacatacatttatgcacattcactccgtttgtttcatatatacaggcataaaatagagtaaatacaggtagttttaaaagtacccttttgtgtgaattgacnnnnnnnnnnnnnnnnnctgaaaataaaagacgttcattatgtatgaaaagtaactgatttgtattctgtgagcatgtaaaagcagaaagttagtgcttgttctaagattcccttcttgttgataaaccgtannnnnnnnnnnnnnnnnnnnnncaaatttttctatcaaaactagtgacagcttgtggcttttgattagagctcgccacgaactagggtaaggtaagtgtcttagcatattttaatgcagttgctttactaaaggttttaaccgcacacgcacacacacacgctttattatgcaatctatgtttgcacttgtgctttcagttagccttctgtaggaagtagaagtcatatgttgtctttgttgtagtgaaattatacagatagagttccatatattgtatttgtttccatagtaaatccttttggaacatatagaatgcagag

SEQ ID NO: 5203 - DNA, 728 bp, Macaca Fascicularis
  misc_feature (1)...(728): n = A,T,C or G
tagcatnnctcttttnctctctgnnnnntttcacgtaacataaggatttgagatttatctattgtatgtatttgtttgtgatttggtccttgtatattgttgagttatattctaatatataagtgtaccacattttgtttatctatttatctgttaatggacatttgtttttagtttgaggctctcacaaataaagtgctacaaaaattcacatacaattctttccgtggaaagaatcttttgtttcccttgggcaaaataatgaggaattgagnnnnnnnnnnnnnnnnnnnnnnnntatttaaatttttacgaaacggcctgttttccaggtggttgtactatttttgcatttccacttgtactaaatgaaaagtccagtttttccacatcctcagtaagggtaagtccttttaattttagttgttctaatgggttagagtgttagacaccactaatgcggtaactcttagtggttttagtttgcatttggctgtatttatacagctaatgtattaagcatttttcaggtgtgtatttgtcatttgtatatcttgttttgtaaagcaatggttcaatcatttttgcccatttttattgtattattatatttatgttttaagagtctttatgtattcaggattcaaaccctatatatgttgtattttctctaattctatggcttactttttgtttctctagtgggtatctttcaaaaagcaaaagag

SEQ ID NO: 5204 - DNA, 541 bp, Macaca Fascicularis
  misc_feature (1)...(541): n = A,T,C or G
acggctgcagcnnnnnnnnnnnnnnnnnnnnnnnnntcctcannnnnnnnnnnnnnnnnnnnnnnnnnnnnnnnntgcaagnnnnnnnnnnntttnnncggctcggagagtagctggtgggtgggacccaagctctcacgttcaccctctttctgggaccccgccgaaggagggtgactcnnnnnnnnnnnnnnntgcttggtcttgcgaagtgtgaagtgcgaagtgtgaagtgtgaagtgcgaagtgtgaagtgcctcctggctcctccnnnnnnnnnnnnnnnnnnnnnnnnnnnnnnnnnnnnnnnnnnnnnnnnnnnnnnnnnnnnnttcccattgactccaannnnnnnnnnnnnnnnnnnnnnnnnnnnnnnnnnnnnnnnnnnnnnnnnnnnnnnnnnnnnnnnnnnnnnnnnnnnnnnnnnnnnnnnnnnnnnnnnnnnnnnnnnnnnnnnnnnnnnnnnnnnnnnnnnnnnnncctgannnnnnnnnnnnnnnnnnnnnnnnnnnnnnnnnnnnnnnnnnntatcaactat

SEQ ID NO: 5205 - DNA, 2012 bp, Macaca Fascicularis
  misc_feature (1)...(2012): n = A,T,C or G
ttttcagagaacgcagggtgaattttctgagtgcaggagtgaaagggagcctggcacttgtatgggactggaagtagtttggtatggcagaaacaagctggcagggaagcctggtgagggccggagaggagaccagaggccagctcatgcggatatcgaaggcaacgttaggaacttcgggccttattctaatggtggaagggagctgatgacgaggcataagcagaggaaggactgccatcagttttgcagtgacaggaagggagccggatgggaggaagttaggacacgcttcagtggcgggttccagaactacgttagtggttatggggatagcaagaggtgagtggatttggaagatattaggacctagagccaattagacttggggagtaaagtgggacaaaagtcaaggagagtttccagggttttgtcctggcagtggggtggaggatgatgtttttctctggggctctgcgtgtgtgtgaggaggattggctcatgctgttcacagagtctcagaagctggacaggacttggtgggggggctctgccagcaacacagggtccccagaacctgtgcaagtctcctgtgggtggcccagccctcctggagcaacatggggggacttgggttttggtgaggtgatgagggcatttctgtgttcttggctactttgctagtctattcggatttcctgggcatccttcccactcaggatgctcctttccccaatgagaccaaccagccccagacactgatggaatctcaaaccaacagtaatgaccgatttccattttctgtgacctactccccattttactactcttagtcaaaccttacggcccacacccacccatagaagtcctttcatgacacatacacctaaaaatatcttttattttcctgttgacaagttcaggtctcgatagactcctatgtcatccctgtcccagggacttactgcctctaaacattctcatgaatttcctaccccacacattatgtgtctccctccccacaatctgtgacaccaacatcgaataccaccactgagggccgggtgcggtgactcacgcctgtagtcctcgccttttgggaggccgaggagggtgaatcacttgaggtcaggagtttgnnnnnnnnnnnnnnnnnnnnnnnnnnnnnnnnnnnnnnnnnnnnnnnnnnnnnnnnnnnnnnnnnnnnnnnnnnnnnnnnnnnnnnnnnnnnnnnnnnnnnnnnnnnnnnnnnnnnnnnnnnnnnnnnnnnnnnnnnnnnnnnnnnnnnnnnnnnnnnnnnnnnnnnnnnnnnnnnnnnnnnnnnnnnnnnnnnnnnnnncaaaaaaaaaaaaaaaaaaaagaccaccattgaggccaacttcaaagaccgctgccctcttcccagcttcagagcccatccctgcattacctgccatcttgttatttcacaaatacatcaaaaattattctgtgaagatgtcagagttagagcctgtggcctacttttaatcttgattataagggttgtttagtgtttaatatgacagcataaggaaaatgctttgtaaatagtaaatcaaatacattttagataatgacaatggcagctggcttagaagatctctgcttatttaaaaaattaggtgtaaattacacctagaaacaaaggttgaaacacaatgagattatatctctaaactctcctagaatctggtatctactgagctgatctttcataattcagattctaccctgagatgaagtactagaagatttacgtaaaatttcatctcctgtgcttctcttgtcattcataaaaaaaatttgccctgcagaccaggcaaacttttgtaccttttgtacctctacttgaaattcttcaatcnnnnnnnnnnnnnnnnnnnnnnnnnnnnnnnnnnnnnnnnnnnnnnnnnnnnnnnnnnnnnnnnnnnnnnnnnnnnnnnnnnnnnnttaaaaaaaaaaaaaaaaaaaaaaaaaaaaaaaaaaaaaaa

SEQ ID NO: 5206 - DNA, 752 bp, Macaca Fascicularis
  misc_feature (1)...(752): n = A,T,C or G
gtagcaggattcatgttctttgacagttcntnnncnttcctgtatatgcaataacaaggttttaaaaaaataaagaagaagtgagactattagacaaagtatttatgtaattannngataactcttgtaaataggtggaatatgaatgcttggaaaattaaactttaatttattgacattgtacatagctctgtgtaaatagaattgcaactgtcaggttttgtgttcttgtttttctttagttaggtttatttccaggtcacagaattgctgttaacactagaaaacacacttcctgcaccaacaccaataccctttcaaaagagttgtctgcaacatttttgttttcttttttaatgtccgaaagtgggggaaagtgctatttcctattttagccaaaattggggaaggagtgctactttccagctccacttcaaattccttaaaatataactgagattgctgtggggagggaggagggcagaggctgtggtttgacttgctaatttttcttttgttatttgtatgtgctagtctctgatttcctcacaacgaagtggaatttactactgttgtcaatatcgatggtgttttgaatggtgcctatagagatatattcacagttcaaaagtcaggtgctgagagatggtttaaagacaaattcatgaaggtatattttgtgttatagttgttgatgagttctttggttttctgtattttttttccnnnntctctttaaaacgtcactgaaa

SEQ ID NO: 5207 - DNA, 3868 bp, Macaca Fascicularis
aataaccataggaatcatgagaggtgttttggtagaggtcaaggattatgaactgaaagttttagatattagaagtgaaattataagtcacatggtatttggcttctcaccctctcattttctcccaaccttccctattcttcttttcttttgacctttctatgtttttcaatattaacacaacttagctactgtcttctctactaagaactatctgaatctttgaaggtaaatgctatgtagaccaattgaggttgattgttgggtaattacccataatggttacaatagagatgagtaataggtcatttgtgggttgagccaggatgtaattcattgtgcagttattcctcagactaattatctgtaactggcccagacacgaccttttccttaaaatagtgtaaacaaacaaaataattagaactgctgcgtaagctattctagatcacatattgaaaaaattttctcagtggtttcgaaaattttgtggtcagtttcatttcatgatttgaggaaaagtagataagtgtgtctcaaactttaatggatatatcatacaaactacccttggatcacactaaaacgaagattctggctaggtgtagtggctgatgcttgtaatcccagtgcttttggaggccaaggcaggaggactgcttgaggccaggagttcaagactggcctgggcaacagaggcagaccctgtctttacaaaataaaaattgaaaaattagctagacctggtggcatgtacctatagctctagctattggggagactgagacagaagaattccttgggcccaggagtcaagactgcagtgagccatgattgggccactgcactctagcctgtgcagcaaaacgagaccatgtctcaaaaaataaaataaaccaacaacaacaacaacaaaaagacaaaaaaatgaagaatctgtgggtctgggtgaggactgagattcagctttctagtaagtttccaggtgatgctgatgctggtctttgactgcaatttaaatagaaaggctttagaccagtgattctcaatactggttgcatgttagaatcaaatggccattgttaccaaaatatttatgcctgatacccacccaacatgaattaaatcagaacctcagagtaggggactcagaatctttgaaaaatctttccagggtgcacacagatgttagaaaagcaaatacagatcacctacccagaaaagtgcatacacatgatatttttgcacgcaattcttgggggtcaaggacctccaggatccaattcataaaaaatttaaaacttatgcttcaagagaaagatctcttaagagaatggcatgggtatctcttccaatacatttcttttataggctaaattttgtcattcccaaaattaaaacgtggaagtcctaatgctcaatatgacagtatttggagatagagcatttgaagaggtaattaaggttaagtgtgttcataaatgtgggggcctaatccaatatgtctggtgtcagggatgcctgtgtgcagaggaagggccacgtgaggacccagggagaaggcagccatctgcaagtcagagagagaggcctcaggagaaaccaatcctactgtcgcctggatcttggaatccaacctctagaactgtgaaaaaataagccacccaatcagtgcttttttgttatggcagtcctagcaaacaaatacaatttccatgggaagttcctctttgttttctcagactggtgtttgtattcacatttttattcataacctattatttacttaggcattctgtgaagaacctggctataaaaattcaaagatgtaagatgttaatgctgggtctaagtcatgcgcacatagtgacatctgaagagggatccaagctttctctcattctaacaccttcctgatgttggtcaaagtagagccaactctagagtattgtttgcctggccaccactgggtgggtgagaatgggaagttaaaaatgtgacccaacaaaaactattttttcaaattcctcatctagtctcaggattcagtcagtgtaatagagtagcttccaaaccctgtgctgatgcacactgaggtattctaggaaactcacaggggagcaccatgagttattttaaatttttgaggaaaacatgtggacatctatcagacattgcaaaaatgactagttcaagaatatgcagtatcaacaacatggtaaattcattttgatgatttcatatctttgcaaggatcagtttttggtggtttacatgataataaaacaagtattgtataaaactcattgtgaaacaggaaatgcatatcatgatatccatgctgattccaaagtatgagaagttgtatagcacccaacaggtgtatgtgtgctgttagtaagtaattgtaactatttaagaataaaataaatttctttcaattcgtgcattttttccaggttattagaaagtaaaaacttttgttttattttgtattgttcgttttggcctagggatcttgtgaaaagatcctgaggcactaaggatgctctgaactgagaaagcgtgggacactctggtgtgattgtttatcaaggcctcctagagcttgatcattctgggggaagccagccaccatgtgagaagtataatgaccttgagactgccatgatctgaggaagcccaatatagccatgtagaaaagctacatgagagagagatacccaaccaacctctagctattccaggcatctatgccgagtacaggagtgagagacttttggctagctctggcttcaggtgccactggactgcagccatatgagaggtctaccacatgacaactgcccagatgaagccatcagctcccagaactgtgaggaggaataatgtactgctgttttaagccagtaagttttgaaattattttgcaagaagaaatcagtaactagaacagaattttggtgcctcaaagtgaggtgctgctgtactataaacttaaagcatgtggcatttgtttttggactaagcaataaatggaagttgaaacatccacaaggattcttctagtgaaatttggaagggcctcagactgctggtgagggcttgaaagacagagatgaaaatgctgctggatgttagagaaaagggagcacttgtgatatgcgggggaaattctgatggcactgttgcctgtgataatgtgaaaagagaaagaatatcaaatgaacttgtaggtctggccagaaagattttcaggcagaaggtaaaaggtgccaactggctttttttctagctgcctgttataaaatataagtagagatgaacttatgaaggaaccatttagttttcaagcagaatttagaggaaatgtaaatgaaccttggtttaatggctttaaaaataaaattatttctcatccctggctcttgcagcaaatgattctcaaacaagaaatgctctcagggtaaagataaaatccaggcagctatgagtaaagaatagcttcagagtaaaagtcttaaagttataagaccttttgtttggatctcataaatagttaaggatgtgcctaataggacttccaaaatattaaatctgtgcctcttagactttctttattagaaaagaatcttaagagcatattttgtgactctttaaactagacaaaaagtaagtatctttaaagcactatttcacggtatttggacagaggtcaatgaataaaaggaaagggggactatctctgtaagaaaaataaagactatagcttttgtctcagtgaatagattataacttgatatataggaagctcacaaaatttttaaaggaattacatcagcgtggactaaaaaaaaaaaaaaaaaaa

SEQ ID NO: 5208 - DNA, 2208 bp, Macaca Fascicularis
agcattcagtcttctgacctgttccacctacacagggcattttatggcttaaagatgatggcctagaagggaggggagatacttactttggattaaattcaaaatgggaaaatgcttaagctgctgtaaagaggaccagagcttccagtgatgttctccagaagatcaagttactacagacgcccagcatcgtggagcctcttctatttcacaaccaaatatatctcttggtcataaaacgtcttattcccctataacacgtaaagtcaattcagccaaagcaagtagaaggttattatctctatcaagtccatctttctctgaaagaagatgttctctatttgttggatttcaaaacagaaatgcttcctcataccgtcaacaaagtagagctaactttgattctgaagaagacacaagcttcactgatttaaaatcttcctcagaccattttggtagctttatgtcctgcaggtgacgtttctcatcccgtaaactaagtatagtttcctattacaagagtgccaatttttttgatcctcaagcaagtggccagaatgtgtttaatctaaaagaaatcgaaatcttttctaaaacctcaaataatactgatgctaaaaaacatataaccatctctgctcctgaatataacactaaaaattttaagaattttgaaacaaacactacttttccagcctttgggaacactattgatacagcctcctatcaacaaagcacatcatctttcttttctcttgcaaatgatgtttcctctcccgatcaacaaaatggaattgccactgatattcaacaaaggggccaattatgtaaagatttaaaagatttccttcatcctggtactgaaagttacagcacagatcgttctgcaatcacgattcaacagcatccctctcaaagtggaactttcccattcctccataaagctggattttcttcatcttataaaaattctggttgctttatcccatttcaaaacgaagtaacttcaggcccatctgaagatgaagactttgctgtcttgtttcaagatgaagacagatcttcgcctattgaaattcctaaaataaggtatattacagctaatactgacacagaagaacagagtttcccagtccctaaggcatttaacacacatgtagaggaattaaatttagatgtccttcttcagaaggtagatcatttacgtatgagcgagtctggcaagtcggagagttttgaactactttgtgaccacaaagaaaagtttagagatgaaatagagtttatgtggcgatttgctcgtgcttatggagacatgtatgaactatctacaaacacacaagaaaagaaacattatgctaatattggaagaactttaagtgaaagggctattaatagagcacccatgaatggacattgtcatctgtggtatgcagttttgtgtggttatgtatctgagtttgagggtttacaaaacaaaatcaactatggacacctcttcaaggaacatctagatatagcaatcaaacttttaccagaggaaccctttctatattacctcaaaggaagatactgttatactgtctcaaaactgagctggattgagaaaaaaatggctgctactctgtttggaaagataccatcttcaactgtgcaagaagctttacacaatttccttaaggctgaagaactatgccctggttattctaatcccaattacatgtacttagcaaagtgttatgctgatcttgaggaaaaccagaatgctttgaagttctgtaatttggcattattgcttcctactgttaccaaagaggataaagaggcacagaaagagatgcaaaaaataatgacttccttgaagaggtaaataaccgaatttactcttcaacaaatcagacgtgatctaccaaaatttaaacgaatcaaagttttattatccttttcttcatttttgatgtaagggtattgtgctcagatttgaaggtaaagccatgtttctgcagaatgcattccactagtagcactacaaaattatgttatttggagaatctatatactataatgtcaatacataatctataaacatgtatgctttgtatttttcttatcaataaactgcagccttcagaatatttatttaaataaaaaaaaaaaataaaatgaattttaatgagtaaaaaaaaaaaaaaaaaaaaaaaaaaaaaa

SEQ ID NO: 5209 - DNA, 767 bp, Macaca Fascicularis
  misc_feature (1)...(767): n = A,T,C or G
gtgatggtatgttttggactggaaaaaaatcaaaatgaggaagatactgnnnncagaaagcaagaatgttcggacagtgtaaaaagaaagtaaccaatttaaagagattcccagtaggtaagtagagaggatttactcaagaacgaaaaccagcatgtgttaattgaaatacatgttactacaaagccaagaaagagtccttgagtaaattcagataaaacaagtaagatgggccgggcgcggtagctcacgcctgtaatcccagcactttgagaggctgaggggggcggatcacgaggtcagnnnnnnnnnnnnnnnnnnnnnnnnnnnnnnnnnnnnnnnnnnnnnnnnnnnnnnnnnnnnnnnnnnnnnnnnnnnnnnnnnnnnnnnnnnnnnnnnnnnnnnnnnnnnnnnnnnnnnnnnnnnnnnnnnnnnnnnnnnnnnnnnnnnnnnnnnnnnnnnnnnnnnnnnnnnnnnnnnnnnnnnnnnnnnnnnnnnnnnnnnnnncaaaaaaaaaaaaaaagagtaagatgagtttaaaggaagcaggacataatttcaataatgtttacaagaaatgctgtgtgatgcgtgtgatgattcatatacgcctctgtgtaggaattgtgactataggcacataggttgacaggcacagtggttataaacnnnnnnnnnnnnnnnnnnnnnnaaccaggagaccttgaaagccaacttgtgtgatagaactctgtgttatgcaaaccagatgcacgaaaacctcaaat

SEQ ID NO: 5210 - DNA, 742 bp, Macaca Fascicularis
  misc_feature (1)...(742): n = A,T,C or G
aattgaaagtaccaggtaaatgttttatcagcctcctttgcagctaaggaagaaacatctgccttcaactttaaagttagtgatacaaagaagcagggaaccatnnnnnnnnnnnnnnnnnnnnnnnctaacaacactactgcattcatctccacagaggagcagcaaaagtggtttaatgataacctctaattctatttttttttgggggggggacnnnnnnnnnnnnnnnnnnnnnnnnnnnnnnnnnnnnnnnnnnnnnnnnnnnnnnnnnnnnnnnnnnnnnnnnnnnnnnnnnnnnnnnnnnnnnnnnnnnnnnnnnnnnnnnnnnnnnnnnnnnnnnnnnnnnnnnnnnnnnnnnnnnnnnnnnnnnnnnnnnnnnnnnnnnnnnnnnnnnnnnnnnnnnnnnnnnnnnnnnnnnnnnnnnnnnnnnnnnnnnnnnnnnnnnnnnnnnnnnnnnnnnnnnnnnnnnnnnnnnnnncatgcctggcctgtaacctctaattcttgtttgttgnnnnnnnnnnngaacctgagaattacttttaataaaatcatttttttgttgttattaaaactaacctgaattgcctaaaaccaagaactctgcttgataaaataagcatagttttaggaacagccatgcagatataaattttatcaacattttatacataattttggacttatatttaaatgtaatatttgatgcttataaaagggtaaatggnaatgcaaataa

SEQ ID NO: 5211 - DNA, 683 bp, Macaca Fascicularis
  misc_feature (1)...(683): n = A,T,C or G
tggaaggaggtggtgtgcagtcaaaactgggtctttgatctaaccaagaaaaatacacacttgagtagccttcagttttcacagacacacagagagaacccggaaaggcaggtttgacgattttacttctcggagttactggccttattagcctctctaacccttcagcccactctcagtcactcagatcttgcaacatcttgagtgcgtccnnnnnnnnnnnnnnnnnnnnnnnnnnnnnnnnnnnnngaatggatagtcaggacaggcctctggcaggcagctgggcgtgcttttaccctggacgctccccacacatgtgggcacagggctacccactttgtgtatccctcttagtctcataggtaggnnnnnnnnnnnnnnnnnnnnntgcttgatggtaattgcagatacctcatttgtttcccactctcctctctggnnnnnnnnnnnnnnnnnnnnagaacttgtggcgtccaccgcaggatggagtctccttctctggcccccttgtagtctgatcctgtgaacccctccccgtacttcagccactgtcctttccagctgcacttgtacagcagcctcttcactggtctctgccctttctccgttctgcacaccgcagccgggacgaacctttgttgttgttaccagcttnnnttaagataaaatttgcatacagt

SEQ ID NO: 5212 - DNA, 764 bp, Macaca Fascicularis
  misc_feature (1)...(764): n = A,T,C or G
tccctcgtgcttaagattgatgatttcgtgaaataaagaacatcatttcatttaagagatcatttcattaagatctctaatctgttttgagtctttgcaaaatagccagttannnnnnnnnnnnnnnnnngtttagactgannnnnnnnnnnnnnnnnnnnnnnnnnnnnnnnnnnnnnnnntatttgtgatnnnnnnnnnnnnnnnnnnnnnnnnnnnnnnnnnnnnnnnnnnnnnnnnnnnngaatggtgtagttacaaatcgacataaactcctgtcccccaaaaatgccatgagctgcttagcccaggagacctgggagctatggcaggacggtcaggccagccgatgagggactgcagagagctactggaaggttaaggacccagagagaaatcgagctgtgccccgcgacagccaggcctatcaggagccgtcagacacggcagcggcgtggacaccggccnnnnnnnnnnnnnnnnncctcctnnnnnnnnnnnnnnnnnnnnnnnntatttgcttnnnnnnnnnnnnnnnnnnnnnnnnnnnnnnnnnnnnnnnnnnnnnnnnnnnnnnnnnnnnnnnnnnnnnnnnnnnnnnnnnnnnnnnnnnnnnnnnnnnnnnnnnnnnnnnnnntctggtcacctgtgctgctctgtccctaactagtgacccatggaagcttccaggcagttttctctttcatcacactaatgtaacactaannnnnnntantatcgctttttcnccggggctactctga

SEQ ID NO: 5213 - DNA, 745 bp, Macaca Fascicularis
  misc_feature (1)...(745): n = A,T,C or G
tgggcaaggtggtccatgcctggagtctcagctttttgggaggctgagattggaagatagttgatcctgggacgtagaggttgcagtgagctgaaattgcctcactgcactccaggctggnnnnnnnnnnnnnnnnnnnnnnnnnnnnnnnaaataaaataaaattttctcttttattgctcctccttttagtctaggtagtaaaatcctttgcccacttattatgcatttttgtttcatcaggtttctattattattttactcattgtttatttattttagagacatattcatactccgttgcccagnnnnnnnnnnnnnnnnnnnnnnnnnnnnnnnnnnaactcctgggttcaacttccnnnnnnnnnnnnnnnnnnnnnnnnnnnnacagacgtgcaccaccgcgcccagcctcaatgtgtcttctttaccacttaatgaagttctttgtttttttccaatcacaaatattctttctattcaatactttgagcttttctatttctatttaaatgcaactggaaggaaacattttctatcagacaaatattgttttgcaatgaaacctatttaacaaaatcaaattgatatattttaacctacaactctgttttgaatcctaattttagagtggattggaaatgttccactggactcctattcttcctaatctctactttttgatacattnnnnnnnnnnnnnnnnnnnntttttctcatttccctttgagttttcatggta

SEQ ID NO: 5214 - DNA, 1368 bp, Macaca Fascicularis
agaattctgctgggagccacagaatgtttactgaagctttatgggtcactggaggaactccaaccaccaatccctgtctctgacaacatccatgccctcgtgaaccaaattgccgtgctgcagaagtttatcaagatctttcctaaataaagccagtgccttcctgatgaagaattctgaggtcaactgttgagatgataccgttttttgtttgtttccccgctggactcccgctgaaggcagagacctcaacttggaatttctgtatccctggttcctggtaaggggatttgtaggcgctcaagaagtccagctgtcgcaagagtgaatgcccgtgatcagaggggagtgaaacgggcctcaggcagcacacccgctgtggctcgcacagcaggggggtcgcaccctgctgcctgttgctaggagatgatggcttcggaaggatgtgcagtgttgcttagcaacacctccccactgttccatcactcagaatggacagcaccaaacaattcttacagcaagagtcttttgacctatttcagctaaaagcaggaaatatctttctgtctcagctcagattacataattttttaaaggatcacaagggaaaaaaacatggaggatccccgatattcacacccaagacttactttgttgttagcaggttaactgtgtatcagagggacactgggagaattgccaagagttcacagcctgccttctgctccctgcagggacccttcacttagctgtagccggctatccactgggcctggggtgctccctgcatccctcctgcatgctggcttggccctaccggggatcacaaagcccagctggtcaccaaggacagaggtgctctctcgatgtggcctcaatcagaccatccttgcttatatagcaattcccaggggaccttgttacaaatgggtcctaactccattcctgacctactcaagcagaatctaagggaggaaaggctggagccttggaatgtaaatgtgtacttaacatggtttacaaagctcacagttcaagtttgagaatcactgtgaataagttcccagccagctggagaaatcagcggctgacactgtttgaacctgggacaagaggcaaatcaccagtgtggaccaccctgcccctcttgtgagcagatgaaatcagtcaaaagtgttgtatgcttcgtgaaagaccgtgggcagtttcgtttaaagctgggtaacctagagaggaaaataaaataaaataaaataaaataaaataaaataaaaaaaaaaaaaaaaaaaaaaaaaaaaaaaaaaaaaaaaaaaaaaaaaaaaaaaaaaaaaaaaaaaaaaaaaaaaaaaaaaaaaaaaaaaaaaaaaa

SEQ ID NO: 5215 - DNA, 693 bp, Macaca Fascicularis
  misc_feature (1)...(693): n = A,T,C or G
tctccctatttatgtnnnnnnnnnnnnnnttagggagcctataattattttctaaccaaggaaaaacttaagtctctttaagaagcaattatttttcataacatcagattgaataacccaccttgctgttcagcccacatcctactggaaacaaaaggtaagaaacccattttctggttcctgattgtttgggtctgaattttgtttttaaaacgaagctaannnnnnnnnnnnnnaaaatgctgtttggaatatgtgaatagattccccataaaatggtttttcctgttttatgctttagaaannnnnnnnnnnnnnngtctgcgcatcatagtacttgcatttaatatgatttattgtagaatctcaacttttcttggtgttgcctttgaaacattgtcttggtcattagggctggtgttttcacatttctgtggtcaaggtgaatttcttatgtgtgcctttttgcttactttgtatatgaattttgtaatttaaattgcaagtaagttatatatatgtatttaccataaatagtattaaaagatgagaaactgttagactgaagttctgttgtaacataaccactcttatttccatcacagtatgaagagtgcaaacgcagaaaacagattacagtctcttatccattttttgaaatccaaaaactatatgaaaacgaaagatttctgt

SEQ ID NO: 5216 - DNA, 655 bp, Macaca Fascicularis
cctcccagtctttactcaatgggatgaggtgaggtcgtgaggacaccaaaaatctaaaaataaacaaaaacccaaataagccttagcttttttaaagactgaaaagcctcaaagtgtccctttatttataaaataacttttgtcatatttcttatacatgtttcttgtaagaaattcagaaactacagacaaaaagagagtggaaattatccactgtcaggcctctgagcccaagctaagccatcatatcccctgtgccctgcactatacatccagatggcttgaagcaactgaagattcacaaaagaagtgaaaatagccagttcctgccttaactgatgacattccaccattgtgatttgttcccgctccaccctaactgatcagttgactttgtgacaatacaccctccccacccttgcaataatgaaccttgtgatattcccccacccttgcgaatgtactttgtactatacaccctcccgacacttaagaaggtactttgtaatattctctccgcccttgagaatgtactttgtaagatccaccccctgcccacaaaaaactgctcctaattccaccgcctatcccaaacctgtaagaactaatgataatcccaccaccctttgctgactctcttttggactcagcccgc

SEQ ID NO: 5217 - DNA, 710 bp, Macaca Fascicularis
  misc_feature (1)...(710): n = A,T,C or G
gaattctggctgggaaatgnnnnnnnnnnnnnnnnnnnnnnnnngggtacctgggagctgcgggtagagctggaagannnnnnnnnnnnnnntacttttgcccactatgcgaccttccgcctcctcggtgaggtagaccacnnnnnnnnnnnnnnnnnnnnnttcnnnnnnnnnnnnnnnnnnnagtgagcctaagggcagcagaggaaggaggccggatcctttcccaatnnnnnnnnnnnnnnnnnnnnnnnnnnnnnnnnnnntgtctcctctgtgggccttagtttctgcatcnnnnnnnnnnnnnnnnnnaaacaggatggtgnnnnnnnnnnnnnnnnnnnnnnnnnnnnnnnnnagacctgagtttgaatccatctctgccacgtagcacctatgtgaccttgggcaagtcctacccctccactgagcctcagtttcctcctctataaaatgggcagggaggctgggcgtgnnnnnnnnnnnnnnnnnnnnnnnnnnnnnnnnnnnnnnnnnnnnnnnnnnnnnnnnnnnnnnnnnnnnnnnnnnnnnnnnnnnnnnnnnnnnnnnnnnnnnnnnnnnnnnnnnnnacacacacaaaaaattagccgggtgtggtggcaggtgcttannnnnnnnnnnnnnnnnnnnnnnnnnnnnnnnnnnnnnnttaaacctgggaggcggaggttgcagcgagcccagaa

SEQ ID NO: 5218 - DNA, 1173 bp, Macaca Fascicularis
  misc_feature (1)...(1173): n = A,T,C or G
ttaaacagtatnnnnnnnnnnnnnnnnnnnnnnnnaaaaagtatgtatgaaagtatgtgtgtatttgtctgtgaaaggatgccaatgttttacctgatatcttagtgacacttcagttatctatctatgcattctttagatctgtgattcggtaaacaggcagccatgttcacgatgccttgtatgtcttaccatatttttaattaacctgttaaatacagcttaaaatatttttattttatttattctatttttactgaaatatactgcattattgtgttaatgtattatctttcctggatattatctcctagtatatccagatctaagtaatctcagtgaactatacattgcctaaaaagtggttttggtaatgatttatagtcacatttctattgggatatgtagaagaaaaggcaaaatgcttaaagttccttttattttttaaaagcagctagatagacacagacttgccacctcatacatctgctccttcgcagtgtcaaggggaatgactagccaacacgcctatggctaaaaactttcctttgcagactaaagcactgcttggtgcttcgtttttctacccttcacaacatgtgtgatttcacctaagagatatatacatgtccacatgccctttgtttccacctggatataagatcactcatagctaattaggaccattgttttttgttcgtctgtcttgttgcatgaagggacactagacccatttccattaaaataagttcttggtgataaactgtggcactgctacttctttttaaatccactttatgattnnnnnnnnnnnnnnnnnnnnnnnnnnnnnnnnnnnnnnnnnnnnnnnnnnnnnnnnnnnnnnnnnnnnnnnnncatgtcccaggcattgcaacacaaactcaagatttcgccacaacatgacaagcactttcctaactgatattagcacaatttaactaaaaagccccttcgctctctagttggccaggcttaacctaatacacatctaacgtgtgccgcatggccagtagaaagtttaatttcagcttcagggcaaagataccnnnnnnnnnnnnnnnnnnnnnnnnnnnnnnnnnnnnnnctccggagcagcttgcttcccccgaaaacgctttgttttcctttacgccccttttcctgttgaccact

SEQ ID NO: 5219 - DNA, 914 bp, Macaca Fascicularis
  misc_feature (1)...(914): n = A,T,C or G
gccaagagnnntcnnnntnnnnncnagcttttacaaagnnacaagaacaagtaatcagtgcatattgtgttgaaactnnnactgcaatactgaaaactgcaaatggagagagtagctcctnnnnnnnnnnnnnnnnnnnnnnnnnnnttcaaattaccaagaatataaggaattagattagaagccaaatttaatttagaattatgagacattatttgtaacccacagtattatttttcccatgatacttaacaattcacccagtatgaccttaaaaggaagaagaaaacaggctttgcagccttcttgctttaagagtgaaaaagaaacaannnnnnnnnnnnnnnnnnnnnnnnnnnnnnnnnnnnctttaagaaagttttgacccatcagattgagagacagaaagacagacagaaggagaaggataaatcaaatgtggtaaaacctttgggggatctgggtggaggggatctgggaattctttgtactattgcaacttttnnnnnnnnnnnnaattgtgttgtcaaaagaaaaacagtttataaatactttatgatccatttgctttataattaggaaaacagagtatgatgacagagagaacctnnnnnnnnnnnnnnncttaacagaaggaaagtagtttccatgtaaactctgggaaaagtggagccaaatgattacactgtgtgtatcctttagcactgtttggggtggggacatgggggggtcagggtgcagagagggactattctggtctccttggaaggtatgtgcctatagtaaaaagcatgannnnnnnnnnnnnnnnnnnnnnnccgtaacaaccaagcaaacttataatagcattttaacttatatcaccttttttataggnnnnnnnntatannnnnnnnnnnnnnnnnnnnnnnnnc

SEQ ID NO: 5220 - DNA, 779 bp, Macaca Fascicularis
  misc_feature (1)...(779): n = A,T,C or G
agtagtacacatgtatagtatagtatcaaattggtagtttcaatatgtgtgatgtccttgggggttattgtcttgctggtccatagaaggggtacactagnnnaagaatcaagacatctgagttctagttctagctctgccactgaagagccaccttacctgnnnnnnnnnnnnnnnnnnnnnnnnnnngtttaccacccatgaaaggactggttggtttgatgtttccattaagctcaatgagtaactcgaatggttactcttgaatctggattgaaaaacactatgcatctgatgagataattcataactgttgcccttttttaaatgatacaaccctaaaagtgactgaattgcccaaatgcttgaacannnnnnnnnnnnnnnnnnttattttacagtctgtgcacttaaaaattcctacagtgattgttactttactggggataaaagatgaggtgaaacttcctcccaaggaattaaaatatctgtagaagccatggctcgcttttacaatgtggaaatcatttgatttgctgtaattcacgcagatccctccttttgtcagggggaaatgatttgcatcatgttcttttttcacnnnnnnnnnnnnnnnnnnttgtatgtaaatgtacatttttgttactttgactgtgcccattagaatttatcttccataaagtatttcttccattgagtctaatgatgtatactttgcctaggtctttccaaaattaaatttatgtaaatgtctattttatataaaatattataaaata

SEQ ID NO: 5221 - DNA, 735 bp, Macaca Fascicularis
  misc_feature (1)...(735): n = A,T,C or G
gagaaggatatgctgagggaaaatgcccannnnnnnnnnnnnnnnnnnnnnnnnnnnnnnnnnnnnnnnnnnncttcccccagaattatcattttagcaacttctctcagggaggacctatcagtttgagagcagttgcctcttttctcaaaataccatgctaactgctaaagccctccgagagtctttcctagatgcaatgcagaaggcccttgctggtgatggcctcatttcccatgtgtgtacaaggtggtttgattgaagagtgaagtgcatgcctgcagagcagagagaaatttgtagcaatgttgctaatatgtgttatcagatnnnnnngaaaactatttctattcataatacatcatgggaatcatactattctgctaaaaatcagttattagcataacagcctgagcacttatgtctctcgtttcatcctgcaggaggatgtagcgcctcagtttatcttaatgttcataagattatggtgtctaatttaataannnnnnnnnnnnnnnnnnnnnnnnnnnnnnnnnnnnnnnnnnnnnnnnnnnnnnnnnnnnnnnnnnnnnnnnnnnnncaagttctcttccaacaaagaaactgtactgtagaaattaatttcctccatgaattttatatattgtgtacaaatataaggtatgtatctgaatacaaagaaaagcctatcatcatatagatatcagtannnnnnnnnnnnnnnnnnnnntaatt

SEQ ID NO: 5222 - DNA, 850 bp, Macaca Fascicularis
  misc_feature (1)...(850): n = A,T,C or G
gcaggtggatgaaactcagtttangnngatnnncnnnnnnnnnnnnnnnnnnnnnnnnnnnnnnnnnnnnnnnnnnnnnngtgggggcanngctgctgaccgtgtnnntcatccagcnnnnncntgtttgganntgnnnnnnnnnnnnnnnnnnncgccaagnnnnnnnnnnnnnngccagtgatgcagantnngaagttcaagaccatagaggaagttgnnnnnnnnnccaacaatttnacgtacgggctggccgcannnnnnnnnnnnnnnnnnnnnnnnaaggccaattacctgtcccaggccctccaggcgggcaccgtgtgggtcaactgctatgatgtgtttggagcccagtcacnnnnnnnnnnnnnnnnnnnntcgggcagtggccgggagctgggcgannnnnnnnngcaggcatacactgaagtgaaaactatcacagtcaaagtgcctcagaagaactcataagaaccatgtgnnnnnnnnnnnnnnnnnnnngatgnaaagttcagcaagatcagcgacaaaaccaagaaaaatgannnnnnnnnnnnnnntatctgaaaagagaaattcttcctacaaaatctcttgnnnnnnnnnnnnnnnnnnnnnnnnnnnnnnnnacatggtgggttggctgagggtaagagtctatgagaaaccttttaaatgacaacaatactgctagctttcagggtgcatttttaaaaaatagattcaaatgtcttatcctctctnnnnnnnnnctcctgtaacttgagtttataggggaaaaaaaagccattgtttacaattatatcagcatcaaggcaactgcnacaccctgctttgtatnnnnnnc

SEQ ID NO: 5223 - DNA, 740 bp, Macaca Fascicularis
gatgtgagccaccacaccgcgcccagaggggtgactctgaatagaatgggaggcaggtttgtcttagcagttcccagcttggcatttccctttagcgtagtgatatcaggagcgtaaggtgtatttttttgacaattctattttggttttaaattccaggggttccttttcaaatgttttgttttagaattatgttccaaagccaaatatgcatagtttcaaattcaaatatacaaatcagattattttcagagcagtctgcttcttacccctgtcagaatactgaatgcaaaaaggcaatggagaaatatttttcttaagtcgtgaagaaaaagaactttaaactcagaattttctatccagccaaactgccatttaaatgggagactataataatattcatacacatgaaagcctctgaaaatttatcccacaatgacttacaatcattaaaatgtttatgctttatttcctgtgatcataaggttgtaggggttagaaatattttcttttgaatcaagttattaaaatgagtatttatacaaaaataatttttaagcataaatacttaaatttttgataaaccattaaacatctaatataaaattccacgggaactttatctctatgtaacataaatggagattttttttaaaaattaatttatatctgcaagtgctgtaagagttaacttcatcaggcctgaattagcgctgatacattttattaaaataataaag

SEQ ID NO: 5224 - DNA, 862 bp, Macaca Fascicularis
  misc_feature (1)...(862): n = A,T,C or G
agnnnggnataanctcacagccacttgcccccagagtgagctnnnnnnnnnnnnnnngaagagcattctggccgaatacaagattcatannnnctgatgtgccnnnnnnnnnnnnnnnnnnnnnnnnnnnnnnnnnnnnnnnnnnnnnggaaacagagtttatatcccctgtatctatgtgttaaataagattgaccaaatnnnnnnnnnnnnnnnnnnnnnnntctataaggtgcctcactgtgtacccatctctgcccatcaccgctggaattttgatgacctattggannnnnnnnnnnnnnnnnnnnaactagtgagaatttacaccaaacccaaaggccaatnnnnnnnnnnnnnnnnnnnnnnnnnnnnnnnnnnnnnnnnnnccacagnnnnnnnnnnnnnnntgaagattcacaaaaatcttatnnnnnnnnnnnnnnnnnnnnnnntctggggtctgtctgtgaaacacaatcctcannnnnnnnnnnnnnnnnnnnnnnnnnnnnnnnnggatgtcattcaaattgtgaagaagtgaaacttttcccctttcccatctgccgggcgaaccacaacagccttcccnnnnnnnnnnnnnnnnnnnnnnnnnnnnnnnnnnnnnnnnnnnnnnnnnnnnnnnnnnnnnnngagggagatggaggcacccaaactggaacttcatttgtcttaccttgnnnnnnnnnnnnnnnnnnnnnnncataaaagacctggtaggctggtcagctacatacagctcatgtgtcattgtcagaatttgttttgggatgggctgaatgaggaagggtatnnnnnnngaagtagctacagaagggatcctggaaacttgatctga

SEQ ID NO: 5225 - DNA, 734 bp, Macaca Fascicularis
  misc_feature (1)...(734): n = A,T,C or G
tggccttgaactcctgggctcaagtgatcttcccaccttgacctcccaaagtgctaggattagaggcatgagccactgggcccagcccatcctaatcataatattaattaagctagtctctttacacacactgccactcatttattcattaggnnnnnnnnnnnnnnnnnnnnntatcatcattctacagatgacaaaatggaggctaaaagagattgaataagctgctcatatagaggtcatatagcttttgagtggtgcagccttgacccaaatttggatctgcctgacttgaaggctcacctctttactactaagttatatttccttaaaatctaatataaaaattccaagtccatgggtagagaagaggactattcaatagtctttattcttctgtcatgtgtttcactctaggactctcacttttatcccacttttgcacccttcatttaaaacagttcttaatgaaacaaagggtttgcagagaagtactcagaatgggaaactttggtgtccttagggttgttggcagagtcaacagtgatcctgtgaggtcagtcccagccctggaaacaaaggtggctccctgggctcccagctctgatggtccgatgtctttcctcaggnnnnnnnnnnnnnnnnnnnnnnnnnnnnnnggtactctcgctcagtgcttctcatcacccagaacctcagcctggtggannnnnntgaccacatcctctttctgg

SEQ ID NO: 5226 - DNA, 747 bp, Macaca Fascicularis
  misc_feature (1)...(747): n = A,T,C or G
ctattagtatataaatatcaagttatttctgacttttaaacaaaacccccaaattcctaacttattgaactaaaannnnnnnnnnnnnnnnnnnnnntttttgtttttcttttactatgggaaaactacttcccattctgtcaggaagttaacctatttaacaattagagctagcatttcatgtagtctgaaattctaaatggttctctgatttgagggaggttaaacatcaaataggtttcctctattggccataacatgtataaaatgtgtgttaaggaggaattacaaagtactttgatttgaatgctagtagaaactggccaggaaaaaggtacatttttctaaaaattaatggatcacttgggaattactgacttgactagaaatatcaaaggatatttgcatgtgaatnnnnnnnnnnnnnnnnnnnnnnnnnnnnnnnnnnnnnnnnnnnnnnnnnnnnnnnnnnnnnnnnnnnnnnnnnnnnnnnnnnnncatgcgaaaagttattttatctgttaaaagtcattatacaattttgaatgttatgtagtttctttttaacagtttaggtaataaggtctgttttcattctggtgcttttattaattttgatagtatgatgttacttactactgaaatgtaagctagagtgtacactagaatgtaagctccatgagagcaggtaccttgtctgtcttctctgctgtatctattcccaacgcttgatgacggtgcctggca

SEQ ID NO: 5227 - DNA, 718 bp, Macaca Fascicularis
  misc_feature (1)...(718): n = A,T,C or G
agagggggatgtgattacaaagcacagggttcttccctacctcccaccacccttttgagatgaactgaaatcatgtaatagtgaactgacaaaacagctttctatgtttttacatgttgttgactcttgtcctggaaaagggaatagcagacggtctaattaaaattcagccctttagctctttggnnnnnnnnnnnnnnnnnnnttgatactgagtttgtaaagtactatattcagaatcggatgtagtatacagacttattccaaaggtcactttaagtataaccaaagtcnnnnnnnnnnnnnnnnaatatactctctaaggctgaccnnnnnnnnnnnnnnnnnnnnatcttttagagtctaattcctcaaaagggtggccccagaagctggcattggtatcacccaggaacttggtagatacacagacaattggcccgccctggcccagacctacccaattagagccctctttttgacaggtcctcccagtgatttctgtcccataaatatttgagaagcagataaaagcagtggccatgactgaatcatagtttcattgtttactgtgggaacctaggcatttattatgtttacctagatctttttggtttataaagtgctttcatgtgtattatgtaattgggtccttagtacaatcttgtgaggtgggcaggtattaccgtggatgtcatctaaacatttgtgccttgct

SEQ ID NO: 5228 - DNA, 209 bp, Macaca Fascicularis
tgagtacacactctcacgcacattggtaaatcttttggggtcttctctgcgctagacacgataattccccactctcacatgagttaaatctctaatctgtcgcacttctccacgggtaattaaaatttgggacccgcgtctctcacgcgtctcatatgcgctgtagagaattctcaaaggagcacataagggtaaatgtaaaacacacg

SEQ ID NO: 5229 - DNA, 769 bp, Macaca Fascicularis
  misc_feature (1)...(769): n = A,T,C or G
tgatgaaaaatgaacaagtgtagtgtgnnnnnnnnnnnnnnnnntgtaggaggcagaagttaatattccacttaaaaatgttatctgagcataaaaaatcatcagcctttaactgagaccctgctaagactctccttatcaagactttttggttttaaagtttttacgcatannnaagttaaaatagctatttgcnnnttagatttttcccagcactttgtatttattagctttcattaacttgcctccagtatacattccacttcatgcttttcttaggtcgtttctacatcccttattccttgttttcctgcagtgtaatggccctgaatgtcctctgagcccttagctccattttggacccaaactggactatacttagataagttaagctcttcttagtgtactggtctataattagaaaaactgttttgaaattagatgttcccattatttatttaaacagctttttgctgagaaagcttagtggattaatgaggcagagggtgttttgaaatccaacaaatagttcccacaggctgggcgtggtggctcacgcctgtaatcctagcactttgggaggctgaggcgggtggatcatgaggtcaataaattgnnnnnntcctagccaacatggggaaactctgtctctactaaaaatacaaaaattagctgggtgtggtggtgcacacctgtagtcccaggtggctgaggtaggagaatcgcttgaacccgggagacagaggttgcagtgagccaagattgtgcc

SEQ ID NO: 5230 - DNA, 610 bp, Macaca Fascicularis
gttttgctgggtgtggaaagttattaagagagaatccttcatcctgttctgcaggcaatcgaacacatgctctcccttctatccattcctcatccagcacatgggcattcccagcctcctacatgtaacacttcacacttcctttgggcgtccacttagagctatgtgacggccacatttggggcaaagcccttctttcttttaaatataagaaccgtttccaagtttggtgcaggcttgaggaataattacattaaaaagggcttccaagatggtgaatcagcatgctgatttctcttggcaggaagctctcagggaaatgtctgtgaatcatgtaaagatgctctctggtggatagagaaaccgcagtccaaaaacagatgggtgtatatttgctttgtaagcaaagggcatgtatcatactcgcatataaaacagtgtccacatctttgccaaaggcactgaattttaccttttttttattacctcgtggccagcacttcctcagtaggcatttcaggtgtgtcacaaacacatgttcatttttaatcttgaaaaagtcaatcgtctgtagtctgtacgataaaatgatgcctgcaactttgtggtg

SEQ ID NO: 5231 - DNA, 1760 bp, Macaca Fascicularis
attttttgcagacaggtacagtccttgggctacacatgtattgctgacagcaaagatagtcgaacctttatcagggctctttctgtgaggatttaagaagtttaaccagaagaccaagtgctgtcaatgtgtctgcttcatagaggaagactactttattacaactccatattttaacagcattcaggagaccgaatacagttttatgcatgataattgtttcttcctctaagtgaaagtgaggtcctcaggatcgtctggatgttagtatgtggacttgccttccactgtaaggggggaaaagttgtgaaaattgacaccagtgtgaatttataccatggcaaccatgcaagagagagaggcaagaattagcaccatggacagagacgagcagccctcaaattaagatttgcaaagcttgacacagtgttttctgtccctttctgtgagacacggaaactgcgcgtcttgggaatgttttctttctacgggactttgtggaaaagactgtcctactccacagaaactcatttattttgacttaggctggcttttcttaggacccagccatcgtgacaaaccgccaggagagttagagccccgaactggctgcgcaccttccactgtcctcttttacatacactcccttgccggcgtgagcccgcctttcttcagagtgttcatgcaaaataaatgcaaatccaggtagtcttcgaaaagtctggtaaacctgctccagagtttttaatcctcgaatttcccagctggaattgcagcaaaaatgcctatctgctcacccttgctcccttcccccggttcttctcactgctccttccaacccctagcaaaggggtaaagccttttactcgaagagcaagtgccggcaccgggccacggtgacaaaggcggagtttgtatcagaagaagactgaggcccggggagacacagcggctagagaaacagctgtcttatcagcccgctgcagagatggagatggctcgagaggtcctcaacagataatcacttgaatagtgatagggccacgggagagattccaggatgatttttacaatagcctaagaagttgtcatctacaggaaagaatctgcttacctacttacaggaataacagttatttttcaactccctcctccctttacccaggtacattgcatcccctggatatggtacaaaggcaaaacctgcaatgtaccattagataacctggctgccattcaccgccacttcgtacatctcacttttctcctttatgcatgaatactttttcacttaaagattttgatcaggaatgacccagctgatgtgccgagttcaggaagtcagagctacaaagttcttttgaaaccagacaataacctagttcccttcgccttccttccctgcacctctcccctgctgactgccaactctcacccactttacctatgaccatcccaagagtatcaaacatataaatatagaacttgtccactgaccatagtagagagaaaaacaaaattagcactactggtttctacgagtttctttttgttgttgtttaaccaccccctcctcccagcccccaaccctttgtgtgtgaggattccccttcaaaccacccacagaccgagcagacgagaagaaatggtaattttcggtttaaaagttcacttaccacggcaaaaaaaaaaaaaaaaaaaaaaaaaaaaaaaaaaaaaaaaaaaaaaaaaaaaaaaaaaaaaaaaaaaaaaaaaaaaaa

SEQ ID NO: 5232 - DNA, 750 bp, Macaca Fascicularis
  misc_feature (1)...(750): n = A,T,C or G
aatttttttggtctcattgatcnnttgagcatacnnnctaggtgcgtcttccnnggggccgtgctgttcgggacttaatacagctggaaacggtggcccacccccaccccagtggagctcgccttccagtaggtccaaactggtttgattgagttccatggaaaacaataaaatggggtaaggggaagagtcgggggtagctgaggggtcagcgtgacgtggaagcagaaatcgaggctttttggggcggggatgtgggtacaagtgcccagggctgggaagcctttggggagctttgtacagagtgtgtggttctttatgtttcggtgtttcctcatagttggttaactaatacatttgttannnnnnnnnnncatcttttcatttttaaacatttttaaaaacatatcttttagagatggggtcttgctttgttgcctaggctggtctccagctccnnnnnnnnnnnnnnnnnnccaccttggcctcccaannnnnnnnnnnnnnnnatgtgagccactgtgcccagccaattaagctacattttaaaacaaccaagacaggcgccaaacccnnnnnnnnnnnnnnnnngctcgtcctcacccccttccccagtctaccccagggaggaacagggactgnnnnnnnnnnnnngggttctctagctttggcctcaagctctggtgtgacatggnnnnnnnnnnnnnnnnnnnagggaggtatgtggacggaataaaggctcccagaggc

SEQ ID NO: 5233 - DNA, 1524 bp, Macaca Fascicularis
ttgggctaagtccctgccaagataccaaaagactgcggaggtgggcaaggacctcaggcccccagactagcatctacaaacactagtcatgactacacagttaagggtcgtccatctgcttccccttctcctagcctgctttgtgcaaacaagtcccaagcaggagacgatgaagatggattgtcacaaagatgagaaaggcaccatctatgactatgaggccatcgcacttaataagaacgaatatgttcccttcaagcagtatgtgggcaagcacatcctctttgtcaacgtggccacctactgtggtctgacagcgcaatatcctgaactaaatgcactccaggaggagctgaagccctatggtctagttgtgctgggctttccctgcaaccaatttggaaagcaagaaccaggagataacaaagagattcttcctgggctcaagtatgtccgtccagggggaggatttgtacctaatttccagctttttgagaaaggggatgtgaatggtgaaaaagaacagaaagtcttcagcttcttgaagcactcctgtcctcatccctctgagattttgggcacattcaaatctatatcctgggaccctgtaaaggtccatgacatccgctggaactttgaaaagttcctggtggggcctgatggaatccctgtcatgcgctggtcccaccgggctaccgtcagctcagtcaagacagacatcctggcgtacttgaagcaattcaaaaccaaataggaaggtggagttaagggcaggagcaatcctacttctacttctcacctaatgacttgctccccctctccccgcaaaaaaggaatatccatcttctcaccacactctcttcctgcatgggctccacctgagcaaatcacctccacatactgccagaattcccactctccacaaactagatttatatttggaaggatactgctcttttgcctctcaagagtatgtgggtgaagactgaaaaaaatggaaacctaaaatccctagacctctgttacaggttgaatcattcgtatccaccagagggaaatcatccttccacgacaatggttcagtcggccatcacatcctgaagaagaacattcctagacgttctgacgcttccatctctctccaccctagaggtgtagaaatagcaacggggtcatagtcacacagtttaggttccacttcataacattttttgtctcctaggacaaacatgtatcatcagtttccaactgtttgggctcagttttcatccatgacacctccccccaccagccattctcctgtgggagcaagaacattgcttcacaagaagagagggcatctccatgctggtgggacccagaacctgtctctgtttggccctaaaaaattttccttattgtctgatctttaatgcattcaggttacggcacctggacaggaatgccctttatcttttgaaggatgggatttcccatctcaaccctggattcctcagcttcagaatgagccctgccactgtctcc

SEQ ID NO: 5234 - DNA, 674 bp, Macaca Fascicularis
acaggcgcccgcaagagagtatgactctgtctcagtatttttttttagtagagacggggtttcaccgtgtcttttaaaaagatgatagaggaaaatatagttttttgagagaatgtttatatctcttaaaagataatctgttttaattttcttcagataacaagttattattttttaagaaatcaagtttcacatgaataatgctgtgttggaaggctttttgatttaaaatcttttcagatttataacatcctgttaagttttaggagaacccgttttcccagatcagattcgagcttctaaaaataaatgctttcagtagcaggaatggcattgcttaaaaagctcatggcaggataagcatttgggttagtgttttattaacatatttgtaagtacttgttcattgtggaaatgtgaccttgagtaaaaccatatgtggctatggaaaccatgtttgtagttctggatacacgagtttgtgtgtatttagtctattgtattaaattattattgccctcagcttaacgtaaggattacaattgaatttaagtagatcactgatatacttattgtttatgaaacttaactttttgtgtgccacttataaacatgatctataaatcagtgctgggaaaattttactttcctaatctactgatacaggaataaaa

SEQ ID NO: 5235 - DNA, 674 bp, Macaca Fascicularis
  misc_feature (1)...(674): n = A,T,C or G
accacatacaaaggcnnnnnnacttcattttaaaaatgagagagaaaaaagaaacagtgcccctccccaaatatagagctatatatgtatattttatatatatagaattcattcgtgcacaattcattaaatgaacttctcaaaaattaaaaaaattataagatacgtatttctttaggcctttgtgtttttaaattaaaaccaacgaaaagaagtctccctctccactcccccagcagcaagggcggccggacacttcgctcccgctacctggcctcctgcaagagggttcccccgtgagaccgcccgtccccctttgcctggctgactacctgcatacagtagacactcactgctggagtgagacactgactcctccaaagactgcagggggcggaggagggaaccccgaaggcctgggagggggcatctttggcccccactaaccgtctccctatttctgcatcctggtgactgtcagcaagagatgagtcggggagaccctctcctggagttctagcccctaattctgggctttctatatgacaggacatgcagatagggaagaaactaaaacctttcaatgtcttccttttttctttaaaagtgattcctcaaaccatccctgccccaaagaggccgcctggacaagtgcatgggagcccataagggaa

SEQ ID NO: 5236 - DNA, 736 bp, Macaca Fascicularis
  misc_feature (1)...(736): n = A,T,C or G
gtggagttaagtgaatccaggtgaaggcattcaaggtggccctcttggatgtgttccgggaagctcatgcgcagtcagtcgnnnnnnnnnnnnnnnnngaatccatcaaccgggacagcgaagagcccttctcttcagttgagatccagnnnnnnnnnnnnnnnnnnnnnnnnnnnnnnnnnnnnnnngtgtctgagggcatcatcttcctcatctgaggaggcctcgcctctgaacttgggttgtgccaagagagtttcttccgtgtttccccccgtccccaacccaactctttgcctctgctcnnnnnnnnnnnnnnnnnnnnctgaaggcgaggaatgttggtgatgaagctgagtcaggactcggtggaccctttgggaatgggtcnnnnnnnnnnnnnnggggtgaggaaagaggagacagtgagagaggacaaggactattggcatcttcattgcaaaagnnnnnnnnnnnnnnnntgccctacttcccatcccacacaaacccaactgtaaatagcatgacttctgagtacttttggggggcacaactgttttctgttcgctgttttttttttcttgcagagcactgtggtctagactaggctttgggtggttctaactggtggagannnnnnnnnnnnnnnnnnnnnnnnnnnnagagagctttctttacaatagcaccagttaaggcgaatatatattgtaccacaaaacaaacccaatatccagag

SEQ ID NO: 5237 - DNA, 2694 bp, Macaca Fascicularis
tgcagagctgcgcgtgctgcgccggggatctccagagccgggcccaggcagctcgacttccccgccgctgctgctgctgtccacgtgcccaggcgccgcccgagcgccacgcctgctgtactcgcgggcagctgagcccctggtcggtcagcgatgggaggtgttcgacgtggcggacgccatgaggcgccaccgtcgtgaaccgcgccccccccgcgcgttctgcctcttgcttcgcgcagtgacaggccctgtgcggagccctttggcactgcggcgtttgggcttcggctggccgggcggagggggctctgcgccagaggagcgcgcgctgctagtcgtctcctcccgcacgcagaggaaagagagcttgttccgggagatgcgcgcccaggcccgcgcactcggggccgctctggcggcacagccgccgccagacccaggaaccggcaccgggtcgccaagggcagtcactgcgggccgcagacggaggaggacggctttggccgggacgcggacagcgcaaggcagcggcgggggcgcgggccggggccacggacgcaggggccggagccgctgcagccgtaagccgctgcacgtggacttcaaggagctcggctgggacgactggatcattgcgccgctagactacgaagcgtaccactgcgagggcgtttgcgacttccctctgcgctcgcacctggagcccaccaaccacgcaatcattcagacgctgctcaactccatggcgccagacgcggcgccggcctcctgctgtgtgcccgcgcgcctcagccccatcagcatcctctacatcgacgccgccaacaatgttgtctacaagcaatacgaggacatggtggtggaggcctgcggctgcaggtagcgcgcgggccggggacggggcagccgcgcggccgaggacccccagctgatgagcagcagagggccagcctgtcaccgagcgtgggtgcaagtccgatgtgacccagcgccctctcggaggagggagagcacacgttcacactgacacacactcgtgcagtcacacacacatttactggggacagcatgtgaaagccttgggaagagatgccctgccggtaccgaatgtcagagccttgtgtattttgcaaacagataaccgtggcgcccactgcctccatttggggagaggaaggtgtttgtgcttatgttgcagtaacaggcacgaaaatcaggtagaaacgggttaggaaattggaagctccagagtgggagaaccaaaggggtactcgagcatgttttatctcaccccttcttgtctctggcccgacgtgggggcatcgcttccctgggtggctgagcgctgcgtggtgcactccgtgatccactgcaaggctgtaatgccctttccgagggtttgtgttgcatggggccgtttactctggaactgttgcaaaaagcatctttttgtttttttcttttttaacttttaaaatttaacgtgcccctgcttcatttttgaaagggaagttttgtctgaaagaaggtgttgtggagcttcccagatttgtgcaaaggtcggtaccgcccccccccccgcctttttttttttttaaatcaattccaattggaaatgttctggaaagtggaaaggatatttttctttttgtggggaagtgaaatgggggaggggttgaaacggctgagtctgatctaacaggatattggggtgggataggatctgccaagttcagaagctccccagctggtcagggggagatgggtacccatgctttgggtggcttaggaggaagttagtgcaatggctgggaatggggaaggtgggaatggggaggggagctactgcttttcctagagacctgccaggaggttttcctaagaagccggggaagaggctctcagggcttgagaggcagggaggtgtcctgggtcccactccagccgaggactctgccacgtaggtgcaagctcccaggggccgacccgggcttgtgctagttatcaagtaagttggcctctgctttttacctgcattcgctatgttgttgctgtagtttttggcagtgcgatagtaacgggaagtgaagccacacaaaagtgcttttgtcagacttcaactcacaacccagatctttagagcagggggaaggtctgccccttcccctcatcagctccttggcttggctgatgtgcccttggaagggcagggccttgatgtgggggagcagaggtggaagcctatcccccagttgccagattttgccccgaagggtcttatcgatgggaggattttctaggcatgtaaaagtgagttcggacattcagccttcactgtttggtttgatttgtttatgcctgggaatcctttgtggctttttgttagtatgctgggagagggaaactagttggactccacctgtctggggtgagggcttcttagaatagccccgcagccctcccagtgcatctgtgtgatgtgcaggactttccccttcagagtcctggggagcattaattccaccctgtgttggatgcaggacagttcatacacattttgattctcagtgattacactcttgagagagagaagacagacttaggatttagatacagctaatttacttatgggccccacctgaagcaatcggttttcatcctgtaaaattctcccaaaaaaaaaaaaaaaaa

SEQ ID NO: 5238 - DNA, 747 bp, Macaca Fascicularis
  misc_feature (1)...(747): n = A,T,C or G
catatattacttatcannnntgcttttncntnnnnnnnnnnnnnnnnnnngatcactatattttaaaatgctttttgtgtgcctcttggttatttgaaatctgtttcttagctctaattttttattcttacggagcgtcttaggttactacatgaaggtaagactgccacagtcccccagggagannnnnnnnnnnnnnntgattgatttgaagatgacagagggcctagggggatgaatgtattggactcaaaggttgcattttgtgtttccatttaatttaataatcaacaaaacgacaaagtcagtttnnnnnnnnnnnnnnnnnnnnnnnnnnnnnnnnnnnnnnnnntttcaaaagtcattgctacaaaagtgcatatttctcatttcccgtgggtctctagaaactttctcaatatttaaagccaaacaaatccatcttttctgagagacagaaactaaaaaattcaaagcgttgattcactattaaaaacagcaaggccctgctatttcccaagagtaaagaaatttaaaattctcattgtaagaagtatgaacttgaagctagcattggtttatttctggcagctacttacaatattaaaaactttactttttaaatttaagacagtttcacaggaaagcatgaaattagtctattgtgaaatgtttttataactaacttggaatatactgcaaatcactagtaagtagagacacatttaagataaaatgactaataaa

SEQ ID NO: 5239 - DNA, 774 bp, Macaca Fascicularis
  misc_feature (1)...(774): n = A,T,C or G
ctgaagcttgggcanncatgtgtntcccntcccangtccccatcccagtggggccagcctcgttaggcagccatagatgagcctggaacttgactgtcactagtgacttgatcctggtgtgaaatgcatactggggataaggtcgctcaggtgttttatttcttggccacaactcccatagatgccaatgttttgatagcctcggtttctcaacgatgtcctttgtttacagtgctacacttcatacaagtcaaaaagtacttgagttagaagaaacttcttattcaggtttgagtaagcattttacttccatgtgtacttttaaataatccataccttgaagaagttggccagtgacattatatacatgctgatccggttgttcttttcattccttgagtcagcttcggggtcttggatattaaagaggagagggagaactgttaatgtttcggatcatcgtttgtgaacaaggccagactttgcccattttaggttatccaggactcaaggtagccatctggatcataagaaggtcctgcagttgagacaaaatgacccaagtgtattttccacaagttttgatcctgtgtaatatttctttttccttccctagtgtgtgtagataaaggcatggaatgcagttccactttctccccagagttgatctttttgtgattgctttcccgtctctagtattctgttgcgtctagagaactgattttttcctacatatgcagattgtacatttgtaagtgaaaatgtcagtacata

SEQ ID NO: 5240 - DNA, 651 bp, Macaca Fascicularis
  misc_feature (1)...(651): n = A,T,C or G
tcatngnnntcattgaatatggtttggatgtttgtcccttccaagtctcatcccagagttaagtttcttctctaccctcagaaatgtggcccttctccttgtcaggatattttggagacaaaaagcatatgggatgccttcaaagtcagctggaattttgggggtgaaattcaatgattttagggaactccttggctcctatgtgctgttcacctggaggaccaggacgtgtgcacggatgaccactttctccctgggacctgaacagtgcagagaaatgggaagatcagacataaagggagtggggaagatgggtctgggcttacagtactgaacccaggaatgacagtaactgtgtgtgttgctgcaggtgacaaaatatctgaacagaagaggacttaggagagatctgaactccagctgctctacaaactacatatcagcttttcttctcacttcatgtgttcactacccnnnnnnnnnnnnnnnnnnnnnnacccttcaaagtttgtccttatctgttaccttaaagcagtcattccttagtaaatagaaggtaacgaatatatgttgacacttttgtagcaccgatatggagattatcccttcactgagccttttatcctctggtctcctttgaagaaccatcac

SEQ ID NO: 5241 - DNA, 713 bp, Macaca Fascicularis
  misc_feature (1)...(713): n = A,T,C or G
ctgnnntaaaaatannnnnnaaggaagtgnnttaaaattatatttgtttccttttagaaaacnnnnnnnnnnnnnnnnnnnttgctttttcgttttctctctgctttatatgctcttcacagtacatcatgtccaacgggatacctattgtcccatgacacccaaaattgatgacagcaaagggattccaacatatggaaatgttgaaaattnnnnnnnnnnnnnnnnnnnnnnnnnnnnnnnnnnnnnnnnnnnnnnnnnnatcaaagtgaagtaaatttattctatttaaattcacgctaaaaccaataaaatactataagtagaatacacataagaatcacctagtcttcactatattgagtaactataacgtgctagttttacaattaatgaaactaaacttttaaacatgtccattttgtctacatccttttgaaagtatttnnnnnnnnnnnnnnttttaattttagggttgactttctcttnnnnnnnnnnnnnnnaaagtttgatgtgaactttgaagnnnnnnnnnnnnnatgattgtatctttgctagtcaacaaattatgaaatataatactcaatgcgnnnnnnnnnnnnnnnnnnnnagaaataactaagacacaaataacctttgcaaaccttcaannnnnnnnnnnnnnnnnnnnnnnnnnnnnntttgtatatatacttatatcacgtaggatgtaa

SEQ ID NO: 5242 - DNA, 733 bp, Macaca Fascicularis
  misc_feature (1)...(733): n = A,T,C or G
ctcgattgacatactgcaagnnnnnnnnnnnnnnnntgaagtcagaacaagttatcaagtaagttcagagttaagtcctgaactgcagagggaaagtgtgctgatccaggcagagttgtctaaatgaaaacgctggtcaccttcctctgggtcccatattgagctcgagttggaagaggtgagtcctgtctcaaaatggaggtcaaaccgccgcccggtgccccccagcccgactcgcccccagcccgactcgccgccagggggaggagggccatgatgcaaaggaaccagagcagttgagaaaactgnnnnnnnnnnnnnnnngctttgaaactacagatgatagtttaagagaacattttgagaaatggggcacactcacagattgtgtggtaatgacagactcccaaacaaaacgttccaggggatttggttttgtgacttattcttgtgttaaagaggtggatgcagcaatgtgtgctcgaccacacaaggttgatgggcgtgtagtggaaccaaagagagctgtttctagagaggattctgtaaagcctggtgcccatctaacagtgaagaacatttttgttggtggtattaaagaaaatacagaagaatataatttgagagactactttgaaaagtatggcaagattgaaaccatagaagttatggaagacaggcagagtggaaaaaagagaggatttgcttttgtaacttttaatgatcatgatac

SEQ ID NO: 5243 - DNA, 734 bp, Macaca Fascicularis
cagtagtgaaggactgtgctgcctggcacaatcatactgttattccactgtgctgcacatcttgaagctgtaaagatgtaagaagtctcgcacagccagggttcaccttacaatccttcccacccagttgtacgcctttgtgtcagggtttggaggagtctccaggaacacctagtgtttccttttctcacaggtgtttccagtcctcacaggcaaatgagagagtcccagaggcaattgaacaagccctcagagatcacgtggtctgttcactctccatgggaacacacacttccctaaagacctgtagccaaatcatttggagagcttctgatgcttctctgccttcctctgtctcaaagaatcccatgtgcctctagttgggaaacattcctctagagattctaggttattctcattagagtgttaagatactcaggtgggctggggcagaaaatggatgagaactagtctagtccaatggcttcactttggtaactgaacccacagaagaggaaaataacagctcagcttttctgagtgttataaaccaatcattatgctagttacatgatatacatactatttaattctcaccctttgaggttttgtatcactattcccactttacagataagaaaacaagggttgaccaggcattgtggctcacacctataatcccagcacttgagaggccaacgcaggaggatcgccgagtcaggcgtcaagaccag

SEQ ID NO: 5244 - DNA, 749 bp, Macaca Fascicularis
  misc_feature (1)...(749): n = A,T,C or G
agctgcaagatgagatctcgctgcagcaggcagagctgcagtcnnngcgggaagagctgcagaggcagaaggagctgcgggcgcaggaagaccctgggaaggccctgcacagtgccctctcagaccgggacgaggccgtgaacaaggccctggagctgtccctggagctcaaccgcgtctcgctggagcgagactccctgtaccgggagctgctgcgcgccatccgccagaaggtggcnnnnnnnnnnnnnnnnnnnnnnnnnnnnnnnnnnnnnnnnnnnnnnnnnnnnnnnnnnnnnnnnnnnnnnnnnnnnnnnnnnnnnnnnnnnnnnnnnnnnnnnnnnnnnnnnnnnnnnnnnnnnnnnnnnnnnnnnnnnnnnnnnnnnnnnnnnnnnnnnnnnnnnnnnnnnnnnnnnnnnnnnnnnnnnnnnnnnnnnnnnngcccaggggctgcccttgcccgcttaggggctcactttcctcttctggccaattaagtgacagggcctggattatcttccaaaaggagatgatgccctccccaccccaggatgctgggcaagggctcatcgggagcaggggctcatccggagcaggggccagctttgtggggcaggagcccctggtgggtggcaggggcaggtgaacagagctattttccgaatcaatataggtctatcttttctagggcagggatggggctgggtatttatgtatcannnatgggacannngtaatatataaatcac

SEQ ID NO: 5245 - DNA, 653 bp, Macaca Fascicularis
  misc_feature (1)...(653): n = A,T,C or G
aagcaggaagattctatatcgtgntagtagagacagactccaggcagnnntggacttgctagcccnnngaaggaggatgtggttaatnnnnnnnnnntggtttgtcctaaggccataggcaaagagtaccagatatggctgactcccatgaagccccggccaanattcacaccacccccacaccccaggctatgctttctcctttcattaatccattcacccagatatttcattaaaattatcgtgtgccaggtcttaggatgtgtcgtggagtgggatagttacccagtgacagttgaagatttttttttccctgagcctgtgtcttctctgtgaaatgggaataagaatcttgttgccatcacagttattaccatccccccggctaccaaagttactaccagaactgttactacacacagaggatattgaccgagcagctatcattttccaatcaccttgacaagcacttgtaatacagcttattatgtcctattcaatcttcacacaatgtcacgggaccagtattgtttacccattttctataaggacactgaagcttggaggagttaaatgttttgagtattattccaaagagcaagtggcagaggctggatccaaacccatcttcctgtacctgaagcttatgctcc

SEQ ID NO: 5246 - DNA, 758 bp, Macaca Fascicularis
  misc_feature (1)...(758): n = A,T,C or G
gcagacttgcacacaggattgtcctnnnnnnnnnnnnnnntggagcannnnnnnnnnnnnnnnnnnccccgcactcgctnnncagccggctgggatgctaagcttctctacctcccnnnnnnnnnnnnnnnnnnnttcctggtggannnnnnnnnntactggggttctccaagcccggccaaggctctatgaagccaaggatcaggtgcatggttgcatggatttgaggtgtgctatgaggggtgatgtatccttgagaaagaaataaagtggagggaggccgttgtcnnnnnnnnnnnnnnnnnnnnnnncttnnntcactacnnnctgtccatgannnnnnnnnnnnnnnannnnnnnnnnnnnnnnnnnnnnnnnnnaagtttcaagttaagtagctgagaaacaggaaccaaatagtgctcctgggcgcattgtcaccttaggtggcnnnnnnnnnnnnnnnnnnnnnnnnnctaacaactggggtgggtgtgagcaggtggaaggagcctcagcacatgccattnnnnnnnnnnnnnnnnnnnnnnnnnnnnnnnnnnnnnnnnnnnnctgggnnnnnnnntggaaatggcttgggagatgtgaggggacccattctctgaagatccctgtatacgtggtgttgggaccgagnnnnnnnnnnnnnnnnnnnnnnnnnnnnnnnnnnnnnnnnnnnnnnnnnnnnnnnnnnnnnnnnnnnnnnnnnntagggatctgtgcagaagacaaataaa

SEQ ID NO: 5247 - DNA, 2605 bp, Macaca Fascicularis
agtgagcagtgaaaaccgaagcggcagcaggcagtggcagcaggcagtgacccaggcagaaatagctcccgtgcgattcactagagccttcccagggccctggtcctggctaccgggagtcgcgcgtccggatctcaaaagcggcagaggccaccgaagggacaggaagtagtttggtccagaccacactcccggtacagtgcgcagagagccggtgggagccactctgatcccggacgcctcagctcccccttgggctcgagcttgccctcgggccggggaaggatgaccgcgatgccaggacgcgctcccctccacaccgtcccgggcgctctgggcccctggctgctgggttgcctctgggcctggacgctgtgcggcctgtgcagcctgggggcggtgggagccccgcgcccgtgccaggcgccgcagctgtgggaagggcgccaggttatgtaccagcaaagtagcgggcgcaacagccgcgccctgctttcctacgacgggctcaaccagcgcgtgcgggtgctggacgagaggaaggcgctgatcccctgtaagagattatttgaatatattttgctgtataaggatggagtgatgtttcagattgagcaagccaccaagcagtgctcgaagatgaccctgacagagccctgggaccctcttgacattcctcagaactccacctttgaagaccagtactccatcgggggtccccaggagcagatcatggtccaggagtggtcggacagaaagtcagctagatcctatgaaacttggattggcatctatacagtcaaagattgctatcctgtccaggaaacctttaccaaaaactacagtgtgatattgtccacgcggttttttgacatccagctgggtattaaagacccctcggtgtttacccctccaagcacgtgccagatagcccaactggagaagatgagcgaagactgctcctggtgaacctgcgcatagggaagtggcagcatcggttgtcagccccctgtggtcccagctggagatagatagagactagtcaagatgagaatgctaattggagagaaatataatttcaggaagatgcacattgatatggggttttgatatgtctgattttgactgctcaagctatgttaacagaagaaaattgaatggcgagggtgtggccatatgagctaactgtggctaatatggacactttgggtatttctaatgcctgttcagggctggttttctgcatgcacagctatatacacaatgcagtgccatgcaaacagggaggggtcagtaagagaagtttgtcttggcagcaagtatttattgttgacgttattcagaattggtggtgataataaaaagcagagggattttggtcaattttattattaattcttaagttccctgcagagaatgccccgtttattgctgcaccagggtgggcattgctcccactgagccctactccaccctgcccctgcactcccttggttgccaaaaaaatgataccttaaatcccttcctgactgaagaattgtatggcatgacccaattgatataaacatttggaaggaaatgaaaagctaaaataggaagcaattattcctctaaagaaacattttaagcaagacagtttagagaatcctaatgtctacactggtaaagcgcgagccatgtaagcttctttttttttctatgcaagagtattgatgtatgtgctgaatcttcacagacttgtcaatacacaggcactattctaaaatagcactgaactggggatcagtagactattgtctcctaaacccaggactagagttcccttgtactctcactcctttggtcattaaatgcactgggcttgccctcgctttggccttcctagaacgctgcttcataacctgtctgtctgacttctgcatctccgtccatgtcagctcattcacaagagctgctcccaagcctggatgagtcgcaccttgcatcttgagtatgcatttctcacaataattattaagctgtgtgataatttctgctttcaggacattgtcatccattatcttggctgtgagctccttgggtacgggtaccttgtatgtttacttttatatccctagcaccaagcaagtgcctggcacatggtcagtgccctaagtatttgtagagtgaagaatgccagcctctcttgtccctggtttccttatgtgttaaatgtggttgagtttgtccatcgctagggagaaacttccagtaataaaatttactattctaggttattctactgttacgttttatctgcccatttatcttttttagttaccaggagaaatgtgtgacacctatattatgatgaaaacaatctcattactcacagtttatctatattaaacaaatctaattgcattttaaagcattctttgatattattgcttttgtaataaatatggatcatcgtggttataagggagttaaaacaatgctctaataaacaaagtgcttcatgtgatcagaaaaaaaaaaaaaaaaaaaaaaaaaaaaaaaaaaaaaaaaaaaaaaaaaaaaaaaaaaaaaaaaaaaaaaaaaaaaaaaaaaaaaaaaaaaaaaa

SEQ ID NO: 5248 - DNA, 702 bp, Macaca Fascicularis
  misc_feature (1)...(702): n = A,T,C or G
aatagtattcaaatctctttcaggttttatttaaaaaaatatcaataaactaaaaggttcagttcataccaaataatttctaatgtgggagaaaaacttggcacaaaatttcttcagtttattaatctgtaaattaattgtacagttttctttttcaaagttttaatattgtcttcctttttaataacttattnnnnnnnnnnnnnnnnnnnnnnnnnnnnnnnnnnnnnnnnnnnnnnnnnnnnnnnnnnnnnggtagtcaaaacatgtacaaagaaatacctgtaaaactgttttgtctcatgttttattggaccaaagttgtggtttgtatggagtgtagtagtagtgtgtacaggtagaaaacttttaaatacagcatgcatgtgtttcagttagcttgttttcatcaccataactgcaaagatgtggcttagttgtattgcatgcttcctataatttaactctcacataattgatgcctgcaatagtgtaaggcgttnnnnnnnnnnnnnnnntagtagacctgtgacttaatgtgttggacatattatttagacttagtcatacaaagaaacttagctcttttttcatctcacagtagagcctatttccccaggaaaaaaataaatgcctttgaatgaaaattctgaaattgtaaatgtctattttaatattcaactatgaaaaaatctgtgaata

SEQ ID NO: 5249 - DNA, 694 bp, Macaca Fascicularis
  misc_feature (1)...(694): n = A,T,C or G
cgcccaccnnnnnngatgtgagcgctaagggtgagtgagtactgggtgggcctccacaagaggcctccnnngagccgaatctgcagagaccaagtgtctatgagaactgcttaagagtactttgcacattctcctccacaaaggtcgaggctcccgccgcgcccaggaatgcgcctcgacaaacattaggcgccccttgattttgtgtttgcatctcacgcggtcctctagctgacaagtgcatcagaagagtcacagtgtctgtcacaggctagaggctcgcagaggacaggaacgcgggaaatctaggcaattatctccagcatataccaagagctattgcgaggctcagatccctttaaaaatggtgacgagacaggagagggcggctcctctaatgctttccggaacgtctttacctctgtgtcctttataccttttatctcccccaaacaaggtccttggtcagtttctgcttctctttccacatcctcctcccccacttctctgtgtagttctagggggaaaaaaatgtattgttttccttttttttctgatgcttctcactttaaatgtgtctattgtccctctctctgtcttggggtcttccgcactcaccctgcctagttgtctgtcaagtcccttctttccttgtatcacaacaatgttctccctttctcatctttgtttctct

SEQ ID NO: 5250 - DNA, 768 bp, Macaca Fascicularis
  misc_feature (1)...(768): n = A,T,C or G
atacaggtgtgagnnnnnngcccagcgtatatttgattctatagtgctgctatttttggttgaaacgaacaggttggtaacctaatttgtggccccctgtctcttaagaaatgtgtnnnnnnnnnnnnnnnnnnnnnnnnnngtcacgacattgcctcaaaactgccttcattccttaaagttaaaaacttacaaaaggccgtataaatgtgtatgtgtaatgttattacctttaaatctaactggtaatatgacccaaatttgtataaagatttttcaggtgaaaagactgnnnnnnnnnnnnnnnncaattctaatagcttctgtgtttttgtgcaccaggcctggctgcctagcagttgagtgatgctggttagctgttaaggtggcctgttgcagtgcagagtgnnnnnnnnnnnnnnnnnntcttctgtttcctcctgaaaaaagaagccctgtccnnnnnnnnnnnnnntnnnnnnnnnnnnnnnncaacnnnnnnnnnnnnnnnnnnnnnnnnnnnnnnnnnnnnnnnnnnnnnnnnnnagcacatctagatnnnnnnnnnnnnnnntcttccccctctctattctgttaaatggcaaatctgatcatatcaacatacatgaacttaaaatatggggaatgttatggaagaaatggcttgtaactttgtaggtacttataacatggtgtatgtttttttattatgaatatttcttactattaccatgtttctatcattgaattaaaatgttttgttggtgt

SEQ ID NO: 5251 - DNA, 641 bp, Macaca Fascicularis
  misc_feature (1)...(641): n = A,T,C or G
tcacacgnnnngattcacggtgagacattttgccaccttcttgtgtnnnnnnnnnnnnnnnnnnnnnnnnngtacttgtataggattctagcaattcataataaatatgtcannnnnnnnnnnnnnntcttatgcttatggacgttgtatatttgtattttacgaccaagtagaccaagtcagaaagatctctcgagcgtaccgtaaaccnnnnnnnnnnagtcccgaagggctccaccaggtaccagggcagctgcttttcctgtcttttgtgcatgggcgactcattacagtgtgagataagatcgagttctgatgcgttaaacggaggtggcagaaatttgtcaagaaggccttatccatttcgattgtgtgacagattgaaatttattgtttacattggggaatgtatctcaaatttttaaatagaagagtaataaacagactttaaaacaaatattaagatttttactcattctaggcaagcaaatnnnnnnnnnnnnnnnagctctatggcactggttgtttagagtggctgattaagtgcaactttcagaaacnnnnnnnnnnnnnnnnnnnnnntactgcggaagtgcagggcaccagtaaacaccatgtattattgcnngatgaatctgttt

SEQ ID NO: 5252 - DNA, 2737 bp, Macaca Fascicularis
gcagagacaggaggttcctggaggctgtgaggcttctgggctattatcttgaggctggatggagggcatggagaatggagaccaggtgggtgctgctgaggacctgctgagaggggcctgcagcatggaccgaggtgcagccacggctcaggcagctgtagccgacgtccgggtggactgtggaggtagaaccagtgggagctgccgagtggccggcgaggcactgggaggaccaggtcactgcgaggaggaggaggagctcccagaaggatcgggtttgaggtgagagcactgcccggagcatagtgctgggtggctatgcaggcgccagtcagacctcgggttctgaggctcaagagggccgtggggcccggagtgcagggaggagagagatcagggacagtgagtacagacgcccaccaggagcgtggccaggggtcatgagaagcgacactggaggaggacgcagggcccacgggcgacagtggaggagaggggaggagccccacggggaaggtggcacctgtgtgtgcaagagagggcggcattggccccaggccggcatctctgtttctggttggtcgtcaggcctcttacagcaagtacttaacaaacttagatttccatgataagatttatctcaaaccgcaaaaaagccaattttattatgttaaactggtaggagatttttatgagagatgaaagtaagcaattttaaatttttaattttttaaatttgtgttctgtttctcacacttgaggcttttctgtcatgcaccaaaagagttttggcaattcttttttgcatcagaagaatttagcagaacccccaatattaaaacaattggtttcttatattaaactcatcggacaggttttgtatacacacacatttacgtcaagccactgatagaactaaactgtgtgtaggaatctgttttctctaagaaaggattcctttgagttctgtaggatatgtgcttacggtttttctacgtcaagctattttatgaaataaaattgtataaacaatgaagcttcgttttcacacattgtatttgtttaatgcagacttggcatatagtttttgaaattaagggttttttccataatactagcttaggaatttaattagtcactgtgtctctcacctccataggatgagcacagaaatcacattttaaaagcaggtgtgggtgttttccgccgatcgtgtctcctctcccgcttctctggctcagcagttacttttcctcagtcgtgggggctgcgttcagctgggatgccagcgtcagggcgaagctcccccgcgtctgtgacgttttgttacacacgctcctcatcagtagtagccgccattccttgagtgttctcgcacatgcactgagaagggctggggattgtcaccctcctctaaccctccgtgagggaattagatttttatcatcccgactgttggggatttccagagctcaggcaatttgcccctgggcgggatggagcccgcctgggcggggagcatggatgggcttctgtggtctgtagcttggctctctgtggttggaaacttcagaagcagcagattctaggtgcagcatttggtgccctgacaagttgtaaaacctgactttggggagagccctcactggcagccagtgtcctgccgtgagcccggtgagcacagacgttagagccggggccggcgggctcagaggtcagaccctggggaccagcgggctcagaggtcggagccggggctggcgggctcagaggtcagacctggggaccggcgggctcagaacgtgggcaccacgtggtcctatgttgtctcacggctccacttctgaattttttctacttgttcacctttgacataaacttctatttccttttcatttcagtttgtatgtgggttttctttcaggtctgattttaagcctgtaatattgcactgtaacgttttgaagtgcaggtgtgatagagccagtgaaccaagggttcatgccccagtgaaatacaaatattcataactgagccagtgtgttgccatacggattacataatgtgtgattagcaggtgtaatgtgtcactttcaacatcggttttatgccagagttgcattttattagattatttgggagttcactttgggcccaaaggctcatgtctacataataataacttacaatttttctttttgtctttgttttattttttgtttatttctgttttttgctttccagaccatgccagagtaatctcagctttctttagttactggatcacacatatcctccctgagaagagcagtgactaaaatggaatatctctttaagaagagctcctctttaataaaaaacatgaaagacaaatgtgaaatgggcctagagttagttctctgggaactcgaaagatgtttctgctgtattatttattcacgtgttgtttctgatggtcaaggtgccatctgaggctttggatgagaaattggggtaaaatggaaatttttcaccgatttgcaattatatatgtcttgaattactacataaaacgtgattctgtttttctaattattgtaaaaattgaaaatggacattctgttaaactgtatcatttgaagctcatatatttttatgaagttttgaatcaccttgtatctgaaagtctctgttttaagaaagctttctgggcattaaaatgttctagtttagtctgaaaaaaaaaaaaaaaaaaaaa

SEQ ID NO: 5253 - DNA, 102 bp, Macaca Fascicularis
tggggctaggactatggacttttagcaacccccatgtgaccctcacgtatcatccgtggactcaggacctacccagtgatgctgttgatctctcaaaggtct

SEQ ID NO: 5254 - DNA, 2184 bp, Macaca Fascicularis
ttttagcccttgtctagtttatgactgtgttgcagacatgcctttctgtgtcttggttaaaagtactggtgtgtctgggcatttaggtgtggtctatgagtctgggaaagcttctcctagaggagagccctccagggttgctctttggggtgggagtagtgggagcggaaatggaacgctagctgccctcttaaagccaaaagcctacttcgtcagggcaggcagttggcatgtgtaggcactcaggagccttccttcagttccagcggccagtgtggtcatcatcaggagcgataaggtcggatgtgggagtgagaatgtgtctctgagattgaccagtagccatagactccagcaagatgaggatcttggtctgagaggtgcccactgtatcagaaactagacttgtattgagcaaatggcttgttagccccaggaggctttttacggccacaaatgtccctgatggtgagcagcacttggccactactgtctgatgttaaccagagttatgggggtggtttctgcaaatacacaatactgtggaggggttatgtggcttacccagaggtgcccagatagcaaatgaaggtgcaagattggaatccctgtctttctggttgacccttggcttgcctaactcactcattcattcattccattccacacacactgatgaatgccgaccctgtactgggttctgttctaggaactagataagacacatcacctatgctgctcttgtggggcttctgttccactaggggagacagtcagtagtaagccatcaagcaaaggcatggctgctggtgtgatgagttccatgaagacccataaagctgtgttaaaggagatgggtggtccaggaaggcctctctgaggaggtggcatttgagcactcaagtgacttacactggatttctgaccccatgagctggaacttaggatatctgatctagaagtacctctagaagtccttttcccagtaaacaagctagggtccagtgaggttaaggtgtgaattcatggtacgactcatgggaaagatgaaactatatccaagaaggacaagtataatagctggccactgctctccccacaccagccttgggctctagccatctgccttttcatcccagaatgtgttttattttcctcaagactcagccctttgaaagatttagacttccaaattgcatttattaacaataataaatgtattttctcatggctgggtgtggggatggggtagaaattttgaacacatttgtgatggttgatcagccctccaggtaaggcaagggctgactacctggagctggtgtttttcctgcctaggcagagacacggcccaattttgtaccaccagctgctgtcaatgtctgtcagagtggaatttctgttggtgtttctgaaatagcagtgtttcttggaagacccccattagtactttctggattccatctggacctggtttagggggttagatgcttttgaatggaggctggagagaccctactgatgcctctgaccagagatggtgaagcaggactcagagggcacccagggcttatttcagggagagagaggcccacagttaaatcagaggtcacaaataaagcagcggaccccacctctcccaaggaccaggctgagccataattggccaatagtttcatctagaagcaggcatcctacatcaatttgaaaggagcttctggttgaagtaagactttattaattagcctgttaggaaaacagcttcccagtattatgagggctggataatttcatgcctaatatttttcttggagcttctaaaaggaagacacggccgcgcacagtggctcacgcctgcagtctcagcacgttgagaggacaaggcaggtggatcacgaggtcaggagatcgagaccatcctggccaacatggtgaaaccccatctctactaaaaatagaaaaattatctgggcttggtggcacacacttgtaatcccagctactcaggaggctgaggcaggagaatcgcttgaacccaggaggcggaggttgcagtgaaccgaggtcgcgccactacactccagccaggcaacagagcaagactctgtctcaaaaaaaaaaaaaaaaaaaaaaaaaaaaaaaaaaaaaaaaaaaaaaaaaaaaaaaaaaaaaaaaaaaaaaaaa

SEQ ID NO: 5255 - DNA, 803 bp, Macaca Fascicularis
  misc_feature (1)...(803): n = A,T,C or G
taaagattagtaagggatccccatgtgctgtggaatgtgcttccatttgagtggggatatcagaagaagaggggcttgctcagtaannnnnnnnnnnnnnnnnnagctacagagcccaaattgttacaagatgcaaagatgtactccactttttgatcaagcgtcagcacctttggcttaccatccagtccctgcttctgtgactgtaagggccccaccagtgtcagcggacttgtttgtgctttgagggagctcttctcagctccctgtgccagccccaggcctggtggatctgtgtctcaggcccactgcacaccgttcctctccatctgcccttccctcccaggcccccactagggcgggggagtcgggggagcaggtgtggcaagtgttaggaagtcccttctggtgacagctggtcttcctagagtgttgctggtaactgtcgcctcttggtctttnnnnnnnnnnnnnnngaaagggggcaccttcgtcttgtagtttggccctcgggtttcctcactaggtattgtgtaactccctcaaaaaaaggtttatgaaatgctgagcctcaggtttcatagacgtttgtacactaaaaattctgcagcagaatatttttaaacattcgcagttttttgtaagctatatttttgtatatttaattgctattttaaaattttaatgcattttgctaatcactctttaaaaaataaaacatgcatgtaatnactcaaacgnnnnnaataaaaacaaattttgaaaaataaaaaaaaaaaaaaaaaaaaaaaaaaaaaaaaagg

SEQ ID NO: 5256 - DNA, 1245 bp, Macaca Fascicularis
  misc_feature (1)...(1245): n = A,T,C or G
attttactgctgcaagcttttttaaatttctgaactcaaggcagtggcagnnnnnnnnnnnnnnnnnngataactggacaaatgggtctcctgggccctggcactggttctccnnnnnnnnnnnnnnngggtccccttggaccccctctcttccctccagatcccagccctcctgcttggggtcactggtctcattctggggctaaaagtttttgagactggctcaaatcctcccaagctgctgcatgtcccgagtccagaggcagtcacagagacctctggccaggggatcctaactgggttcttggggtcttcaggattgaagaggagggagagtggggtcagaggattctcctggccannnnnnnnnnnnnnngcccatgaatccttttaggaatgggacaggtaccttccacttgttgtatttattagtgtagcttctcctttgtctcccatccactctgacacctaagccccactcttttcccattagatatatgtaagcagttgtagtagagatagcaattgacatttctcgtagactacccagaaacttttttaatacctgtgccattctcagtaagaatttatgagatgccaacggcatagcccttcacactctctgtctcatctctcctcctttctcattagccccttttaatttgtttttccttttgactcctgctcccattaggagcaggaatggcagtaataaaagtctgcactttggtcatttgttttcctcagaggaagcccgagtgctcacttaaacactaccccctcagactccctgtgtgaggcctgcagaggccttgaatgcacaaatgggaaaccaaggcacagagaggctctcctctcctctcctctcccctgatgtaccctcaaaaaaaaaatgctaaccagttcttccattaagcctcggctgagtgagggaaagcccagcactgctgccctcttgggtaacccactctaaggcctcggcccacctctggctatggtaaccacactgggggcttcctccaagccccactcttccagcacttccaccgtcagagtcccagagccacttcaccctgggggtgggctgtggcccccagtcagctctgctcaggacctgctctatttcagggaagaagatttatgtattatatgtggctatatttcctagagcacctgtgttttcctctttctaagccagggtcctgtctggatgacttacgcgggggggagtgtaaaccagaactt

SEQ ID NO: 5257 - DNA, 1650 bp, Macaca Fascicularis
  misc_feature (1)...(1650): n = A,T,C or G
agagatgcaccaaaacttacgcccagatctcacatctctcagccctttcagcttgcactttctcccaagacatctctaatataccttgtgagtttttaacagtatattaagggggagttgtatcaaaaatagaaactgttccaaataaatctattcaacctggatgttctttgtctataacccattacttacaacatacactaactcacaaggtatatttcttgattcagtcttgaaatgtgagcaaggttaatttgacttagacaaaagaaatggcttgaaagatggagtaccataagagatggggtaccatacgtctgagagatggagtaccgtggagtaccatgaggagtagtcaaaaagggaaaagcactgtgaattttgccttctgaagtaggcgtgtagctactgcatttctgaaagtaacttgtgatagaggaaggaaaatatgctccgtaggtggagagatttgggttccagttaggactttcctgttctagatttgtgaccttgaacaagttaccactgagcctcattacaagtggtgatgacaatgtgaagtaggcattattattaaattcacgatgcagatgaagaaaatgaatcctaaaaaagttaaataactagtctaaggtcagtcggccagtgatttgaattaaacttattagcaaggactctcaaaaagaaaatgtgtctaatagagaagcagtgtacctggccctgtctgaccccaggattgggctcttgtccctgccttgtgcactttcctcacttaacaaatgcctgggagcacgtaatcacactggcctcaccctgtaacatcacatgactacatttgaacaaactatattatgaaatagtcattgacctctcccttcctgcctgtaataggtcacagcatctgttcccctactagagacaaccagctattaaccaattcttccctcagctaacattgcttaggcaactactgtgtactcagcatctgctaagccctggaagaatccaaactgaaaacaaaatagtagtgaagtttggtctttggagtctaagacagctgagtttgaatcccagtcctgccatttgccagctaggcaaaattatgttatctctctaagcctcagttttctcatttgtgttgtagatttatatagaaagaagtatttgtgttgtgtttgtatgtatgtgtttgcctgtgtgtgtatatgtcatagtattgtagggaggattccatgagataattagtgcaaaaagtttaagaaggtatgtactgataatggcacagaagagagctcaataagtattagttgctattattattattaagaatgtatattctggctgggcacannnnnnnnnnnnnnnnnnnnnnnnnnnnnnnnnnnnnnnnnnnnnnnnnncacgaggtcagcagatcgagaccatcctggctaacatggtgaaactccatatctatctactttaaaaaaaaaaaaaaatttgnnnnnnnnnnnnnnnnnnnnnnnnnnnnnnnnnnnnnnnnnnnnnnnnnnnnnnnnnnnnnnnnnnnnnnnnnnnnnnnnnnnnnnnnnnnnnnnnnnnnnnnnnnnnnnnnnnnnnnnnnnnnnnnnnnnnnnnnnnnntatctcaaaaaaaaaaaaaaaaaaaaaa

SEQ ID NO: 5258 - DNA, 2843 bp, Macaca Fascicularis
aattgctaccacagaccacagatatcaatgtaacacaaagaacagaagcagctttgaatctaagtgtgatgtgaaagcccagctctaaagttttgagacttgatacctttttaacctggtttgataattgaagacaataccgagaaatattagaagaaagaaattagaagatgaatgcttttggtttaagtcacaatcactaagaagtcattttgaaaaaaatactactttacactatcatccacctattttgcctaaagaaatgacagatgtttcagtaacggtttgtcatataaatagtcctggagatttctatcttcagttgatagagggcctggattttttatttctgttaaagacaatcgaggaattctataaaaatgaagctggagaaaatctggaaatcctctgtccagttcaagatcaagtctgtgtagctaaattcgaagatggaatttggtaccgagcaaaagttatcggattgcctggacatcaggaagttgaagttaaatatgtggactctggtaatactgcaaaaataacaattaaagacgtgcgtaaaataaaggatgagtttctgactgccccagagaaggcaattaaatgtaagttggcctacattgaaccatataaaaggacaatgcagtggtccaaagaagctaaagaaaaatttgaagacaaggctcaagataaatttatgacatgttcaattatcaaaattctggaagataatgtgctcttagttgagctttttgattctcttggtgttcctgaaatgacaactaccagtattaatgaccagctagtcaaagagggcctagcatcttatgaaatagggtacatcctgaaagataattctcaaaagcatatcgaagtttgggatccttctccagaagaaattatttcaaatgaagtacacaatttaaaccctgtgtctgcaaaatctctccctaatgagaattttcagtcactttataataaggaattgcctgtgcatatctgtaatgtaatatctcctgagaagatttatgttcagtggttgttaactgaaaacttacttaatagtttagaagaaaagatgatagctgcctatgaaaactcaaaatgggaacctgttaaatgggaaaatgatatgcactgtgctgttaagatccaagataaaaatcagtggcgaagaggccagatcatcagaatggttacagacacattggtagaggtcttgctgtatgacgtgggtgttgaactagtagtgaatgttgactgtttaagaaaacttcaagaaaatctaaagacaatgggaagactctctttggaatgttctctggtagacataagaccagctggtgggagtgacaagtggacagcaacagcttgtgactgtctttcattgtacctgactggagctgtagcaactataatcttacaggtggatagtgaggaaaacaacacaacatggccattacctgtgaaaattttctgcagagatgaaaaaggagagcgtgtcgatgtttctaaatatttgattaaaaagggtttggctttgagagaaaggagaattaataaattagataacagccattcattatctgagaagtctctggaagtccccctggaacaagaagattcagtagttactaactgtattaaaactaactttgaccctgacaagaaaactgctgacataatcagtgaacagaaagtatctgaatttcaggaggaaattctagaaccaagaaccgctagagggtataaaccaccagctattcctaacatgaaagtatttgaggcaacagtcagctgtgttggtgatgatggaactatatttgtggtacctaaactatcagaatttgagctaatcaaaatgacaaatgaaattcaaagtaatttaaaatgccttggtcttttggagccttatttctggaaaaaaggagaagcatgtgcagtaagaggatccgatactctgtggtatcgtggcaaggtgatggaggttgtaggtggcgccgtccgagtacaatatttagatcatggattcactgaaaagattccacagtgccatctttaccctattttgctgtatcctgatataccccagttctgtattccttgtcagctccataataccacacctgttgggaatgtctggcaaccagatgcaatagaagttcttcaacaactgctttcaaagagagaggtggacattcacatcatggaattacctaaaaatccgtgggagaaattgtctattcacctctattttgatggaatgtcactttcttattttatggcatactataaatactgtacttctgaacatactgaggagatgttgaaagaaaaaccaagatcagatcatgatagaaagtatgaagaggaacagtgggaaataaggtttgaggaattgctttcgtctgaaacagacactcctcttttaccaccatatttgtcttcatcgctgccttccccaggagaactctgtgctgttcaagtcaagcacgttgtctcacctaatgaagtgtatatttgccttgattctatagaaacttgtaaccactctaaccagcatagtgacacagatgatagtggagtcagcggggaatcggaatccgagagccttgatgaagcactgcagagggttaataagaaggtagaggcacttcctcctctgacggattttagaacagaaatgccttgccttgcagaatatgatgatggcttatggtatagagcgaagattgtttccattaaagaatttaatcctttatctatcctagtacaatttgttgattatggatcaactgcaaagctgacattaaacaggttgaaaataaaaaaaaaaaaaaaaa

SEQ ID NO: 5259 - DNA, 758 bp, Macaca Fascicularis
  misc_feature (1)...(758): n = A,T,C or G
acatgatgtaagcaaaaatcattattttnnntattcannngaagtaagttatggcttaaaatgctttcggagttcatttctnnnnnnnnnnnnnnnnnnncatgagcttcagtttgttttctggtttaaaaaataaaaaggtttctcttaacagtatttccagtgacaatgcaaggtaagtatatcaaaggaaatcaacaactgtgcttgggggctttttgttatgggatattgatttctttttcttgttttttttccnnnnnnnnnnnnnnngcaatttaaataaaaaattacgacattttaagatatttcgtagacagaccaaacaaaaatatgtttttattttaaagtgaannnnnnnnnnnnnnnnnnnnnnnnnnnnnnnnnnnnnnnnnnnnnnnnnnnnnnnnnnnnnnnnnnnnnnnnnnnnnnnnnnnnnnnnnnnnnnnnnnnnnnnnnntctttgctgcgtttatgtaggnnnnnnnnnnnnnnnnactcacttgtaattgtgcctcagactttttgaaagtctaccttctaaattgcccagatgnnnnnnnnnnnnnnnnnnnnnnnnnnnnnnntcttgtgctttctgtatttaaaactttggctgtactaagcaaatgcaaggttataatttagctaatagtagtttacagacaattctgatgattatgatttcatttggtttaactaaactgtactagttcatttcataaggaaatgatactgtagacaaatgtaaataaagc

SEQ ID NO: 5260 - DNA, 681 bp, Macaca Fascicularis
cccaaatcacacccaaaacatactggggtgaaacaactgacagaggctctctgtggcgaacaactgaccgaagtcgccagtggaaaagttcctgataattatttccgcaaggaccctgaatttcctggtcaccatggcaacctggaagtcccaccgaatgctctcaacaatggggtaccccgaggacattcgcacaattggctgcacagtctgaggcctgaaaagcgtttctgcctaccgttcttgactttctggagcctccttagtgggttcaacagagcagagatttttttaaactgccccctttcttaaacaggagagaaaattgaggtttagtaccaggtggttcaggtcttgagcaaaatccctgtctttgaattcagaatgcttaccccagagccgatcgtgtaaagcctatggtgtatcttaatcgaaacctgtggcccaaacatctcagccaggaacccgggactttaggtgtcacttaatctcttcacatctgttaactacacctatctgcataggaggccccccacatcagtccaggcaacctttttatttgcctggggccatttctcctaaatggaaggagaaaagcctgagcattagaaattgtggcattaatgtctgcaagggctaatggagtgaaaagaatacattattcttttctttttagaaaaa

SEQ ID NO: 5261 - DNA, 499 bp, Macaca Fascicularis
  misc_feature (1)...(499): n = A,T,C or G
atatgtnnnntgcaaaangtgaaaagtaatnnntgacannntngcaacctgctccttttcgatggccaaactgtcagcattagcagatttgggtaagctcgtggtactataacacgtactggaaacctgttcctcatcaccacctaccagattctggaaatgccatcttctagaagacggtggcatttatggtggtcttcttctnaatggaacagtaatttgtgtggatattcctccagcttccagcccnncttgccaaagtcccaggttcacaagccacgcttactatgctgtgtnngantggaattctttcctctctcccctccagtcttctcattggagtgacctgaaggcgtggcttcctccactttttctcagtattactttgccttagttttccccaagagggaaggctggaaatcttaactctgtacccgttgatacttatttaattctgtttctccatagtggttcacaattgaactgaattgagatggtg

SEQ ID NO: 5262 - DNA, 1142 bp, Macaca Fascicularis
  misc_feature (1)...(1142): n = A,T,C or G
aactatgatgagtatgctattttcctgaccaagaaattcagccgccgtcatggacccaccattactgccaagctctacggtaatggcttattactagatgtgcccgttggagttaagggtgggaggacattgatttatggacagtggagtgggtaacggcagggagttttgctttttctttctgacaaaactccagtttggagaaaggtacaatcattgagtctccctggaggaggtgaaattccctttttttgatctctaaaatttcaggcccagagaattacacagcctccaggcccttaaaactaccagtgggggcnnnnnnnnnnnnnnnnnnnnnnnnnnnnnnnnnnnnnnnnnnnnnnnnnnnnnnnnnnnnnnnnnnnnnnnnnnnnnnnnnnnnnnnnnnnnnnnnnnnnnnnnnnnnnnnnnnnnnnnnnnnnnnnnnnnnnnntgggcatagtgcatgtgcctgcagttccagctactcaggaggcttaggcaggagggtcacttgagcccaggaatttgaggctgcagtgagccatgattgggccactgcatttcagcctgggcaacagagcaagaccctgtctcaaaaaaaaaaaaaaaaaaaaaggatcnnnnnnnnnnnnnnnnnnnnnnnnnnnnnnnnnnnnnnnnnnnnnnnnnnnnnnnnnnnnnnnnnnnnnnnnnnnnnnnnnnnnnnnnnnnnnnnnnnnnnnnnnnnnnnnnnnnnnnnnnnnnnnnnnnnnnnnnnnnnnnnnnnnnnnnnnnnnnnnnnnnnnnnnnnnnnnnnnnnnnnnnnnnnnnnnnnnnnnnnnnnnnnnnncaaaaaaaaaaaaaaaaaaaaagggggggaagagtcctccgtggggactcaggagacctgggtgggaacctaggcaggcccttcttcctcttgggagcctgtctttccctaagtgtatcgaatagattcaactgcatcaatagttttcaaattttccataagggaaaatcactgggcaaaatcatttcaggcccttccactccaggcacctggtggttctaggtgtctcctctgcttcctcttgcagggcggaagccgcagctgagggaaactctcctgcaggacttcagagtggttgcccagggtgtgg

SEQ ID NO: 5263 - DNA, 724 bp, Macaca Fascicularis
  misc_feature (1)...(724): n = A,T,C or G
tcccnnnnnnnnnnnnnnnnnnnnnnnntatggctgtgtggggctgtccgaggaggaggcagtggctcgccacgggcaggagcatgttgnnnnnnnnnnnnnnnnnnataaannnnnnnnnnncacggtggctggacgggatgcatcccagtgttatgtaaagatggtgtgcctgagggagccccnnnnnnnnnnnntgggcctgcacttccttggccccaacgcaggcgaagttactcnnnnnnnnnnnnnnnnnnnnnagtgnnnnnnnnnnnnnnnnnnnnnnannnnnnnnnnnnnnnnnnntcccacatgctccgaggaggtagtcaagctgcgcatctccaagcgctcaggcctgnnnnnnnnnnnnnnnnnnnnnnnnnnnnnnnnnnnnnnnnnnnnnnnnnnggcacacggtgcgcccgctgccagctcctcggaggccagacccaggatggctgcaggcaggtttggagggcctcacccnnnnnnnnnnnnnnnnnnnnnnnnnncagcgtggagcacaagtgctggacaggtggcctgtgtgccccgcgtgccccgcagggatggctcaggggactgtccacctcacacctgcacctctcagcctctnnnnnnnnnnnnnnnnnnnnnnnnnnnnnnnnnnnnnnnnnnnnnnnnnnnnnnnnnnnnnnnnnnnnnnnnnnnnnnnnnnngccccctggcatttctgcaggca

SEQ ID NO: 5264 - DNA, 156 bp, Macaca Fascicularis
tcccctcctccagctgttcgtaaaaaagtgatcaccgcgggatgatagtagttgattagttgtgacgattctgtggggtgcgggcggcagaggagaggagattgaagacagcagattacatcatgccgcctgtggtggaggagttattaataatat

SEQ ID NO: 5265 - DNA, 1319 bp, Macaca Fascicularis
aagaattccccagggctaagctcctgtaggtgggtggctaaaggactggcttcggagtcagacagctctcagtgcatgtattctttgagatttaatatgatatataatgctttgaagtttatgtggttgtttttgatgattttattaatgtgcataatagtcctagcacacaatatgtgttcagccaatgttaatcagtgctcacggctacaacaccatgatttaatggcccattcaattttcatgactgtattcctagggtatttctcagtgactcatacatggtagatgttcagtaaatatttgttgatttaattggcttgagtgaatgaaagaagtaataagtcctttcatcttttctttcaagatatttctgcattaaatcatcctcagtatatttttttgaaagccaagtttttcccaaagttcttcatttcctcacctccctctctgccactggtttttcagctgctgggggctacagaccctctctctagaaagatggacatgtgaacataagcactgcattttgcacacgatttccatggttcagagaccacctgaacttctccctctagaggaccctgcttacacacttccattccagggtgtccagcccattgagatggctaagaaatcatatcccactcatctccccaaaatcagcaagctgtcatggaccgtcaaacacagttgctactttgttcctctaatcaaggccacacaagacccacttccaatctacttgtgatttaggggtagcaaaggattaaagcaattctagtattttagattcctatttatagcagaattgtggttttcaaaacaagctaatggaaaaattgttagtaaaaataggttcatttggtcttattgatcatacttgtaattctgaagattccacatgtactttttgtaaccatatttctcttctcttccattctctagttgtgagaaaacccagttgtccaataattgtcaaccttcccttggccttagggaatgagcactcaagacctttctgggccaagtgtggtcactgactcctgtaatcctagcactttgggaggccgaggagggagagttgcttgagcctaggagttcaagactagcctgagcaacatagcaggactccattgctacaaaaaataaaaaattagccatatgtggtggtacacccctgtagtccccagctactcgggaggctaaggtgggaggatcacctaagcccaagaggtcgaggctgcagtgagccatgattgcactgctgcagtccagcctgaccctgtctcaaaaaaaccaaaaaaaaaaaaaaaaaa

SEQ ID NO: 5266 - DNA, 748 bp, Macaca Fascicularis
  misc_feature (1)...(748): n = A,T,C or G
agccgcagcctgtcagagctctgcctggctgtcccagccccaggtattaggactcagggctcccctcaggaagctgggcccagctggaattgccggggggaccctagccctggcggtggtcctaagctagctagctgcctggccagggaacctgcaggctcccacaggaagaggtgtggagacctgccctcgggggcctctcccagggtccagcctgagcccccaccaggagtctccacccagcacaggaagctgaccctggcccagctctaccgaatcaggaccaccctgctgcttaactccacgctcactgcctcgtgagtgnnnnnnnnnnnnnnnnnnnnnnnnnnnnnnnnnnnnaccaagagacagtagacagcctgcctcatggggcgtgccggcacctgcttcagtggctgcctcctgtgtgcatgagccggatgctgggaaggatccctgcctacacccgggcccgattcnnnnnnnnnnnnnnnngatggagtggaggaggcccaggccacagtaccacctgacctgcccaggcagcccctcgtcacctactccccgaagttaacagctcaactcgaatccagggctgggctcccaggctacccatcccacttctaccctcactggcctccagtgggactcgctcctgcctcgcccccaccttcccagtcccacaggccacccctggcttgggctaggttctgtaaagttacgtatttattgagcttttgtcttttaa

SEQ ID NO: 5267 - DNA, 754 bp, Macaca Fascicularis
  misc_feature (1)...(754): n = A,T,C or G
tgaggtccatacttcagattggtnnnnnnnnnnnnnnnnnnnnnnnnctgataatannnnnnnnnnnnnnnntcctcaataaggagatggactgtgaaaagagatgagaaagcaggcctgtttgcaaggctggcccttggctggcannnnnnnnnnnnnntttcaggagggttctcattaatccctaaatgataagagtggttcactgtgcctaaactgtttgtacaatgtggattatgcccgacatctgccttccttctgcgagtcttggattttcatatgtgttaggcagaggatgaagtgaccagctcccaatcagagccctgaacactgagtctgtaatgagcttcccttgtacacnnnnnnnnnnnnnnnnnnnnnnnnnnnnttgctggaggaattgtgtcctgtgtgactctgctgggagaggaccgtgggaggcttgcacctggtttccctgaactttgcccatgcacttttttcctttgctgattttgcttcctagccttttgctgtagtaaatcatagccataagtatgattacaggctgagtctgtgaatctcctagtacatcatcagactaggaggtggtggtggcacccctggcacagggcacaagggagacttgcggggtgtttgtcatgttctctttctcagtctgggtgtggnnnnnnnnnnnnnnnnnnntgtgaaaattcactgagctctgtgtacaattatgatatgtacatttttttctgtaagtatataaatc

SEQ ID NO: 5268 - DNA, 518 bp, Macaca Fascicularis
acacttagaaatatggtgtatattgtgtgttttaaaatagcggaggggggcgttatagatatgacttgtggaggataatgtagtattaaagggagagtaggtgtgggagtatatgtaaccgggtattaaaaacacaggcataaagtgggagaagagcttcaagcgaactgaaaatatctttagaaatatgcaaatcaaagaggcgttttaaatttctatcttagcaaaaaagagggttttacaataattcaaaaacataattcaggagttgtgtaggtgaactttttaatgtgaaatacaactatacacaggatcacttactctgaattttaaaaaatgttatttttccctctttctttccctccatctcgcccctctttttttcaatatttcatagcgctaattgaacaagttatttacagtagatgtgaaaagacattagctgtcatatgaagatttcaatgtgaaatagccagcattttcttcctgtaaagtatttaaatatgtttttaagtatt

SEQ ID NO: 5269 - DNA, 735 bp, Macaca Fascicularis
  misc_feature (1)...(735): n = A,T,C or G
cacgatgtgcggactggaagagtatgtnnnnncggactcattatggggaaataaatgagcagtagaaaatgtgaatgacgggcaagaaggttgtatttctccctcaagtcctaattcagctctagagttcatggaaattcacaacttcagagtgtggcctaaggattattttgttggtcagcctttccaagaaagtaaatcaccatctgctctcccaagttcttctggaaagagcnnnnnnnnnnnnnnntcctaacagcgatgccatgaagaaagggaggcaactccctccatgtcctggctccagtgcccactcctgtgtcccctccacggcccacacagcctggccacctgggtgacatctggtgcctgtgtcactttctgcaagacaaggaccagcctcaaagaggagagcatgttgttctgaaggagatggnnnnnnnnnnnnnnnntcctgtggctttcctctgactgcccaggtgggggcccagtggcggcgcctctcnnnnnnnnnnnnnnnnataatttccaggcttccctgcagttttctcctccccatccctgaactgtttacacagcagctctcacccacagagagtccgtgtgatggcttttcctctgtttggaagatgtggatggctgtgtcccaagtttttcctacctaagatccttttcagtaggggatggattcggcctatctgatgatcaagagatcagggtggcnnnnnnnnnnnt

SEQ ID NO: 5270 - DNA, 354 bp, Macaca Fascicularis
gagagtgtgaagtctctctggagagagagtggttctccacggcagcagagcccgtgtgtgtgcagcagatatgtgtgggcctgggggttggatgcgtcacatggagataagcactgacccgagctctcacatcgctcttttttacctcttgggccgggggtctgactctcaacatgtgtaggagaggtttttccctctatcgcgccgtgggccggggcccccgaggggtgttctgcgttagtaagattgtctggtttgcccccctctcccgttgccggtgtgcgggcagcattagccacccccctccatctgtctccagcactggagaaaggggtgctctgatggaggtgtggg

SEQ ID NO: 5271 - DNA, 724 bp, Macaca Fascicularis
  misc_feature (1)...(724): n = A,T,C or G
ctgtgaccatgatgatcaagatgcagctcttcatgtttttatttatttatttatttattttggagggaaggagagacatcagctgnnnnnnnnnnnnnnnnnnnnngtgggacaattgctttttggagacgtgaatagctgtactgtacgtattattttgtgtggtatgctcacttcgagccgggcactggcctaatcaagtctttgtaatcctcccagcaatccgatgaggcaggcgcagatagtaaagttttaggctnnnnnnnnnnnnnnnnnnnnnnnnnnnnnnnnnnntttttaaaactgtcaatacattcttagctcaagggctgtacaaaaacaggctgcagacgggatggtgcccacaggccatagttagctgacccgggctagggtgtaggcacttagcattccactgtataaaggggaaacccaggtcatactgcgtgtgcgtgggtgggaagccggatgtggaatacaggtggtccctgagtcgccaggaaccactgagctccagctgttcacacccacactctccggcgcaagcaactacctcgccatggtttagccttggtctagccgcaactttaaccttgaatgttgcatttctgaaaatttagaatnnnnnnnnnnnnnnnnatcccttcagtgaataaaattatgtgcaattatagaatacatgtgttatggtcacgtagcaatgactgtattagggctatgctag

SEQ ID NO: 5272 - DNA, 748 bp, Macaca Fascicularis
  misc_feature (1)...(748): n = A,T,C or G
gcagaaacaggaaattctggatctcntnnnnnnnnnnnnnnnnnnnnnngttannnaggagannncagagatgttgcctgcatacatagcaatggatcaggctataagaagacttgggagaagagaaatgtctgagacttctgaactttgnnnnnnnnnnnnnnngttnnnnnnnnnnnnnnnccgaagccatcaggagcggctgcagaaccaccctaagcgggggctctttatgaactcggaattcctccctgttgtgaagtgcaccatcgataataccctggaccagtggctacaagccgggggtgatatgtgtnnnnnnnnnnnnnnnnnnnnnnnnnnnnnggaggaatcnnnnnnnnnnnnnnnnnnnnnnttcctcgtctaccacnnnnnnnnnnnnnnnnnnnnnnnnnnncctataggactagaagggagcacgagcttnnnnnnnnnnntcttcaaatttaagnnnnnnnnnnnnnnnnnnnnngctttgctgagattggctcctttgcttnnnnnnnnnccacagccaannnnnnnnnnnnnnnnnnnnnnnntgaacctaccctgagacgtgacttctgcacaaaaacgtgaccaaacatcaaagctaaagcaatgtttataaagttttatggtataactagggggaagtgagctgcacaaacctcagtgtattttaaatctgttcctgnnnnnnnnnnnnttatatgatacgtaaaagcaagtcacaatttacttt

SEQ ID NO: 5273 - DNA, 717 bp, Macaca Fascicularis
  misc_feature (1)...(717): n = A,T,C or G
gatgaaggtaaagtgaataaagaatagctgagatttctgggccagaagcctcgtgttgtaacaaactaaaacagatcaaagttcaaatttcaactatttcaattcctgtggagtttggacaagttgccctttgagcatctagtcctgctttggcaaacaggaaatagtaacgtccatattgtaggagtgttaaagaggtacataactgaaagagacttaattctgaaccaagctgaatgttaaaccataatcgtgtttaaaaaatgaaattagtttggtataaaaattgcctccagaaatgttgtataagcttggtttgacaaatatatacagaactctggatcccacagagaacacgcattcatttctaggacacgttgaaaaagtttataaaaattgaaaacannnnnnnnnnnnnnnnnnnnnnnnnnnnnnnnnnnnnnnnnnnnttatattttgaaaatatgtgttttggccaggtgcagtggctcacacctgtaatcctagcactttgggaggcggaggcacgtgaatcacttgcagtcaggagttcaagaccagccnnnnnnnnnnnnnnnaacccccatctctactaaagatacaaaaattagccaggcgtggtggcatgtgcctgtagtcccagctacttgggaggctgagagaggagaatcgcttgaaccaggagagggatgttgcagtgaactgagattgcaccac

SEQ ID NO: 5274 - DNA, 729 bp, Macaca Fascicularis
  misc_feature (1)...(729): n = A,T,C or G
cgccgatgacagttattacactgcccgctcagcagggnnnnnnnnnnnnnnnnngtanncccagcaccctgtgtgtgggcagctgtgcctcttaggctgtgtggcatcgagctacggggtcaccatgtgggaggccttgtcctacggccagaagccttgagcagaagnnntgagggccggaggtctacctcagccaannnnngggcaagcggatggagtgcccatcagagtnnnnnngggtgtggtcagcannnnnnnnnnnncccaccccctacaagtgnnnnnnnnnnnnnnnnnnnnnnnnnnnnnnnnnnnnnntgcgggcctgttactacagcctggccagcaaagcggagggctccccgggctgcgcgcagaaggccgaggctgcctgtgcctgagctcccactgcccagggcctgcagccctccacgccggctcttcccctgcctcggccccaccccaggccctgcagcccggctgagccctgcttggttgtctccacacacagctgggctgtggtaggggcgtctcaggccgtgctggccttgcatcccctgcctgacccctgtcctgtctggctgcggagcagggaggccccggaggctggggccgtgcagcctgggctggtggctcccggagggccctgagctgagggcgttgcttacacggacgccttccnnnnnnnnnnnnnnnnngagcctgggtgtcctcggtggtcaggtgtag

SEQ ID NO: 5275 - DNA, 632 bp, Macaca Fascicularis
  misc_feature (1)...(632): n = A,T,C or G
acttctgctcagatttccttaaacnnnnnngtcgtgttcatcctactctccatcccactcaatatctcctcctggatcccctggggctgcctgatgctcatctgtcaagtgatgcccccagctgaggaataaggagacccatgtcctcaggagggagggtcacgtgatgtaacgagctccatctggatccctggagaggacacacgaagacgctcagtgagtgtcgggggatgcgtagtccctgacacgtgccctgataactttgagtatttaaactgatttcttcccactgatgtctcttttgcttcttcatggattcccacactcccagtcaggactcaccccgctggctccaacactctcacctgctggcttccccaggagtccagagcactaaccaggctccagggaagaggacagagtgaatgccttttgtttcattctcctttacnnnnnnnnnnnnnnnnnnnnnnnnggcatttgtttttcaccatgtcttccctctctcattcatcttatttttctaaatttttttccaatttcaatggaccagattataacggtagcgacaataacgttaattcaacatcataccacataccctatgtaatttcttccaatagatttctata

SEQ ID NO: 5276 - DNA, 705 bp, Macaca Fascicularis
  misc_feature (1)...(705): n = A,T,C or G
tgggaaaatcannctgcccatctagcaactgatgcagagctggctcnnnnnnnnnnnnnnnnnnnnnnnnnnnnnnnnnnnnnnnnnnnnnnnnnnnnntcttcttcatggacacaaagattcatgctggaatagaaaatgttccaatcnnnnnnnnnnnnnnacaatcagggtacttttttggaaatgcaattggaaatagaatgggagcttcttttctgaatggatattaatgaaagcagggtaggagcttatagctgccagtnnnnnnnnnnnnnnnaggagaggagaccgaacctccttgagaaaggacctaacacaacaaaggaagagctgataaatgaaaagaaactgagacctnnnnnnnnnnnnnnnnnnnnnnnnnnnnnntttgcctaaacctgaatactccaagatttttcattatataaatcaataatttatnnnnnnnnnnnnnnnnnnnnnnnnnnnnnnnnnnnnnnnnnnnnnnnnnnnnnnnnnnnnnnnnnnnnnnnnnnnnnnctcttccttttttttttaatttagttattccaaataggaacaaatcaaagaagatcaagttagaaagcaaagnnnnnnnnnnnnnccaaacggaaaagctttgaaccnnnnnnnnnnatcaaggtgtgaattttcttcagatatttttatgagcattcaagatcaagctagtatggtctcaga

SEQ ID NO: 5277 - DNA, 786 bp, Macaca Fascicularis
  misc_feature (1)...(786): n = A,T,C or G
ctctctggtccgtcaagcatatctgctcnnnnctnnnagtgagatagagcatgcgccaccatgcccagctatttttgtatttttaatagagatgggatttcaccgtgttcgtcaggctggcttgaactcctgaccttgtgatccgcctgcctaggcttcccaaagtgctgggattacaggtgtgagccaccatgcctggccaacaataatacttatatattaaaaggcgaaatgctacaggggtttgtatttggtagcagttaagtagacagggataaacagacaattggaagacaactctttattgatttcttgcctttctgcatatcttataagtaaagccgtgactgcctgttactttagactgtcttttcaagaatgtttatctagtgagcagccttggaagataatgaaagtattttcctccttaggaaaagaaaaggcagtcattcttgctgtccattataaaatatttgggttccctaagctcaggactcttctgtattgcaactcactgttttttgtaggcatttccctggacttgccttggtatggataagataatttagataactagaaaagctaggagagtatttagaacatgtaggattctccaaactgatggctttacaaatgttttaaattttgcttcactttaaagaactacccgtagagctctcagacccgtgtattatagctgtggtttaagcaaggaagataagtaattctaattgacagatttatactcagtgataaggccttccatcaaaagattggagatatatg

SEQ ID NO: 5278 - DNA, 689 bp, Macaca Fascicularis
  misc_feature (1)...(689): n = A,T,C or G
gggcagaaattcatggaagatatgatgccaaaggtaaaagaagtatttgatnnnggggtgagacttttaccgtgtgttcattcagtaagcatttatagaaaggcttgtatatttaggcataacctgttctgaaggtgaggagatggggatgcttacagatcattctgatacagtatataataaatgctgtaatagagttctgatttgaaaatcagagaagtattacatctttatcttgaaattttctctttctttgagacaaagtcttgctctgtcacctgggctggaatgcagtgatgcagttagggttcattgcagcctcgacctcgtggactcaagagatcctcctgcctcagcgcccnnnnnnnnngggactacaggtgcacaccaccatgcccagctaattcttacatattttaatagaggggaggcctcactgtgtacccaggcnnnnnnnnnnntcctgggcttaagctgtcctccctgcttggnnnnnnnnnnnnnnnnnnnnnnnnnnnnnnnnnnnnnnnnnnnnnnnnnnnnnnnnnnnnnnnnnnaannngttatctctgtaacctttaaatctcttggaagttgtcattgactattgaggatttgtctgtcttctttccatgacacacagtctctataaagacattacagannnnnnnnnnnnnnnnnnnnnaaag

SEQ ID NO: 5279 - DNA, 729 bp, Macaca Fascicularis
  misc_feature (1)...(729): n = A,T,C or G
caatttgaatattcctccctgtcctnntgcattataggacaaaaatatatgttcagagtttgacagannnnnnnnnnnnnnnntcccaattttaagtatttttggttctgcgtgcatagatttatcaatgaagtacatttgcctctgactttatcacaaggaaaaaggaatcaaacattgaacacaaatgtgttccaaaccagtcttgtccatcttgtcacttttatgtgactgctcctttgaaccagaaggggcatgatagaaggcaataggaattaaagtaaaaatcattcaggggaagtgagaaattctaccatatacagagtgaaaatgtgtgatttcattcctgccttcctttaaaccttgtgtcttgatctctgcctagtagtagttaagcccacagtcgcccaaacatgaggagagacccaactccnnnnnnnnnnnnnnngtatttacatttgccttcccaagttgagaatagaatgtggtgttctgtactttctgtttttattattctgaaatatttttttaaagaagtgttatttttcaacagattcataaattagttcctgatgtatgggaaattaaaactcccactgtgtcagtcaaactgatatgctaatttcataaccactcatttctagtccgtcagagctgtactggtggcttattgctgggttttaaaggtgtttttaacttacatataagtgtttttttttttctaatttg

SEQ ID NO: 5280 - DNA, 825 bp, Macaca Fascicularis
  misc_feature (1)...(825): n = A,T,C or G
gcgcctgcgccgtgccccacggggggcggggctcagattcctgtcagcggcggcggcggtggcggcgaccgtcagttttcgctgaggagaagcacgaaacggaccctttggctctctcccttccccttccccgccctgaaccctctcctggccaccgagaatcagtccccgtggagttcaccctccacctcgccatcgtttcctcggtcctcggcccggtggaagtcactaccctcgaggaggaggcagctgcagccgccctcgcctcgtcgcccccggttcggtgcccgcggtctcggagaggaggtgccgccgccaccgccgctccccccctcccgctgccctcgggccgggctgggtcgagctgcgatgccctcggacttcatctcattgctcagcgcggacctagacctggaatcgcccaagtccctgtactcgcgagattctctgaagttacacccatcacagaattttcatagagctggactattggaagagtctcactctgttgcccaggcttgagtggagtggcatgatctcagctccctgcaacctccgcctcccaggctcaagtgattctcctgcttcagcctcccaagtnnnnnnnnnnnnnnnnnnnnnnnnnnnnnnnnnnnnnnnnnnnnnnnnnnnnnnnnnnnnnnnnnnnnnnnnnnnnnnnnnnnnnnnnnnnnnnnnnnnnnnnnnnnnnnnnnnnnnnnnnnnnnnnnnnnnnnnnnnnnnnnnnnnnnnnnnnnnnnntgtacctggccataagttttaataaaattatattgtgaactccaaaaaaaaaaaaaaaaaaaaaaa

SEQ ID NO: 5281 - DNA, 2424 bp, Macaca Fascicularis
aggctcgtccccgagtaggggacgggaacgcatgggtcccggggacttggggcgcagggtctggggcccgagaccacgggcgcagcgggcagccggctaggcagcggtctctgggatggacgccgtgccctacgcggagcctcccaccccgacttcacccatctctgctgcccgcaacttatatgacaagaacatctggaactggactattataccgaaagggcctacccatgtcttttcgctgccagcaaggcccgactccgggccgcgcgtccccggcaaccgcgcccgcccacgcagctgcagaggccagagaaggcctgctcgcccgcgctcggcgccacccagcccgcgctccgggcgataccaccccgggcggcccctctaaaggccgggagatggtgtcgtccccggcctccgattggtctgcggggcgggggcgtggcctctggagcctggttccgcgcgccggagcgcgctagccgcattgcgagccgaacccgggagcaggcgccatggtgctgttgcacgtgctatttgagcatgcggtcggctacgcgctgctggcactgaaggaagtggaggagatcagtctgctgcagccgcaggtggaggagtccgtgctcaacttgggcaaattccacaacatcgttcgtctggtggccttttgtccctttgcctcgtcccaggttgccttggaaaatgcgaacgccgtgtctgaaggggttgttcatgaggacctccgcctgctcttggagacccacctgccatccaaaaagaagaaagtactcttgggagttggggatcccaagattggtgctgcaatacaggaggagttagggtacaactgccagactggaggcgtcatagctgagatcctgcgaggagttcgtctgcacttccacaatctggtgaagggtctgactgatctgtcagcttgtaaagcacagctggggctgggacacagctattcccgtgccaaagttaagtttaatgtgaaccgagtggacaatatgatcatccagtccattagcctcctggaccagctggataaggacatcaataccttctctatgcgtgtcagggagtggtatgggtatcactttccggagctggtgaagatcatcaacgacaatgccacatactgccgtcttgcccagtttattggaaaccgaagggaactgaatgaggaaaagctggagaagctggaggagctgacaatggatggggccaaggctaaggctattctggatgcctcacggtcctccatgggcatggacatatctgccattgacttgataaacatcgagagcttctccagtcgtgtggtgtctttatctgagtaccgccagagcctacacacttacctgcgctccaagatgagccaagtagcccccagcctgtcagccctaattggggaagcggtaggtgcacgtctcatcgcacatgctggcagcctcaccaacctggccaagtatccagcatccacagtgcagatccttggggctgaaaaggccctgttcagagccctgaagacaaggggtaacacaccaaaatatggactcattttccactccaccttcattggccgagcagctgccaagaacaaaggccgcatctcccgatacctggcaaacaaatgcagtattgcctcacgaatcgattgcttctctgaggtgcccacgagtgtatttggggagaagcttcgagaacaagttgaagagcgactgtccttctatgagactggagagataccacgaaagaatctggatgtcatgaaggaagcaatggttcaggcagaggaagcggctgctgagattactaggaagctggagaaacaggagaagaaacgcttaaagaaggaaaagaaacggctggctgcacttgccctcgcatcttcagaaaacagcagtagtactccagaggagtgtgaggagacgagtgaaaaacccaaaaagaagaaaaagcaaaagccccaggaggttcctcaggagaatggaatggaagacccatctatccctttctccaaacccaagaaaaagaaatctttttccaaggaggagttgatgagtagtgatcttgaagagaccgctggcagcaccagtcttcccaagaggaagaagtcttcacccaaggaggaaacagttaatgaccccgaagaggcaggccacagaagtggctccaagaaaaagaggaaattttccaaagaggagccagtcagcagtgggcctgaagaggcagctggcaagagcagctccaagaagaagaaaaagttccataaagcatcccaggaagattagaatgcaaatggacattctctgggaggtgggacataccatagcccaaggtgacatcttccaccctgtgccctgttccccaataaaaacaaattcacaaaaaaaaaaaaaaaaaaaaaaaaaaaaa

SEQ ID NO: 5282 - DNA, 745 bp, Macaca Fascicularis
  misc_feature (1)...(745): n = A,T,C or G
cctnnnnnnnnnnnnnnnnnnnnnnnnnnnnnnnnnnnnnnnnnnnnnnnnnnnnnnnnnnnnnnnnnnnnnnnnnnnnnnnnnnnnnnnnnnnnnnnnnnnnnnnnnnnnnnnnnnnnnnnnnnnnnnnnnnnnnnnnnnnnnnnnnnnnnnnnnnnnnnnnnnnnnnnnnnnnnnnnnnnnnnnnnnnnnnnnnnnnnnnnnnnnnnnnnnnnnnnnnnnnnnnnnnnnnnnnnnnnnnnnnnnnnntgtgcccagcctaagaatgtcactttctaacaggttcaagaactccgtttatcttgggaccttaagagaagagaatcactcacctcacaggcatttgaggatacaaacccgtaactgggcttggttttaaaaggtcttatctgagactccttgtgaaacagagttccatcaaagccaatccaaaaggcctacgtagaaataattattcttcttgcactttatgcaaataatcagaccaagtgtaagactacaatctattttgccaacaactcagtccgatcatgatttatgttttttattgttgttgtttttttgtttttgtttttgttttccaaaattgaggactggagagagagaaattgtgtttcaaaacttatcacacatttgccattaaattctaaactcattagttgtttttaagtttttacctatattttagatgaaccttgcttgttcctgtgaannnnnnngcagctccagctcagctcnnnagtac

SEQ ID NO: 5283 - DNA, 691 bp, Macaca Fascicularis
  misc_feature (1)...(691): n = A,T,C or G
tacttagtcaataaattacatgttaattcggtgtcagtataagctaaatgcacatattgtagctaaaactgaaacatcctctaaaaattaaaatgattgtacagacagggcacaacagaaattgggaannnnnnnnnnggctaagggcatatgatttgtttactaaggagaaaaaagttctttgaacaaaacgtaatgtggaataaaaaccggtctcacagttatgttctgagaccataacttcgaggttaannnnnnnnnnnnnnnnnncccttcagatattttagagttatacattgttaaaatgtatattccatagtaataacagcatgctatgaacttccctacagatgggttgagaaaatatatcatttacattctcatgttgtaagagaatgaccattattacacttcagtggtcatttaccatacagttttatcagtaaactatctttgtgtatccccaagtggaacaactcaaagtatagataacaatgttgagctatatggactaatacttatgaataaagacttcaacaaaagaaaataacttattcctaatcctatggcccttagaataagcgcctgtcttcctcaaattgattaggcctggtacatggggcagaatattgtcattagtgaaagccaagatttacaaaatatacctaagacattctggtaataaaatgtc

SEQ ID NO: 5284 - DNA, 788 bp, Macaca Fascicularis
  misc_feature (1)...(788): n = A,T,C or G
gannnnnnnnnnnnnnnnnnnnnnnnnnnnnnnnnnnnnnnnntnnnaagctagtggggnnnnnnnnnnnnnnnnnnnnnnnnnnnnnnnntcccctttgcagggtggtgatgggcatcaaacatgacatatgtaacatgtccccttcttggaggatttccatctaaannnnnnnnnnnnnnnnagggaccagtagctcaggggtgatggacttttttgaatgtctcctaatttctctcaggtgtctttggctctnnnnnnnnnnnnnnnnnnnnnnnnnncatcccagtagttgctgaaagggaaacagtgtattgcgtagtcaggtgtgaggagtagagatctnnnnnnnnnnnnnnnnnnnnnnnnnnnngatgagaggacccagtggtcagcttatacccannnnnnnnnnacattcctcaaagagtttgagtcccatagctgattaaacggtttacatatgggctccccccctgctttcctacttaaaatctattctctcatattttgggaaggagcatgtggctttaactttcaatggtannnnnnnnnnnnnnnnnnnnnnnnncatggattttggagtcagatatagttggttcgaatttatagcttcactgctttccagctgggtttgactttggttgatttacttaacctctctgagcctcagtttcctcaactataatgacatgggtggagggaggcatgttgaaaatatctacctnnngggttgttggagtaacggaaacaatgtttgtaaagctttagnnnnnnnnnnnnnnact

SEQ ID NO: 5285 - DNA, 764 bp, Macaca Fascicularis
  misc_feature (1)...(764): n = A,T,C or G
gtctagattcagttatgnnngtaggcattagttaaaattaacaagatgcagagtattaatttcttaagacaacaaagtgatttctgtaagtttgagccctatgtggaaagcattgtggaatcttaacctttttgtacacactcttgtgggacgtatcatataaatgtcagcactaagtaatgtcttgtttgtggctgaatatttttcgtagatgtttttgaagttgacatgacttacgtgcatttaaatatatattgccatccttagtttgtaattaagatttggaatatggttgtggatttctgagcatgtgcagactggtctagctannnnnnnnnnnnnnnnnnntatttttcaaagataaagaaagtgtactgcgaaaatatgcaggaagattaattttgtggcagttttctaaaactgacaaccaggtgggaccaaagtttatgtgcctttagtcttaatttaccttgcattgtaatattcagttttaataaatcttcaaaatattttgtatttaggaatagatctgactttaataaaaacatggctcagaatctacaggtcaaattaatttgaacagttcttgtcaatctgaattgttgattctgtttaaatgaccaatactttttgaaattgatgtacttagtttcaagattcatagattctgttatctatgtagnnnnnnnnnnnnnnnatattttctattagttgagtttttacatctttacgaaatgtcaaaattcagtatnnntgaaagcggc

SEQ ID NO: 5286 - DNA, 655 bp, Macaca Fascicularis
  misc_feature (1)...(655): n = A,T,C or G
agcatgtgatgttatctttattttatatatcagccattctgataggtatataataatatctcattgtggcttaatttgcatttcactgataaatgataatgttgatcatcctctcatatgcttatttgcaatatgtatatcctcaaagtgaaatatttgtttaatgcttttttccctattttctaaccggtttttttttctgttacattttgggaattctttatatattctagctacaactctgtgtcagatacctggtttttaaacatttactcccagtctgtagtttattatttgatcttcttaacaggatcttttacagagcaaaagttttaaattttgatgaaatccaatttgtgtgtgtatgtgtgtgtgtgtatgtgtgtgtgtgtatgtgtgtgtgtgtatgtgtgtgtgtatgtgtgtgtttgtatnnnnnnnnnnnnnnnnnnnnnnnnnnnnnnnnnnnnnnnnnnnnnnnnnnnnnnnnnnnnnnnnnnnnnnnnnnntgtgtgttgtgcttttggtgtcaaatctaagaactctttgcttggctctgcaaaatgaagattatctttattttttccaaaagtttcagagtatagcgttttacatttaatttcatgattctctttgaatttatcttttatgatgt

SEQ ID NO: 5287 - DNA, 740 bp, Macaca Fascicularis
  misc_feature (1)...(740): n = A,T,C or G
catgtttgaacttgactcttgttaacctgtgtagcctcagnnnnnntgtttattcagtggggctaatgatacttgcttgagttattgtaaacattaaatgggatgatgtatgtgaagtgcttagcttggtgcctagcacagagtaagtgctcaatatgtggtagttgtcattattactattttagatgatcttattagacttacacatctaattatagaaatatgtagatttgatagaattttattttcaggcatgaagaaatattctttggaaaagctaaatttttggcgactgacatataaagatttacttgctcatattaactaaaaattatagtactctccaagaattaatgtgtcctaaaaattttcctctgaaaactgatccttatcatgtgataatgaagaacatttgatttcttgaaaggaaactgctgtaggcagcatctgggaatgcaaatcttcaatcacatttctattctcaaaggcttggagaagtctataatttacattcagacttcaatgcaaattttatattgtgaatttcacatttccaaaaagttactttaaaaagactttaagacagaaaaaaaagtttatcaatgctaataattttctaatatgcaaatggacatgtgatgcctataaaacacaaaaagtttctctgaaaacaattttgttcttatttttttcttcagtttactgagaatggcatgtgtttttactttgtatctaagcat

SEQ ID NO: 5288 - DNA, 831 bp, Macaca Fascicularis
attggtgcagatggaatgcttgattttccaaaaacatctcttctggaacttatgatagaaagaaaaaatgttatttctgtggatgctgctgtgaaatttataaaattagcttttacctatgaggagtggagtttatttgaatcttctgctgcacatattatttattttctccagaggcaggatgatccagagtcaaagaaagcagagaaggatttaactcttctaattgcaatggaaccactaattaatgtaaagagaaacaaaggtttgatctttcctttggaaaactataaagaaggacagtcggttcaaatttatttaaaaaaaattgctgttcatgatacttgtttgaagaattgtggatattcagaggatattttccatttggcagcaaccttgtatttctgtgtctgcactgctccccaggatgttcaacctgataaagaaattgttgtggacacgataatgttcctatggcagaaatgcaaattaggaattcagcggctcaatatatccagaaatgactatgtaaaattcacccagaaaatcagtacaaacaaagtattccttttgcatttcctttcacatgttttttgctattgctaattcaagttgccatacacatttcaaatctaattttttcctatttttcacctggttaatgactttcatttgcatatatacatatataaagaagatattctttctaaaaaaaaaaaaaaaaaaaaaaaaaaaaaaaaaaaaaaaaaaaaaaaaaaaaaaaaaaaaaaaaaaaaaaaaaaaaaaaaaaaaaaaaaaaaaaaagaaaaaaaaaaaaaaaaaaaaaaaaaa

SEQ ID NO: 5289 - DNA, 962 bp, Macaca Fascicularis
  misc_feature (1)...(962): n = A,T,C or G
atgaagtnnncannnnnagagaaggacccagcatnnccctggcctcnnccttgtgctcattcgagttccagctgacacgtctnnnctgaatcctgctcccaatcggaagctgtcccgcagtcaagctcctccactctgtcctgttttcttatgaatgtttgctctgcccacctcctcccagacgactgtgagccccataaagacannnnnnnnnnnnnnnnnnngtctaaatcaccacgtgagtgttcagtaaaggtctgttgaataagtnnnnnnnnnnnnnnnnnnnnnnnnncttataagggcttgagggaactgttggtatgacctcaccacactgtggccacagcctcactactgtgctgccttctctggggtccgtccactcacacggagcaatgatggagctcagcaccccaccgcttaaccatgaggccgcacatcctcacatcactcccaccactttcctgaggccagacaccagcacgtcgcagtgccgagttttgagtctgaggctgagagaggagacacagcaccttcactaatgacctggaagatggacagggtggggaccaagaatgattgatgtttggaggtggagagcctgacagtggtgcctggaaagnnnnntcaccttgtgaataataaatataattgggcttcaatgtatttatcacccttctcccaagaagggcaatgttggagagaaaatggtccatgttacacagaataatgaagaaaagnnnnnnnnnnnnnnnnnnnnnnnnnnnnnnnnnnnnnnnnnnnnnnnnnnnnnnnnnnnnnnnnnnnnnnnnnnnnnnnnnnnnnnnnngttttaaggagcccccagccttcctcctttctggtcttgacaaggnatattgnnccatcttcccttggccacacgccctgacaagtactgcacagggacccccacccaggggccctgctccatgagataa

SEQ ID NO: 5290 - DNA, 818 bp, Macaca Fascicularis
  misc_feature (1)...(818): n = A,T,C or G
gatcagtaaatcccaatccacctgtaaatcaccaagccttacccgannnnnctcccggaagagaatgaggagatgggcctttcncactactcatctcagggactccactctccacattccacccaccctgagtgagtgtaaaactttgggaaagtgagaaccctcccaatgggttggggccccgacctggattcttttcaagggactcccagaaccccttcacctcccctcccttcttctgttagtctctctgatgactcctttcctaacctcttctctcttttcttcagggctcagataaaggccactgtgaaacgcaaggtatatgaagattctggcatcccccttccagctgagtcacccaagaaagggcccaagaaggtggcatctggtgtcttatcacctcctccagctgcccctcctcccagcagctccagtgtccccgaggccgggggtccccccataaagaaacagaaggctgatgtgacactcagtgctctgaacgactccgacgccaacagtgacctggtggatattgaagggctaggagaaactcctccagctaagaaactcaacttcgaccaggcctgaccctggattctggccttctcatgacctctgctgatcctcctctcctctcctgctgagccttccacctctgacctctcactgttcacgctggacctgtggatctcctgggactccgagcaaggcctgcacgagagagggctgaaaggctgctggggctgccacctcgctgtgcccgcataagcatctgcccccgacccccttgaccttcatctgatggacatttttat

SEQ ID NO: 5291 - DNA, 587 bp, Macaca Fascicularis
cagagaatcccaatatccacagatgcccaagtcccttgtataaaatagtatataatatgcgcatttcacctgcgcatattctctcatatatttaaaattatctcgagattactgagaatacctaacacagtagaaatagttgttatactgtatcttaaaatttggggtttttaaaaattgctgtattgttatttaaaaaattattttccccaaatattttccatctactgttggtagtatctggggatagggaactggtgaatactgaagggtgagtgtatattatgttatgtctaagtggagtttctcatagagacacatggtaggtttcacattgggaaattagttagtgtagtttaagatctcagaataataagagagaaatctcataggattatcccgggtgtcagagaaaacgcatttaatcacatttcacacccatccatgataaaaactgtcagcactctaaattagaaaggggatttctttaacttgataaagaaaatttcaaaacaaccacaatgcgcaaaaaatgcaaaatataccccacatactttatatgaagagactatatgctttcccctgag

SEQ ID NO: 5292 - DNA, 733 bp, Macaca Fascicularis
  misc_feature (1)...(733): n = A,T,C or G
agggctccagaaggcagggatttccctctattcatggctgtctccccaagcagggcccagaaactgagaactcaatacagaattttttggactccattaaggaagaaggaacagtatggtnnnnnnnnnnnnnnnnnnnnnnnnnnnnngtgctggccaagcgttggtcccagccctggcccaagcagtcttttcagcccgtgacccagtgcatgagtttgcctggtctctccaaagccccttggtcattcagaggtccaannnnnnnnnnnnnnnnnnnnnnnnnnnnnnnnnnnnnnnnnnnnnnnnnnnnnnnnnnnntgtggtggttaatgtggctgggaccgaccctgaccttatgcaggtgagcctgttctctaaagtctgtcctccccttgagaggagacaaagacctctgaactctgtccggacaaggtcgagcacagggccaggtacatgatcaagaggaggcannnnnnnnnnnnnnnnnnnnnnnnnnnnnnnnnnnnnnnnnnnnnnnnnnnnnnnnnnnnnnnnnnnnnnnnnnnnnnnnnnnnnnnnnnnnnnnnnnnnnnnnnnnnnnnnnnnnnnnnnnnnnnnnnnnnnnnnnnnnnnnnnnnnnnnnnnnnnnnnnnnnnnnnnnnnnnnnaggaggctgaggcacgagaatcacttgaacccaggaggcagaggttgcggtaagccaagatcacaccactgcatccagcctggc

SEQ ID NO: 5293 - DNA, 1028 bp, Macaca Fascicularis
ggtggagttgaccttccctcaccccatcctttctaacagaggaacctgaggcacactgtcatggagcctgtaattctgtgtgagtccagaccctttcccacagagaggcaaagggaagagatggggaaaaaaggccctggccccagcactcgtggcaagcatctgtggagatggaatcagctcaggcgacaagaccctaatgggctgagcaacggtgtgccacaccaccagtgtagggtaacacaaaggtggacaatgcctcctccactaagatgtgtttgagagtcagcgtcacttgcactgaacagtgtgaaatctctgctgggctgttagaatcctaagagtccagtggaccctgtaaagcggtgcccatggtgattttctccagcatttcctcctgcccctgtgcagttcaattgcaagaacatggatatatcctacgacctggatgaggtggtgaagccatcccaagaacacccctttcatggggagcagaggtgctttccagattctgcctcttgcccctttgttgagcaaagtccattgataaattgggagaacaccaccactcagactgatggcttccagacaaggaagagctgtcctgcgtgactgacaaaaacccaaggaatgggaactgcgcaaacgcccaccataaggcactggctgtgtcatggagggttgtcatccagtggaatgccagacagccatcgcaatcaatattgcagccttctaggagctgatgggaaagagtctccaagatttattgtcaaaataatgaacatggagcagctcagtgggtaaaacgtcttcacatttatgtcaataagattacataggtacatattattattaacattagttgcctcaaggaggaggacgtgctggggctcaaaaaaaaagaagcgagatttcctttctactatataggcttacatataatttttattctgtaccatgaagcacctctggaaaataaaataaaaacatctgtgccttgctgcctttaaaaaaaaaaaaaaaaaaaa

SEQ ID NO: 5294 - DNA, 1260 bp, Macaca Fascicularis
  misc_feature (1)...(1260): n = A,T,C or G
atatttcaatgtattttaattcattttgcaattcctnnnnnnnnnnnnnnnnnnnnnnnnnnnnnnnnnnnatagtatatgtgctataacttcaaagtagatgtactgcgaccctcatgcaagctaatttttatcattatatatataaatatatacttaagaatatctacgtgttgggccactgaccaactttttttgaccaagtgtttgttttttgttgataattcatacactccgtgaattttgtaatnnnnnnnnnnnnnnnnnnnggtttgacagctgcagatggtctctgttgtcctctgcttcattctggaaagtgcatattcaaaattgtatcagtctctgatcgattaattaattttgttacatctgtgctaagttggaatttgctatgttcctttatacatgggataaaggtttattgaggtttgagagtctcttgactcggaagaatgtacactctctggttttgacagctatttctgtattattatcattatactcttgtcaaatagaaatgttgcttctagaaaatttgccttggaggtgaatgtggggaaggtgaagcactcaccataattcccaaaattcatgttagaacatttcttnnnnnnnnnnnnnnnnnnnnnnnnnnnnnnnnnnnnnnnnnnctgtacctttgtcattctgttatttgctgctaaatatattttaatgtctcctaattaaaaattaaaatttggttgttggctaaatacaatatgcaaaagatgatggcaggtccccgactaaagaagattaatgtgttcagttttcactggttaagtgagttacaattttaaatattccattcttatttttggctttatgataattcagactactttattttgaacctgtttcctactctggcaagaaagataggcagaaatattaaagtgttccatatacattatggaatagatagagnnnnnnngatnnnnnnnnnnnnnnnnnnttccagagagattcttccannnnnnnnnnnnncaaaaccagaagatcagatatgtggggccatcagctcccagcctaaggtcctataacccgaagcttgaaggcaatcagtacctctgcttttcaaaggtaaatgcattcattttctttgattcagttataagcaagtatatattttcnnnnnnnnnnnnnnnnnnnnnnnnnnnnnatatttcatgctaaatcttttactgccatttttctcattcatttggtttatcatttcagtttaatgagaaaaat

SEQ ID NO: 5295 - DNA, 740 bp, Macaca Fascicularis
  misc_feature (1)...(740): n = A,T,C or G
tnnnnnnnnnnnnnnnnnnnnnnnnnnnnnnnnnnnnnnnnnnnnnnnnnnnnnnnnnnnnnnnngnnnntannngactggtttaaannnnnnnnnnnnnnnnnnnnccttagctctgttaagggcccggaatacacctaaccgttttgggctcactccatatgannnnnnnnnnnnnggacctccccctttgtcaaccttgcttaattccttctccccctccgatcctaagactgacctacaggcccggctaaaaggactccaagcagtacaggcccaaatctgggcccccttggcagaactgtaccaaccaagacatccacagaccagtcaccccttccaggtggaaaactctgtctacgttagacggcatcgcactcaaggactagagcctcggtggaaagaaccctacattgttctcctgaccagtcaccccttccnnnnnnnnnnnnnnntggaatctccacttagatccacgcatcccacgccaaggctgctccagagacgtccagaccaacaccacttgagacatggaaactccgacgctccgcggacccgctcaagataagactctctcatatctaactccttgcttattgtttgcccttcttccctgcgccgtctctagtatagtttttgacgctaaccccccaccggccatttagcctgacctgacagataattaattttagtaatcaagaggtcttaaataagacctccgaagatactcctataaagac

SEQ ID NO: 5296 - DNA, 758 bp, Macaca Fascicularis
  misc_feature (1)...(758): n = A,T,C or G
gcccacagcagannncaataaatgcttatgacaggctggcatagtaaccacaggtggttatcaaaggaaaagaccaataggctggagaatataattatgcttggccccctcagatgcttatacctacaaagcagatttaaaaatcaataactcaaaactttaagaagtacttgagtctacaaaatgttcaaagcagttacctaaataaggttatttaatgtaacagattatatacttaaagtgatctgagcgatcattgataacatatggcttaaatttgctgctgcctgaaaagtatattaactagattagaagacaccatatactccaataaaatgaaatatgttctattctcaacgtataaactttaattgtactccctatcaaatattttgaaatttccattacagcattactttgcatagtttttctaattaaatggttagtacagatgaaatctttatagatgagtacttgaaaactaagtgccaccagttttcaaacccttattaagaaatatatcctgaatcatatatttagttactttctatagtgattgtatggatttaaaagaataattaaaatgtgaagttgaaaaacttgtaaaatttggaatatacagatactgatttttttcatttttgttagtacacctataatacttaatcatattgacaaaccaatgaaaatattgtttttctgatgaacggtcttgattatgctccttgacatgatcagaccatccatcataaaaacaa

SEQ ID NO: 5297 - DNA, 702 bp, Macaca Fascicularis
  misc_feature (1)...(702): n = A,T,C or G
gcctgatctccgctcacgtgcatacttagagaaccgcgtgcctgacatatggagggtttagttatttatgtagtcggattttttgagatggagtttcactcttgttgcccaggcttagagtgcaatggcgcattcttgtgcttactacaacctnnnnnnnnnnnnnnnnnnnnnnnnnnnnnnnnnnnnnnnnnnnnnnnnnnnnnnnnnnnnnnnnnnnnnnnnnnnnnnnnnnnnnnnnnnnnnnnnnnnnnnnnnnnnnnnnnnnnnnnnnnnnnnnnnnnnnnnnnnnnnnnnnnnnnnncttaagccccttccttccagatcactgtccctgggcacctgggaggagacagaaggtccagtatgatgtgctgtagccaatgagatgccaggggcgtgggctgatgtcttgttaaacaagtgtcctaatggggccaacgaggcccgagtcagttttgtaggctcctagacctcatcagttccttccagctgatctgttagagccctaggacttgactcattctcactatactcacaagatctggtttctaagcaacctctgggaaatctggcaaatgaacaggcttgcagagagagctctgtggacctggaaaggcctgagagtgactctcagacggagctttccctcaagagatgggaaaatgcgttcctcctattttcaagtttctccctcaatca

SEQ ID NO: 5298 - DNA, 688 bp, Macaca Fascicularis
  misc_feature (1)...(688): n = A,T,C or G
gagccaccagcccaacgtgtttcttaatttaaaaaaaaaaaaaaataggccannnnnnnnnnnnnnnnnnnnnnnnnnnnnnnnnnnnnnnngccaaggtgggcggatcgtttgagatcaggtatttgagaacagcctggctanacatggtgaatcctcatcttgactataatatagaaattagcttggtgtggtggcaagtgcctgaaatgccagctacttgggaggctgaggcagaaaaatggcttgaatttgggaggcggaggttacggtgagctgagatcgtgcaactgcactctcgctgggcaagagcgagactctgcctctaaaataaaataatataaataactgcttctcataagagctttggtagattcttatgaagtcacatcattgttttgcaactatgatatgtgttcaaaatattcttctatgaccccacatttcattagatatatttttttaaccattttaaaactgattttctctgaaatttgttgtgttcagtttgcattgaagactgcatgctttctagtctgtatcataattggaaacattttctggtacctgataaatgattttagtttgtttcgatgtgtacttgataaagatatgaaggaactttttctttatgctgacttcaaaatttagctgaagtagcctattattccattttctttctttatgt

SEQ ID NO: 5299 - DNA, 713 bp, Macaca Fascicularis
  misc_feature (1)...(713): n = A,T,C or G
cctgtaaacctgaaccaccaggtacctcaattttcttcaaggtcaggctgttcttaatgttgctaaattgatcaaggaaatgggtgagccactgctnnnnnnnnnnnnnnnnnnnnnnnnnnnnnnnnnnnnnnnnnnnnnnnnnnnnnnnnnnnnnnnnccgaaggagtaactggtccattcctaggctctccccaaagatgtgtcctctgaagaagctggtcaggtagagggggtgtccaccgtggttgtagatgnnnnnnnnnnnnnnnnnnnnnnnnnttttgttcacctgccaggcgtataggagcgggttgggnnnnnnnnnnnnnnnnnnnnnnnnntggcccacacctactggtactggatctggcttatgtttccctgtgccacacacagatcctgcannnnnnnnnnnnnnnnnnnnnnnnnnnnnnnnnnnnnnnnnnnnnnnagtgagttactgtggaaggccaccagaatggaggtgannnnnnnnnnnnnnnnncttcctggaggcggagaagtggttggnnnnnnnnnnnnnnnnnnnnnnnnnnnnnnnnnnnnnnnnnnnnnnnnnnnnnnnnnnnnnnnnnnnnnnnnnnnnnnnnnnnnnnnnnnnnnnnnnnnnnnnnnnnnnnnnnnnnnnnnnnctgcatgaaacatcactcccccttggccggtgaaagaataaaataaagctggccact

SEQ ID NO: 5300 - DNA, 697 bp, Macaca Fascicularis
aagatcatcaagttagagtatcagagcgaggattagatccaagacatggttcaatttccggctcggttctctgaccgggctgacttatttctaggtttctttctaggggacactcctgactacttccggaataagagccagagatccccgtaaagctgccctggcttttttttttttttttttttttcttttttcttttttttcacctcttgccctagaaagacctacccatgctcccatgcttctttgaattttgttttcctttaaactccctcacaatccctgtcttaaagttctagaagagagaaaacttttttcagagactgtctccttaggaagaatcaacagggatattgtttaaaacctcaaactgagataaaaggctggtagtaaccgttgaaataattgagttctatgtaccatgcactgaggaagaagtgggggtgggacgacagtgaaatctagagtaaaaccaagctggcccaaggtgtcctgcaggctgtaatgcagtttaatcagagtgccattttttttttttgttcaaatgattttaattatcggaatgcacaatttttttaatatgcaaataaaaagtttaaaaacttaaaaaaaaaaaaaaaaaaaaaaaaaaaaaaaaaaaaaaaaaaaaaaaaaaaaaaaaaaaaaaaaaaaaaaaaaaaaaaaaaaaaaaaaaaaa

SEQ ID NO: 5301 - DNA, 694 bp, Macaca Fascicularis
  misc_feature (1)...(694): n = A,T,C or G
aggccncaagacattcgaccaactggactgaaaccgcaggcatccagctttgggaggccctgtgccacacagggctaagctctcccagtaccctggcaaggtctttttttttctctccttattctacttcacagtcttttctttgacagtattcctaaactaggttgacacagctccagtccacaccagcataccaggcttcctccccagggcagtttagaggaagctccttccgggcacgggcaggcggtcctccttccctctccttcccctttgtcccggcctcaactgactggctatgggaggtgtggagggtccttgggctttcctccccaacctggcctccactagcacccctaacaggcggcccgtggaaggctcagcctctcctccacatccctcctccttcctgcctatcggaggcaaccagggtccccaaggccgaccctgaatcctcttccttccttcatgggaggggggcaggaatccagaggaggacgaaaccagtgggaccacatggcttggtggcttggacaaacaagctcagggaggaaacgaggaggcggcggctgcagaggaatgcaaccctcttgggcacagaccatgcaatctggggctggccctggggccagctgggtcctgtcctccacctgctcaaccgtgcttccaccaaccagaggaatcccatttacta

SEQ ID NO: 5302 - DNA, 718 bp, Macaca Fascicularis
  misc_feature (1)...(718): n = A,T,C or G
tgcattatagtgnnnnnnnnnnnnnnnnnnnnnnntactgtgaacagatataagtttctgtcttttataagattgtttgtagaatgaatgtttttttaaagtgagtattatatgttaaatattttaagttttttataaatactagtaactgtttactaatttttgtttggtcaagtgcttgtaaatgtcgctgaaagaagatagggagaaactgcggatcccaaactgttccctttttcatttcttgaaatgttaccactacagatgcttttttttttaaggtgaatgatcagttgtgatgtgctgtacctaaaatcatgtttaattgtataaggaaacatttaaatacacatatacaggaagaaaactgtagacgaagtatgtgtgtgtgattcagtctgattcacagaattctgagagtaatatggaataaaacaactccacttagatgannnnnnnnnnnnnnnnngccttgtgaaaatttggatattaaattgctgttagaatgggaaatttggacactttatatcattgtataatttcagaatttagttactgtatcttttggaaaacatgattatagcaaaaacatagaaaataagtaatctattactaaaacaccataaatgtaaaactagtatgcttggctgttaactctaaagatgttacttatgtctgtttttaaaacatgcatgtatttaacaattttatcatagta

SEQ ID NO: 5303 - DNA, 224 bp, Macaca Fascicularis
  misc_feature (1)...(224): n = A,T,C or G
cgggcaaaacgaggagcagaggcgtggaggatggaggcatgggatgggaaagcggaaaccaactatgtcttcggtgattgaaactcannncccnnngcccttcaccctccagcctcnnnnnnnnnnacatctcnnnnnnnnnnnnnnnnnnnnnnnnntcttngaaatggcctcccctcaggtcaagtcacccaggcatccaaagagtggtgagggccaaggat

SEQ ID NO: 5304 - DNA, 697 bp, Macaca Fascicularis
  misc_feature (1)...(697): n = A,T,C or G
ccctgtatccctagggnnnggcacatggtcggtgcttagtaaacttattttgtattcaataatgccaagtagaataattcataaattatggaaaaataaaagaatttggcaaaattgcaannnnnnnnnnnnnnnnnnnnaaaaatgtttcaacccctgctcaaaagtacatagcttgctgtgttgttgaagtgccagcatgaggaggatcatgccaacacatccatttattgcccattctgggtgtgtggagtgttttaactttgctatgcttctaaaaatcaaggaatggcaatggtatcaactttcatgaacacagttgttcacgtnnnnnnnnnnnnnnnnnnnnnnnnnnnnnnnnnnntttaaaatatatctctgaggttagaatgttgattcatgcatagtccagctgactttgcctatgaatataaatagtgaaaacaaggnnnnnnnnnnnnnnataagttatattccaagatttggtccaaagaccggagaatctgtaagtaggaagatagagttttgtttccccctcttttactggttgaataactttcaacaggtcacttatatttgggggcatagaatatgcagatgacacctgtcatgacgttctactaacaccctagacttcatcatcttgttatagcacttaccacagttgcttttaaatcatcacgcagttatatgttta

SEQ ID NO: 5305 - DNA, 2842 bp, Macaca Fascicularis
  misc_feature (1)...(2842): n = A,T,C or G
taaacaagaaaaatttccgcagaaggcgtggcgaggggagtattttaaatgcaaatgatcacagaatttgaattagcacgcatctctttgtgtgcatcagtaatccaataatgtatatattaccactacgatcgcttgtttctaatagttttttcgtgttatataacataaatgtatccaagaccttaattaagatatattcttcctcccaaaatcatagtcctagggtcaagaaacatactcctgtgtttattgtaaaataacaaccccaccctcagattgaaaaaacatgaagccctaatgtctaggactttattacaacttttcagaataatctgtaatgaaaactgatgcttaaaactttaatggaaaagactgagccccaaattgtgaacagttactacaccttacttgaagtgctaataaagataggagagtacatttgttggaataatggaaatggtgatttcagcctaaaagttcctgagggtaaaggatcacatgaccttcaggaaactttgactcctggtaggtgctttcctatctccccccatccttccctaccccttttcccttttcttccctctctttttctctcactgtcactctgtccacacacactggcaccttttgaacactaaaagtaagcactgttttttaaaaaagtaattatttgttggatcagatacttttatcccaagtgaataccttcactgagatgtggccaatgcaatagtttcacagttaaaacagtgcatataagaaaataaatcacatactatttttcaaagatattaaatgtattttgtaactattttcatttggtccttgtaacacgaaataatacgtggaacgtatctttataataaaaacggagtgccctcattcatcactgaggtgcatctagtttgcccttaatgaaagtatacttgctgtgtggattgatagcaccttcttgaaatggaggagcacagctggcttcatggatgtgcaatgtttgcagtcccacggggccctgcactctgaagcacgctgagctcagttgaatgtctgatttttacttatttttttgagacacagttccactttgtctcactttgtcacccaggatggagtgcagtggcgaaaacatggctcactatagccttgaccttcctggctgaagggatcctcccaactcagcctcccaagtagctgatactgcaggcatgtgccagcatgtccannnnnnnnnnnnnnnnnnnnnnnnnnnnnnnnnnnnnnnnnnnnnnnnnnnnnnnnnnnnnnnnnnnnnnnnnnnnnnnnnnnnnnnnnnnnnnnnnnnnnnnnnnnnnnnnnnnnnnnnaaccaccatgtctggctgaaatttttaataattcttaataatttttgagcaagaggtccacgcttccattttgcactgggttcctaaacaggttctgggtaggaaggaaagtggctgaggataaaacaggagttgctttggcctggctgaacatttgaaccaatgatcagagtttcattttatgattgtgttactctgaacagatttgttatttttttccagctacatttagagttcctcatgtatatatcacccctctttttccagtccatctaacctctcctttttttggtacctagaatcagttccccttgccttcaaaatccctgacaagtgtccatttctttatgtatgctttgatatagaagccacaagaatggctttagcagcttattttaaccttatgaattattcattcaggattttttaaatgattcagatgctttcgatctgttaacagtatttgtaaaacatgtttcagtgatacaacataggtgaactaaaccaaagatgcaaatgccttggaggaaaagaagttttattatagagaatcctgagatatatccttttgggttgtttaatttaaagcctatcacaaaacaaagagaattgtcgcactttaattccaacctcctacagtaccacacaacccttagcataagaatctgaaatttgtaataggtggtcctagtttgatgcagtgttttgcagtggttgtgcaaatgcctcgtgaaacggtttttcagtcagactaaatgagaaaatctaaactgtcctatcaaaactggcccgcaataactgtaatgtgaggagaaacaaggcaaatgtgggtttcctattgtcgttgtaagacattccaggttctcagattgaagagctacattcagctgatagttgacatctgttccctcacacatagtggctctcaacacggctgcactttggaatcacctgaggacctttcagaatctctggttgaatcatcctggctgttcatgattccaatgtgcagctaggctggagaaccgctacaaggctgataactgtaatgggagtttgaaacttttacaaaataatagatgtttataatcttttgcaatttttacttttaaatctgtactaaaatgagccaaagaagtcttaacaatgatttatggcacaattggttggttgaggctatcgttccatgattcacaaataggtggttatgtggggtggttttgcacttgtggcaattggactacaatttggccttaaaattacagaattcctggttctcagatggagaggaattgccttgaaatttgcatgtaccagactaagtgcccagtatatatgactgatattttcgtgactcatagaaggtgtccatggtatagagtttatgcctatatctctatctttatttggggcacacatgagtttttgttaattatttcttactcgtacttattagaatactgtgttttgaaaaaaaaaaaaaaaaaaaaaaaaaaa

SEQ ID NO: 5306 - DNA, 725 bp, Macaca Fascicularis
ggctcttaatgagtcaaagttaactagcaggtgcagtattcgtgttttctttaaacttttgcctcattccttttatcttgttttgcagtttgcaccaatgtgttttcatgtaacatacacctttccagttcctataaccaaaacatttctgtcctaattctcagtcagcttcccgactgagacatgttttatttcattggaactgagtactgtcctgatgcggaatgtaacaagggtaacagaaaagcagcaagatcaggaagtagaaaatataatgaaaccagtcaagttttggaaatcagggatgttagatgactgtggacctaaaaaagcaactataaggaaaacagcataagaaatggtctggggatccgtttatcactgcagttgttacatcaccccatggtctctaaactacagagctttagtctgtctctgtttcagttcattttacaggaggtaaacatcacacttccagaaaactctgtctggtatgaaaggtataaatttgacattcctgtctttcacttgaatggccagtttctgatgatgcatcgagtaaacacctcaaaacttgaaaaacagctcctgaaacttgagcagcaaagtactggaggctgacttatgtcctcatgattttccaccctctcctcccataaagcatcttcctaaggaaatgaccatggcctgatactcattttgtcacttgtacaaaaccctaagga

SEQ ID NO: 5307 - DNA, 743 bp, Macaca Fascicularis
tttaaaaaccacttagaaataaaacagttttacaaactctgtaaagtgaataaaacagagcccctgcctcggtggaagaaacaagctaatttatgatgtttaatactttgatgcagacccttcattcagttcaaagcaactttgacaatttggcaaagctgaaaaacaaagaaacccttgttttagggtttattcttgtaatagcaataaggattgctattatttcttaatataagttatatgttaaaatacatctgttactttatttgtttagcccatcacagaaggggtttggaaataaccctctatgcaccaaagctaacagctactggtatgacacgaagggtccatgttcagtacacagagagatctgtccttagctttaatccaatcagaacaaaattattcttatcattactgggaaaataagctaagagtaatgcaagagagagagaggcaaatcagtttgtcagtttctacaaagaagacagctggaattctgatgaggattgtgtgaaatatatagatcgatttgtgtactattatcacattaaaaatactgttttccaatttatgaacatggaatgttttttgtatagaacatttttctttcaacaacgatttgtagttttcagagtagcagttcgcaattactgggttcaattttttaagtatttaactcttttgatgctattgtaaaaagaattgatttcttaatttcagttttggttgctcattgctac

SEQ ID NO: 5308 - DNA, 736 bp, Macaca Fascicularis
  misc_feature (1)...(736): n = A,T,C or G
gcctcatgagaagatggagagtgtttttaaaatgataaattccagaaatgttcatagagtttagttcatggcaattaggggtatatagaagttttacatttttagataggaaagtttatcagtcttttatagttttgtctttggtgtcatccctagaaagactcctccagcttgtatcccaagattatataaacattcatttatatttttttcttagggtttatttttttacacttaatcttactccatctggaatttatttctgatgtatgcagaaaggtagggatggattttttttccagaagtcatccggtgtggtatcttcccctgtggtttgaagtgtcctccttctcatatactagattcccaaatatgtaggaatctgtttctaggcttcagttctgttctattgatttgtttcctgttcccatgccaatctcatgtggtagtttttctgcttacaaaagcacatgcttgtaaaaaacaaaacgggcctggcatggtannnnnnnnnnnnnnnnnnnnnnnnnnnnnnnnnnnnnnnnnnnnnnnnnnnnnnnnnnnnnnnnnnnnnnnnnnnnnnnnnnnnnnnnnnnnnnnnnnnnnnnnnnnnnnnnnnnnnnnnnnnnnnnnnnnnnnnnnnnnnnnnnnnnnnnnnnnnnnnnnnnnnnnnnnnnnnnnnnnnnnnnnnnnnnnnnnnnnnnnnnnnnnnnnnnnnnnnnnnnnnnntgcacta

SEQ ID NO: 5309 - DNA, 2066 bp, Macaca Fascicularis
ttctcattaagaatggagaaattaaaattttgcgagactcactacatcagacggaatccgttctagaggaacagagaagatcacattttcttcttgagcaagagaaaacccaagcactcagtgacaaagaaaaggaattctccaaaaagctccaatcattgcagtctgaactccagtttaaagatgcagagatgaatgaattaaggacaaagctccagaccagtgaacgcgcaaataaactggctgctccctctgtttcccatgtcagtcctaggaaaaacccttctgtggttataaagccagaagcatgttctccacaatttggaaaaacatcttttcctacaaaggagtcttttagtgctaacatgtcccttccccacccctgccagacagagtcaggatacaagccgctggtgggcagagaggatagtaagacccacagtctgagaggtgactccataaaacaagaagaggcccagaaaagctttgttgacagctggagacagagatcaaacactcaaggttccattttgataaacctgctcctgaagcagcctttgatcccagggtcatccctaagcctgtgccacctcctgagtagtagttctgagtctcctgctggcacccccctgcagccaccagggtttggcagtaccttggctggaatgtcaggcctcaggaccacaggttctcaggatgggtcattttccctctcagccctgagagaagcacagaacctggcattcactggactgaatctggttgccaggaatgagtgctcacgtgatggagacccagcagagggaggcagaagggccttcccactctgccagcttcctggagccgtgcatttcctcccccttgtacagttcttcatcggcttacactgccaggccctgcaggacttggcagctgctaagagaagtggagcacctggggactcaccgacacattcctcccgcgtgagctctggggtagagaccaaccctgaggactcagtgcgcatcctggaaggcttctctgtgactgcacttagcattcttcagcacctggtgtgccacagcggagcagtggtctccctattactgtcacgagttggggcagattctgctgctggggaaggaaatgggagcctggttcacaggtttagtgatggagatatgacctcagccccaaggggggttgctgatgaccaaggacagcacccactgttgaagatgcttcttcacctgttggctttctcttctgcagcaacaggtcaccttcaagccagtgtcctgacccagtgccttaaggttttggtgaaattagccgaaaacacttcctctgatttcttgcccaggttccagtgtgtgttccaagtgctgccaaagtgcctcagcccagagacacccctgcctggcatggtgctggctgttgagctcctctccctccttgcggaccacgaccagttggcacctcagctctgttcccactcggactgcctcctgctgctgctgtacatgtacatcacatcacggcctgacagagtggcctcagagacacaatggctccagctggaacaagaggtggtgtggctcctgtctaagcttggtgtgcagagccccttgcccctagtcactggctccaactgccagtgtaatgtagaggtggtcagagcgctcacggtgatgttgcatagacagtggctgacagtgcggagggcaggtgggcccccaaggactgaccagcagaggcggacagtgcgctgtctgcgggacacggtgctgctgctgcacggcctgtcccagaaggacaagctcttcataatgcactgcgtggaggtcctgcatcagtatgaccaggtgatgccgggggtcagcatgctcatccgcgggcttcctgacgtgaccgactgtgaagaggcagccctggatgacctctgtgccgcggaaaccgatgtggacgaccccgagttggagtgtggctgaggccctgagtgtccagccacatggtggcaccagcaccattcctttccttaccacatcaactgattaaagcagtgaccagcaggaactgcccagaaa

SEQ ID NO: 5310 - DNA, 739 bp, Macaca Fascicularis
tgcataatagagaaagggaagtatgaccaccctgcaaagaaggaaccacagagaaacgtcctcgagtgcttacagcagcaaggaacatgactgctgctgcgtccccctttcagctgtcaggcttattcctcttggttaagcacaatgtgcaagttgccgctctgatctgggaccaggaccctgactccatgccttcctctcctaggccatacagctttctgtctcctgaagactgaagaataatcacttcactgaaagttaccagctcgatgcacagagagttgacgggacatcgagaacaaccaccaccatcagccaaagtaaaatgccataagccactttttatttctgagaaatcttttaggcaaagtgtgaggcatttttctcctgaattagagaaagagttacctctaaattattagtttcacttaattatatatttttggcttagtaataaaactaaggaaattacttgctcttttagtagtggtgttaataaagcctttgcacctttgcagggctaaatctttttcactatgtgatatcaaggcatataagtcttaatcctggggtttgaagtaaaaacataatatatctttagtctatgttgttttttttttttttacccccagctttggtgagatatggttagtatataacaaccgcacatcattaatgtatacaatctggccagtctggacctatgtatacacttctgtcactgtcgccacaatcaggc

SEQ ID NO: 5311 - DNA, 2519 bp, Macaca Fascicularis
  misc_feature (1)...(2519): n = A,T,C or G
ctgcctgccaacattttaattaaggataataggttggcttatcaaatataattgagggaatattgaccgaagttgggtttgtctaaggggcaggcaacggaacatgaggttctagtcacagcctctctcacatttccccttgactccctttgtaaagagacattttccctcaccttgccttctcagacctagaaacagataaattaaaggtgcagctggatctgacagccaggttctgtggaagtggaaagcattctggtgctgatggaactttgcaaagttggataccaaagggacccccatgcctctggggatccagtaggattctcgtgccagaggaaggctcattcttcaccttgggtgtaacctgggcctcagcaaattctctgataagatttactgaaatacttccaactgcaggacaacacagatttcccccgccagcacaaaggaataactttcctgagatctaaaaaccagcatatattcaagggaaaaaaaaaaggaaattgactagcaaaactacctcatgaaatacatctcttgattccttaatgtcatcctctttatgaaccagattttctcatggcctaaactactccctgcttgtaaattaagcaccatatgaataacttgcctgatggtattacagtgatctaaggttaatgtttaactattaacagaaaataggattccaggtactataacctgggaagagtaccattagggcaccatttagaaaattctgtttaagtcttataataaaggagcaacttaactgctagagaaattggagccaatgaagaaattgatgtgaaaagaatctatcccctgggctggggtattttatgtttcaatattgaaacttgaacatttttttacaccagaaaagttattcttagtagttggcagagtaaatccatgttatcgtgcattctgaagcagttcagctgaatctaattagaacatctgcagatttatgcagctttctgtatattaaagtcccagcccttgtgaaataaatatttctcctcaatcctttatttttacccttctcagggttaatcagactaatatggtataaattttaacaaccatttttatgatctcaggatgaatggtgcaatacaagtctaaaatatcaagatcttataaatagtgtcagtatgtactggcttcaatgcctttctcctggccatcaattttggcttacagagagggaaacaattatgaactcagtcacttgcttctttttattcatttttcagagattttcaaggtgatccatgcatttctgggatgttaaggagaacttgtttggtcttaatgtctctcaatagaaaattcattgaattatgtaggcaattaagcaaaaggtcagtttggttttaccacttagacaaattactcagactcatgtagaaaatgagtgttttgctagagttatctttaaaatacttcttgggaaacaaggctaccatgtttcttgggtaacagaacacctagatgtagcacttcacactaggacttttgtcttaactagtcttctatgttagatcaggctcacctcaggctgatgaataatatctacttcagtcatataatacttcaaggtgttaccaattagtcttaaaatttgttgcatctcaggctgagaagcattgtagcaaaaagaggcctaatcctgaggtcagagagccctgaggcagcagcggctatatcactggtcagcagtgaaccactggccaataatcgcactacctagaagcttagagaattcatgagcaaagaaataccatttaacccagcaatcccattactgggtatatatccaaaggagtataaatcattctgttacaatgatacatgcacacgtatgttcactgcagcgctattcaccatagcaaagagttggaatcaacacaaatgcccattcatgatagactggataaagaaaatgtacatatatacgatggaatactatgcagccataaaaagggatgagatcatgtcctctgcaaggacatggatggagctggaagccatgatcctctgcaaactaacacaggaacagaaaaacaaacaccacacgttctcacttataagtaagagctgaagaatgagaacacatggacacagggagggcaagaatgcactactggagtggtggagggcaaggagagcatcaggataaatagctaatgtatgcgaggcttaatacctatgatgggttgacaggtgcagcaaaccactatggcacacgtttacctatgtaacaaaactgcgccnnnnnnnnnnnnnnnnnnnnnnnnnnnnnnnnnnnnnnnnnnnnnnnnnnnnnnnnncacaaggtcaggagatcgagaccacnnnnnnnnnnnnnnnnnnnnnnnnnnnnnnnnnnnnnnnnnnnnnnnnnnnnnnnnnnnnnnnnnnnnnnnnnnnnnnnnnnnnnnnnnnnnnnnnnnnnnnnnnnnnnnnnnnnnnnnnnnnnnnnnnnnnnnnnnnnnnnnnnnnnn

SEQ ID NO: 5312 - DNA, 2313 bp, Macaca Fascicularis
atcacattctgtgttgttaccatgttaactccatatgcagcttgagcattcagtcttctgacctgttccacctacacagggcattttatggcttaaagatgatggcctagaagggaggggagatacttactttggattaaattcaaaatgggaaaatgcttaagctgctgtaaagaggaccagagcttccagcgatgttctccagaagatcaagttactacagacgcccagcatcgtggaccctcttctatttcacaaccaaatatatctcttggtcataaaacgtcttattcccctataacacgtaaagtcaattcagccaaagcaagtagaaggttattatctctatcaagtccatctttctttgaaagaagatgttctctatttgttggatttcaaaacagaaatgcttcctcataccgtcaacaaagtagagctaactttgattctgaagaagacacaagtttcactgatttaaaatcttcctcagaccattttggtagctttatgtcctgcaggagacgtttctcatcccgtaaactaagtatagtttcctattacaagagtgccaatttttttgatcctcaagcaagtggccagaatgtgtttaatctaaaagaaatcgaaatcttttctaaaacctcaaataatactgatgctaaaaaacatataaccatctctgctcctgaatataacactaaaaattttaagaattttgaaacaaacactacttctccagcctttgggaacactattgatacagcctcctatcaacaaagcacatcatctttcttttctcttgcaaatgatgtttcctctcccgatcaacaaaatggaattgccactgatattcaacaaaggggccaattatgtaaagatttaaaagatttccttcatcctggtactgaaagttacagcacagatcgttctgcaatcacgattcaacagcatccctctcaaagtggaactttcccattcctccataaagctggattttcttcatcttataaaaattctggttgctttatcccatttcaaaacgaagtaacttcaggcccatctgaagatgaagactttgctgtcttgtttcaagatgaagacagatcttcgcctattgaaattcctaaaataaggtatattacagctaatactgacacagaagaacagagtttcccagtccctaaggcatttaacacacatgtagaggaattaaatttagatgtccttcttcagaaggtagatcatttacgtatgagcgagtctggcaagtcggagagttttgaactactttgtgaccacaaagaaaagtttagagatgaaatagagtttatgtggcgatttgctcgtgcttatggagacatgtatgaactatctacaaacacacaagaaaagaaacattatgctaatattggaagaactttaagtgaaagggctattaatagagcacccatgaatggacattgtcatctgtggtatgcagttttgtgtggctatgtatctgagtttgagggtttacaaaacaaaatcaactatggacacctcttcaaggaacatctagatatagcaatcaaacttttaccagaggaaccctttctatattacctcaaaggaagatactgttatactgtctcaaaactgagctggattgagaaaaaaatggctgctactctgtttggaaagataccatcttcaactgtgcaagaagctttacacaatttccttaaggctgaagaactatgccctggttattctaatcccaattacatgtacttagcaaagtgttatgctgatcttgaggaaaaccagaatgctttgaagttctgtaatttggcattattgcttcctactgttaccaaagagtgatgtctccatttgtattcttagcaatttttttccaagtagtaaggataaagaggcacagaaagagatgcaaaaaataatgacttccttgaagaggtaaataaccgaatttactcttcaacaaatcagacgtgatctaccaaaatttaaacgaatcaaagttttattatccttttcttcatttttgatgtaagggtattgtgctcagatttgaaggtaaagccatgtttctgcagaatgcattccactagtagcactacaaaattatgttatttggagaatctatatactataatgtcaatacataatctataaacatgtatgctttgtatttttcttatcaataaactgcagccttcagaatatttctttaaatatttaaatccaataaaatgaattttcatgagtaaaaaaaaaaaaaaaaaaaaaaaaaaaaaaaaaaaaaaaaaaaaa

SEQ ID NO: 5313 - DNA, 716 bp, Macaca Fascicularis
  misc_feature (1)...(716): n = A,T,C or G
tagccgtgagcaannnnnnnnnnnnnnnnctctaatgctaactcatgtgccgatctctagagcagcgggaaactaccccactgcaccaaatcaagtagcttcaccttgtgtatgcaggccccaagttattttttagcaatcnnnnnnnnnnnnnnnnnnggtgtgttgaaaaacgttcttattttaaagaaaggttgtgctcactacactgctggtgtgtgcgttctgagacctcttgtattcaatctgtgaaggatatgtgtattaatccgtacacccgtatagcctcaatatttgtctgaannnnnnnnnnnnnnnnnncgtaaaggaaagttctagaagcaatattttcacttatttaacattctccaaacaacatcaagcattgatacacactgaagagtgcatttattttttgtatcactctaggtatgttggaatatgcaaggactgtggttaaaattagaatgtataaggcatattataatttagttcatactgaaaaagaaattaacagaacattgttcggttcacacgttccaaaatttgagtgatttcttgagttagacatagattttctattttgttttaatttgtcaaggtatttttcttcccttcatgaactttaggtacacataacttatgtcatttatttatggtcttttatacctagtttgtaaaattgtaaaatagcaaactaaatgcagagagtttgc

SEQ ID NO: 5314 - DNA, 719 bp, Macaca Fascicularis
  misc_feature (1)...(719): n = A,T,C or G
ctgtgctgccctggctannnncgattgaaggcctccctgcagatctgaatgatgtacgtctggagtactttgaagaagccgtggacttgatgctgcagcatccagaggtgaaaggtcctagtattgggcttcttggattttccaaaggaggtgacctgtgtctctcaatggcttctttcttgaagggcatcacagccactgttcttatcaatgcctgtgtagccaacacaataactcctctacattacaaggatatgattattcctaaacttgtcgatgatctaggaaaagtaaaaatcactaagtcaggatttctcacttttatggacacttggagcaatcccctggaggaacgcaatcaccaaagtcttattccattggaaaaggcccaggggcccttcctgtttattgttggcatggatgatcaaaactggaagagtgaattctacgctcagatagcctctgaaaggctacaagctcacgggaaagaaagaccccagataatctgttacccagaaacaggtcactgtattgacccaccttattttcctcnnnnnnnnnnnnnnnnnnnnnnngttttgggtgaggcagtattctatggaggtgannnnnnnnnnnnnnnnnnnnnacaggtagatgcctggcagcaaattcaaactttcttccataaacatctcaatggtaaaaaatgtgtcaagcacagcaaaatataacattgt

SEQ ID NO: 5315 - DNA, 694 bp, Macaca Fascicularis
  misc_feature (1)...(694): n = A,T,C or G
caaagaagacagattccaggagnntnnnnnnnnnnnnnnnnnnnnnnnnnngaagaattcacttgaaagtagtggggtccagacaaccaaaaatgaagatgagaatgagaaggaaaaggagctccagcnnnnnnnnnnnnnnnnnncctttgaaagcctgggcaaagcctggccccgaaacgcagagannnnnnnnnnnnnnnnnnnnnnnnnnnnnnnnnnnnnnnntgaacgnnnnnnnnnnnncacgtggaaagtgcagctaggagtcttacaatcaatgaatgccttttttcaggggttaatgcttttggaagaagaatatgcagatcctgaggctttggcnnnnnnnnnnnnnnnaacttgtaaatcaatcacatattctttagaaaataagacctactcatctgtgagaacagaagctttatctgtgatagaattgctgcttaaaaaacttgaagaatctaaacagtgggaatgtttgacatctgaatgcagagtgctcctaattgagtctttagctactatggagccagacagcagacctgaactgcaggagaaagcagcgttactgaagaaaacnnnnnnnnnnnnnnnntaaattagaaggggaagaaacaaacaagtgccatgttcattgggggttgaaatggtggtgttctttgaaaaannnnagtggggaagagtaaagatt

SEQ ID NO: 5316 - DNA, 750 bp, Macaca Fascicularis
  misc_feature (1)...(750): n = A,T,C or G
agaagttgcttcctagaaaactcaataccatnnnnnntctctatacagggtcatttatcccgtcacatgtttctgtttctatagtaatttagaaattgcaaatagttaacttttcatcttgcaaaaaatgttaacattatcctggctatttccatagatgccatggactattattattactatcctgactatttccatagataactatggactatagtgtggcctgagttgtcagtctttaatcctgattcatgtggctctctttttatcgttcatgtcagttccaattatttgatatcaaaaaccttcatggtaggtagagttttaggtaaaagtggatctagggttactttctttattaacatttcctaaataactgaattgagagacatactctgctactatgtcgtcaggttaatttttgtctgatcttatgatggtcctgccttttactagctactttagaaatagaaaatgtgaagagtgactatttacgcatctactcctttggctactagaactcatctatannnnnnnnnnnnnnnnnnnnnnnnnnnnnnnnttcatttctgcttccgctaaataagagcaccacattcctgtgttttctgtactgttgagctgtagatgaactgtttctctaattatnnnnnnnnnnnnnnnnnnnnnncagggaaactgcccaaatgttatattgtcatttaatgggaaaggctgggatcatatgtatttttatgttctgtaaaggat

SEQ ID NO: 5317 - DNA, 529 bp, Macaca Fascicularis
  misc_feature (1)...(529): n = A,T,C or G
tgtgtgtgtgtgtgtgtatgcatgtgcatgtgtgtgtatgtgtattatcagacataggtttctaacttttagacagaagaggagcaacatctatgccaaatactgtgcattctacaatggtgctaatctcagacctaaatgatactccatttaatttaaaaaagagttttaaataattatatatgtgcctgtatttcccttttgagtgatgcacaacatgtaaacatattagtataaaagcagatgaaacactcccccctcaccaataaagtagggcttggatttagaaaattgactttgaaannnnnnnnnnnnnnnnnnnnnnnnnnnnnnnnnnnnnnnnnnnnnnnnnnnnnnnnnnnnnnnnnnnnnnnnnnnnnngagaccagcccggccaacaaggagaaaacccatgtgtaataaatatgcaaaaattagccaggcacggtggcagcaagaacgtagtcccaatactcaggaggttgcgacaggacaatggcttgaacccaggaggaggcggttgcggtaa

SEQ ID NO: 5318 - DNA, 747 bp, Macaca Fascicularis
  misc_feature (1)...(747): n = A,T,C or G
tgtgagcccagcctgtggtcttctccgtacccgcagcgtggtcatctgtgcccgtgtgtggcgtccccgtctctgctggggccattagaacgaggcagacaccaggccaccctagaagccgagccgtcggacctcaggcgtgtgcggggcagggacgcgggtctcctggttacattcnnnnnnnnnnnnnnttcccggttacgtgtagggaacagcagagtgatgcacggactttgaacatttgttatgggggaaaacatcctgtcacgtcggggtcatctgccagagcagggtctgggagggcccgctgcagttcccgctggcgtggagggaaatgccttggtctggcctccgagcccccaagtccaccgtctcccctcccctcatttataagaatagctacacactaacattttgggaaggaaaggcacataactttttttaacatttggtaactaaaataggttatgggctctatattgtcagctacttgggatatatatttaattttcttaaattcccgttaaagaaactctattttatggttttgatttcagattgcaaacatataaaacctgcgtagcagcgagttcttggttttgccagttccttcagttcctttactgttactgtcatgtaatcaactaactttgtatgtggattttgatgtaaagtatgcatgttccttttatgtgtatttaatcatgtttaattttgcacacttatttgtaatgtttcttttaaata

SEQ ID NO: 5319 - DNA, 685 bp, Macaca Fascicularis
  misc_feature (1)...(685): n = A,T,C or G
tatggagagtccctagacagtggcactcacccctgccacgccctgtgnngcaggttgtacacgatataaaacatgacactgactgcccgtgaggatcttgacaagttgttctgaagatggcactgtgctaagtccctgagagtcacagggcctcaaagcggcatggcggcatggcgtggctggttctgccacatgccagccgtgtgacctctgagtctccacttcttcagtgctgacaataaaggagttttactaagggccaaacaagataatgaatgtgaaactgctcaacgaaccccaaagaattatgcatagatgcgatcattaagatgcaaagccatcaagttaccacctggcatgcttaaactgtaaagagtgagtcaaagtaaactgaagaggaaaatccaaagttatgcagaaaagaaataaagaggtcttacgtagcaataccaaacttatgtcaggcactatttctcaaaacacaactccactgagatgcaccaaggaaagaaaggattttctgggcaaaagctttatgcccctctagggcactcacaatgctcgtcagcacacagagctacaaagagttcagattttgccacccaatttgttactaaaaacactcaattttcagcgctgctttggatttcagaattgcagattcaaaacatggtaaaccctgtat

SEQ ID NO: 5320 - DNA, 306 bp, Macaca Fascicularis
aagattaccagtatgcccatggagatggaacacacaggacattacctacatcttgcctttctgatgacaacagttttttctttgtctcctggagcaaaagcaaactatacccatctgtgggctagcgtgaatacttcctgggattcagttattcgaaataatacagggagaagccaaaatgaaaacattaacacagaccctataactcctgaaacgtattataaaggtaattctacaaacgtgcctgaaacatctcacatcgtatctttaacttcaaaatcggaacaggagctttatatgccttct

SEQ ID NO: 5321 - DNA, 723 bp, Macaca Fascicularis
  misc_feature (1)...(723): n = A,T,C or G
gtgttgtagtaacaagcagccttgttannnnnnnnnnnnnnnnnnnnnnnnnnnnnnnnnnnnnnnnnnnnnnnnnnnnnnnnnnnnnnnnnnnnnctatgctaggcagaagggaagccaagatgaaaannnnnnnnnnatatctgagactgatacaggaacaattataataccacactaagtgcaatcatgatgccaaacagggtatgnnnnnnnnnnnnnnnnnnnnngcatggggacccagggataaagaatatctaacaaagtccatgggcaagaacagagatggatgaggttttgccatatgggagaaatggtgacagttcagaccgaaaacagctggtacgatgaagcaggagagagaatgatatttcttcatcgtctacaaactcataaggtaagcagtagagctgaattccctactctttcagatttattgaattacagctgtttaaaatatagtaaaaatctctctaacacaagataannnnnnnnnnnnnnnnnnnnnnnnnnnnnnnttggagataagggattgtattgcttttagatatgtaaatgtcatttaaatgcagagagtagctgtgtttgatactaagagnnnnnnnnnnnnnnnnngaaacattctcttataaatgggtnnnnnnnncatgttgttttctagcatttaaacctttccccttacaatcttgattatgctgtaaatttgctaagttaactttcctt

SEQ ID NO: 5322 - DNA, 718 bp, Macaca Fascicularis
  misc_feature (1)...(718): n = A,T,C or G
cgccatcgctcgcgagggtgannnnntgaccaaggagcggctgtgctgtggcctgtccatgttnnnnnnnnnnnnnnnccgcattcggagctacctgcaggaccccatctggcggggcccgccgcccaccaatggcgtcatgcacgtcgatgagtgtgtggagttccaccggctgnnnnnnnnnnnnnnnnnnnnnnactgcatccctgtgggaaccaacgagttcacagctgagcagtgtttcggnnnnnnnnnnnnnnnnnnnnnnnnnnnnatcatcgtcctgctgggccagcagcgtcgcttcgacctgttcgacttctgttaccacctgctcaaagtgcagaggcaggacgggaaggatgaaatcattaagaatgtgcccctgaagaagatggccgaccggatcaggaagtaccagatcttgaacaatgaggnnnnnnnnnnnnnnnncaagnnnnnnnnnnnnnnnnnnnnnnnnngttccacnnnnnnnnnnnnnnnnnnnnnnnnnnnnnnnnnnnnnnnnnnnnnnnnnnnnnnnnnnnnnnnnnnnnnnnnnnnnnnnnnnnnnnnnnnnnnnnnagagaagtaggagagagaaagccacagccagcctgccacaggatccaactggacaacgtgtgggatggacctggaaacaagcacctccccaaacacatcaccactccctagggcggggcctgtgcatgctctc

SEQ ID NO: 5323 - DNA, 3028 bp, Macaca Fascicularis
tataaaacgactccaaaattagacctgcctattggggagaattctatagacagaaggtcaatgttgcccccatctataggggttgaattaccttgctgttaagtggtcttcccccattgggatcctacagtcccacagatgaaagcacagtagtagctgacagctggtttattgggtccctcggcatctctcgtatgtggcatattgctttcgccactttcctatgaagcagacatcaaagcaaaactaaaaggtggatatctggaatgaatgtttatgttgtaattgggcagatatttaccttaattggaaggatctaactgctttgcaaatattaaataagtgcttgggcatgattgggagaggaggcagcttagctggaagctgtgcccattttactgtcactggagaacaggatgtcagagctgggcagcactggtacccatcacttgcagtttgcatgtggggaaaccaaagtcctaagaaacaacagtacctggcccaaaaaatccatagaaagaggtaactagtggcagatttgggatgccaacctgattttatggattttgagttagattctctaccctctaccaatactaaaaatagattaggagggttttttttttttttctgtttatcatgttgaatttcattgacttggttagtctttaaatttgaaaacatgttttagggagtttagttctagaaatttctcttggattgaagtgacaaaatctgaaagaaaagaatatgattgagctatttgttttcctgaacacctcaccttttatgatgcaataagttactctgagtttcttggcagagtttttgacagctgttgctttcaatggattccattcctgtattccttatgggagtttgtttttaaaatagactactgtgattgaaatgaactcaatatgtagttaagttacagctttcttcagtgtatttttagttacttgggtcacaaatattcaatttcagcatattttagggtgagtaatcaaaaatgtgaatttgcctttgatttcttaccactgtctgagctatcataaagcattctctttagttgtgatttgattctatagtctgtttctaaatgacatttgtctgtttcttaaatgatctcacagccatggtaataatagatgtgtactcagaagatcaataaggtaatattggaattcacgtgttttttgcagttaaggcagccatttgccaatgtcttcttttaagcagtagttggaaagatctcaattacagtataacaccttagagctaaaaacatttgttcaacacaaactagaatcacaccttctcactagatatcaccaagggaatgtggttttaaaaagaaaaagaaaagaatatcacatatcatagcaaccagatcttcccatattattgacaagtagggatcattaggttctggtttgaacattctgaatgtgaacaaaatgtagtagttaagaggtgttttccccctctatttaaagagaactctagtaattttggttttttctttctaactgctttactgtttcaagtgtattcttttaaaactctgatttcaaaggatcagttgagtttatattttagttatgggtgttttgttactttttttttgtatcatgactcagtatggttcagtttcctagtaagaagtggggatttgtgtttttggagtcctcagctcacatatttcgctcctccttcagcacaagctaagggagatcccacccacacggatagatcagtcattgatggcaatttgaatgtgggtattactctgtggtaccctgcttcgcttgtttgtaaggagaaatgcatctggttatgcgaatttcccaagagcagcagacatggagggccagactttaaaagcaatgcaagcagattcaaagagctgttgccctcccctaaaagaggcttttggaggctgcgttacatgcataccctaaagcagtcagtctgttagtatgagcaagacatccgaagtacacagttgcttttaggcttgtatagttattttctatacatgctaacacacatgatgataaaggaaccttttctaggaggcattgcagggtttcaatacacaggacatgttctacttatagaagccttgctctgctgtcaacaattgggaaatgcttattttttcatgttttgtgaatactcgggtcttgctgtaagctaatgtcattggctgtgggagattagagaagtgggtttatgactctgaagaccagaagacaccagactttaaaagggcttaaattggaatttgggaactacagtaaaagaaccttcaggtaccaattccatcctgaagcactctgttgaacaacagggctaggtcctaaagctctttcagggaactcttccctggggctggaacagttgatgcagcaaccccattgtgtggagattggatcaactgagttgtgttatttttgttttaagtcaccttgtgcgagaacctcaactgcacctatcttgggaaccgggtatacccttttctttggcactgccatcctttttgtctttagcacaaataagatgttcaagtgagccagaagccagaagagccattttagtcttcatatctgttggctaagagagataatgagctgatggtctattttaaccttgaaagtaaaaatgtatattttttcactacaggtacattgaacagtaaaaagtgtaacagcaaagtatatatttgatgccttctgtcttttcatgataatgtgctaacaagtcgtgttaatattttactcagccagagtcttattcatttgctaagcatttgggaacattatgtatattgaccttaaacataggtgtcctatatttggattgtgacttgtagactcaagctaaccttactgcctctttttcacacttgttgaaaagtctgtgaagaacgtaaagatctctaactttggaaaatatacatgatgtgaaactggggtgctgtgttaaaaataaatgtatgataactaaaaaaaaaaaaaaaaaa

SEQ ID NO: 5324 - DNA, 772 bp, Macaca Fascicularis
  misc_feature (1)...(772): n = A,T,C or G
tcaatatgaatattatatgcttaaaaaaaaaacaaatttgcacaggtaaattctctcacttgtgaatgggagaagctgcccccaggaatctgtgaggatnnnnnnnnttggagcctggctttgaaagatttcattgttggtagaaataacaggggttaaggaagagggatttagcatcacctaaaacctgcacgtgaataagggttgacatgatacactatggccttagaaaagggccacatgaaaccccaagctaatcactgcggtctttcagagccggacagacaggtgccagcagagcccggggctcgctctcctttcagtcattccttagcccttcaaagggaagcccaaacactttgcacgctgtnnnnnnnnnnnnnnngcctggtgtgtctgaaagttgcatcagtcctcacggtgcaaacacggttcatttaggaagtcacataatgacactgaaatcctacagaccaaaatccacttgtcagcaggagcagcagcccaggcccagcaccagcggtcttccggctcctctgagggctgccatgttgggcgaggggagccatgccaagggtccaggctgctttaggccatctgtgccccactcatctggggacagatggtttttctttattgtaaaattgtggacttttaaaacctgttgactaaacagtaattaatttatatttgtgaaaaatgccactgtcctagtgatttctgatgtaaataatgttgtttatatagtatgtattaaattttcctacattgt

SEQ ID NO: 5325 - DNA, 733 bp, Macaca Fascicularis
  misc_feature (1)...(733): n = A,T,C or G
ataaagagtagtataatnnnnannagagaggctaggaggacagtagggaggtgggtgagagagagcaggggataaaaaggggttggttgatggggtacaaaattacaattagaaggaataagatctagtgttcagtagcacaatagagtgagtataattaacagaaattcactgtatattctgaataactagcgtgaaattagaatgttcctaacacaaagaaataagtgtttgaggtaatgaatatccccattatcctgatttgatcattacacattgnnnnnnnnnnnnnnnnnnnnnnnnnnnnnnnnnnnnnnnnnnnnnnnnnnnnnnnnnnnnnnactactatttatccataaaattaaaaaaaaataaaagaggaaaggaatggaaaataaaagtaaagacgactcatcaaaaattgcaatgtagaagaatagtgcagaatgctgtaaactagtaccacatagaacttaatctgtaattttaaagaaaccatgtaagtatatttactcctggtattgtgtctttctctcttatcctaatttactgtgctgctatagtttaaaattaaagaattgcttttaaattttacagggcaaacagtgtactgtggagatacaaannnnnnnnnnnnnnnnnnnnnnnnnnnnnnnnnnnnnnnnnnnnctgttgnnnnnnnnnnnnnnnnnnnnnnnnnnnnnnnnntttttccttttacaacagattcatt

SEQ ID NO: 5326 - DNA, 715 bp, Macaca Fascicularis
  misc_feature (1)...(715): n = A,T,C or G
gtctggccgcccggctagcgccctctggcggcagcctttccatggggcgctgcggtggcctttctgggccctttccggggggtctgagggagacctgnnnnnnnnnnnnnnnnnnnnnnnnnnnnnnnnnnnngannnnnnnnnnnnnnnnctgtggggcctttgggagattccgtggctgcatgtccaccccatcgagaaggaggccagtcagctnnnnnnnnnnnnnnnnnnnnnncccgtgaccctggaggtggtctggggctgatcttgccttgaggaagccccaggccatgtccccaaaggccagcgggggccctggattctgatgcagcctcgggacagagccgaggaggcctgtgagggaagacatacactccgcacctgagcctggctttgcctcatcttaatcccctgggagggagctgatgcaaaaaagctgagggggcctctgctgggagtggctgtttttgtgccccagccctgcaagtggggagtgtgggggggggtccagagccctctcccagccaggagagaacctcctggaggggttctctggggggccctgtgtcagtgctgtgcggggcctgcgtcccctgcttgggagtgaggctgatcctggggccctccctgcacagccgccactgggcctgctgagcgctgttcttcctcagtctggctgtgggcaggagccgcctgcccagtgctgcccaga

SEQ ID NO: 5327 - DNA, 707 bp, Macaca Fascicularis
  misc_feature (1)...(707): n = A,T,C or G
cgaactaannnnnnnnnnnatcactgtctcctctgtagcacagggtgagtaacatgactgagacaatggttgtgaaggtttagcccccagcctcttcagagtgagggcttgatggatgtaagctatgactcagagttgcggtgcaagaccccgacacagaggtttcgccactaatgtcatccccttcttttccaaaccaagaagatgtattcctttcatgtgcatgccctggggtgnnnnnnnnnnnnnnngggttagggaaggcttgtgacaccactccctacccctgcacagtggcccagttgaatactccaaagcaccaccgacagattctagggggaagataaagccggcctaacagaaacatcgtgtttatgtaaagtccactctggaggctgtgaaatgtaagttatgcttctgtgagttctgctactgtataaacagtagagaattcgtcatcaagaacaaagagaaaaactagcagtgcaagctgtggagagagctccaccatttcaatgcccaaaatctgcacctggctgagtgctttggtcggctacgtctgtgagtcaacgggcttggtcagcagaaagcccattgcgggaggtcaagacaaggaactgaagcgacctggagacaggtccttgaacatcagaagagaggtagtctggcaccaaactagctcaaaaggagaagtatatggcagccat

SEQ ID NO: 5328 - DNA, 1923 bp, Macaca Fascicularis
catgtttaagttaccctttgagtactactcctagagtataaggagaacaaatataaaaatagtatagtcacttaaggtactgaaataaagggaacatactgccaatttcaaaaagttcatactggtctaacttcaaacttttcatttaagcaaaatgtactttttcattttgctttgtcttagggtcaagttgccatttctacagttttgctcaggaaaacagtcttttgtctaggaaagagaaaatactctctactttagccttatgtctttcccaatcataggggtcccaggtcctgggattagaaactccagctattactgccagtacatcaaagggcaaatcaatgcatggactgacctcaggactagccgccttccctttccctacctctcctgtgggaaaatatgctacaatttcaacaactaaaatacatctaaatttttggaactttatgagttttggcctgcccatatttaggtattaatgaaaaatattatatttttatatcttcttcagtaactatatttattttcaaagacctaacagaatttcataataaaatggattcctctaaaaatgctgttactactccaaaagaatgagatttacaaaaatccttataggtgtatctgtttagtaacaagttttgttatttcatacgtttgacatgcataatttggagcaattaagattgtaacatgttgcttaaattcaataaactctcttggtcctgaagctacctttggatttggtggattaataaaatgcatatttcaggaatattgaaatgtaaattatttcataatatgtatgctttaaagaagatacggtaaagattcattgattgagctttgagttgggttgacttcaggagaatctaaagttctgtgaggatttaaagttaagtgcaatgtctttaatctagaggcaatagaaaaaacccaactcctgaagaccaagtctgcccaaaatgatgtttacatactatgttcttttttgtttgtttgtttactttcaccataggccataaatcagtcaagttcataagatgatcttaagaagattactcatttgattagtttaacaacaatattatttggttctgttactctgttcttgatttactctcccaattaaacagcatttttattcagaggtcacctaacaggtggcaaagaggttagttctcctgatggtcttttggaaaagacattctgcagctccatagagacaattagcagaagggctgggaccgagtatttgataaaacactccaagttggaaacaatttcctcttgtaaaacttctgtttctttattgaaagtttataaaaagacaaatgggaaaaaattgctttactatgatgacttttgtaatcaattattctacaaaacagatttttattctgaaaacaaccactataagattacactgaactggtccttttcagtttttaaggttatttttgtatggaagaaatgaaacattacatttgttgtctttctttccttctgtattttcctataagtgcaaattattttttttaaagaaaatattgtagtaaccaaaatagaattgtgctattttgtttgttttgttaaatcatttctctgtagaaaaatgacgtgttgatgacattttttcattgcttttttcctttctactctgtcagatcagtatgcattctgtcgatatatgattgacatgtttgtccatggggatttaaaaccaggtattccaagcaattcttgtacttgtctgttttaatagtctttgtttctaagattgttggctttttatgtacctaactgtattttcattttttaagaattgcataatgcatgtgtagatctagaataaaaccaataaaaagcagcggtaataacttgcaaaaaaaaaaaaaaaaaaaaaaaaaaaaa

SEQ ID NO: 5329 - DNA, 111 bp, Macaca Fascicularis
ctccttccccaccaccaaagcacgcagtcttgaaggttgatttgcaactgtctatacgaacacatttatttctcaaaggggcatcagatcacacacctgtacaccggagtc

SEQ ID NO: 5330 - DNA, 731 bp, Macaca Fascicularis
  misc_feature (1)...(731): n = A,T,C or G
gagtgagatttacgaggcaaagaggactttacacagnnnnnnnnnnnnnnnnnnnnnnagaggtggtcnnnngattggtgcgtgtccttgccctctggacaannnnnnnnnnnnnnnnnnnnnnnnnnnnnnnnnnnnnnnncccacctgccttctgccccgcttgtgtaacagtcccgttttnnnnnnnnnnnnnnnnnnnnnnnnnnnnnnnnnnnnncaccaaatcacaacccaagatactcagataggaagactccctctcccagtactttcccaaaggaaccccggcccccgccccgccccgggacgcacgtgctcacagggcccacgtgttgnnnnnnnnnnnnnnnnnnnnnnnnnngggatctcagnnnnnnnnnnnnnnnnnnnnnnnnnnnnnnnnnnagctgaatcccacactccaggtctgtgctcaagaaaccagatggtgtatttccaaatgggcctctctggtatgggcaatagggaagctcctggggttcggttatgtggaagattcttagtggatgttccacctggttagctggttctcttcagagaatataaagtgaatgcctttaggggtagctcnnnnnnnnnnnnnnnnnnnnnnnnnnnnnnnnnnnnnnngtnnnnnnnnnnnnnnntactgtattgttattgtaaaatgattatttgccatgtcatgagtaggtagatgttnnnnnnnnnnnnnnnnnnnnnnnnnt

SEQ ID NO: 5331 - DNA, 779 bp, Macaca Fascicularis
  misc_feature (1)...(779): n = A,T,C or G
tcacagaaaccaatgagaagagaacagttagtacncagannnnnnnnnnnnnnnnnnntgtaagaaactgggcttatcctatcnnnnnnnnnnnnnnnnnnntggaaaaactggtttgaaactttcacagatctcagctttcatctgatgtcactttnnnnnnnnnnnnnnnnnnnncctcttaacctggtcnnnnnnnnnnnnnnnnnnnnnnnnnnnnnnnnnnnnnnnncagtggcactttattaaaacatcagctgtggagtgtggcagcgcacacctatagtcccagctgctcgggaggctgaggcaggaggatctcttgagcccnnnnnnnnnnnnnnnnnnnggacaacatagcaagattccttctctaaaaaaaatgaaaataaacataagccacaaggaacgggtgaaagattattgtaatgtgctttaactacataggtaaactatactaaacaaatgctaaaactcagttttaggatgnnnnnnnnnnnnnnnnnnnnnnnnnnncctgtttagaaaacatttaaaacgacttttagttatgtacaatacgttggcagtgaatacatgaagcttcaaaatttggtagtgctcttgaatatgtatatttgtatttttcaagcgaagttctcttacatatacnnnnnnnnnnnnnnnnnnnnnnnnnnnnnnnnnnntgtttttagaacagacatttcggtcagtnnnnnnnnnnnnnnnnnnnnnnnnaatatgatgactcaatggattnnnnttttaaaaatattgtt

SEQ ID NO: 5332 - DNA, 3132 bp, Macaca Fascicularis
  misc_feature (1)...(3132): n = A,T,C or G
taaatatttcagaactattggatgactcttggctatgtccttagctagttttaagttgcttattgtatgaacagcgtgtatgtttgaaaactttgaagtaaaaactttgaaataaaaataatagaatgtagaaaaacaatttggagaatacactagttttgtttttcttgtttcttgtctgtgtgttcaaaaccttcattgtcttggatcatctaggttctcacaatttaaagagactttgatgagtgtagtctaacatgttttagggaaatctacaaattgggaacctagtctagaggacacaactagaaacttagagtatataattgggcatggagaacctggtttcattctggctttgccacagattggttgtctaactctgggcaagtagttttaactcataatctctaggtttcagcttaaaagtggaatctggagtaattggtgtctgtggttccttttagttttaaagttgtctgattctgtggcttggccctttattttacctacaggttggcctataatctttatcttggctcttggggccaggcattaaccaagcccttaacttatgtatttaaatcatgattgtcaggagattctggggagcagttttatcaaaaggtcagtgaactgagttttcaaagaagatatattgaaggcagatgtttatttatttggaatgttttcacaagataggaagtaagtatggggatgttgcttaggtctagctcatccagttttgagacctaacctacatagccatgtgggttctaaagatagggtaataattaggagctttattaagtgcagtttacatctcctgcagtatacttctgtttcaaatcatgatgggaacaaacaacaacagaagtaaccccccaaagaacatcttaacaggaacctttagaaacaatattttattagtttgcctcacaaagtttgaagactagggactattttgagtttgttgttgataggtttggctccttggttgataatacatatatattgtgtacatatgtatatattgtcataatacatatactcagggttttgtgtattgccatgatttggaaaacttttctggaatatgttcagagctttataataggtggatctatatttagaacacaaactaatgcacatttttgagacgtggctgagagaaaaatatttatgctgtctgtcctaatcttcattttcttttagttgtaaaatgtttcatttgttgtattccagtattataaattgtgcccatgccttgtcaagactatacaatttttgacatcagggagccttgtttatctttgtattcctatcttgccacccccttcattgtcaacttgtctgccagattggtaccttgctcatagtaagtcaatgtctgttgaatgttgatccatttgtcctttgaccatccagatctcaacctgacagattgtatgggtggtagagtagcttaaacaaaggcatgccacaaacagctaaatatggatacagaatccaagagcatcaaatgcagaacatttttcagatatttatagcctcaaagcaaagtcaattggctgaaaaagctcagcagcatagcgaaaggaaacgggagtggcgaagccagcctcactgtctgtgctttctggtaaacaatgagaacattaaaattaaatactttaccatgaatgggtggggagtgtaggacactctgggagaaatttaagatcccaatctctaggactccttgcggtggagctctgcactcatcagtgtgacagatctgcaagtatgtgttcagatatgctcttggagagttagaagggaaatataatcagcacaagaaagggatcaacaagaaatcttgtacttttacattttagtattatcagaaggaattaggtaaaatattctgttaagaaaatgaatagcatcaacattattagcattaagcgtgtatgcagctcattgtttattgataacaacgtagagacctgctggaaaatttcaaagggctagtactatttaagcaaacagaagaaaaagggaattagtcatacatcattaagtaccttttaattccagaaatgtggtagcgggaatttggtaagaattaataaaagttcatgaagtgaatatgagctgatgagacagaagtcttatctggttgtattatgtgatactgcttatgcctcaccaattacgacacaggatgagatttttaaaagttacatttctggagggtatgtctctaaatttatttaaaatgttgcaactagtattgctagaagaaaatcagtgaatgtgtataaaatacatccccaaacatgttcatgttacttaaatgttttaatttcttcaggtactattgattgaatctttatacctgagtagtcatattttagaaatgtttggaatcttaagcttgaattcaatacttaggatgtggcatgggcttgttgatgttattagtttccagtgatttccaaataccttaaaacacattaagagtagagagtttttcattgaaatcagaaagaacttctaagaatgcctaggcatgtactgtttaagtgactttaaatggctcccttttttcttcttttgagagaaaatttgtatgtcttatataaattgtgtgctctattaatgtagatgatactttcatttataacatcttagtattgttctaccctctatcatgttggtttattgctatttgattttcaaacagtgaaaatatttttggggaatagaattatacatccacaatctcttttccacaaccatttggactagacagttagttaacatttctgcagggaaacaaatgaataggccgggcgtgnnnnnnnnnnnnnnnnnnnnnnnnnnnnnnnnnnnnnnnnnnnnnnnnnnnnnnnnnnnnnnnnnnnnnnnnnnnagcctggccaacatggtgaaaccccatttccactaaggtacaaagaaattagccaggcgtggtggcatgcacctgtaatcccagctacttaggaggctgaggcaggagaacagcttgaacccaggaggcggagattgcagtgagctgtgattgcgccattgtactccagcctgggtgacaaagtgagactgtctcaaaaaaaaaaaaaaaaaaaa

SEQ ID NO: 5333 - DNA, 188 bp, Macaca Fascicularis
tgaaactttagcaatatttcactccttgaaaggttaaagcccaaccatggtgatatgttagctagaagaaacagcactggtttagagtatgttactaactttcaccaccgagttttcagtaggtaaagtaaaactgatcattgaacagaaaaggttattttgtgatgaggttgagggagtagtggaaa

SEQ ID NO: 5334 - DNA, 765 bp, Macaca Fascicularis
  misc_feature (1)...(765): n = A,T,C or G
cagcagagtgctgctgcttttatctagtaatnnngatatgtaagtattaatgcatttttaaaagatgtctacattgaaaaaatgttcttcccagtgtcctgcttatgatgttttgttcagattttttgtaagagaccagttagtacactgggggtgcgtgttgtgtacatgtgtcatttttgttagacattgttgaccaaatgtgattataaatgaagttgatgaacattaattttgttattagtgagttttttgaattgtaagtggatttccagtttacccnnnnnnnnnnnnnnnttttttaagatttgactaattggatccatctcattgtacagtgttttagttgcaaacagaaagtagaatttggtataaagcaggttatttctatattgaaaggagtacagttgaaattgtggatttaagattgttaaaatcatgacaattctaacttgtctattctaacctactgtgtacaatctgattttttaaaattgtaaacatgtatgatcttggtttcatgtgtttttgaaagtgttattgtttaaaaaatgaaaaaaaagcatatctgctaaagagctgtcagttttcattactgactctgtaaaatacactgttccttgtgtactgtgtgtnnnnnnnnnnnnnnnnncattagccttcagaagtatttggaaacttaagatgaactacatttcttgcaaagtacattcctttctgtggtattttgtcctgtaactgaagtatagtaattattttatggac

SEQ ID NO: 5335 - DNA, 734 bp, Macaca Fascicularis
  misc_feature (1)...(734): n = A,T,C or G
caaagctctatgtgtttacatattatttctgtagatgattttcaggagtaaattttgcttccatggtaagagtgagcactttggcttatgtataagttagaaattattgttagtttttaatatgtacttcatggggaaatttcttagacatatacaagcaagtgaaaacaattagggccagtggtattaactactttctaaaatcttatttttatttgtaagaagtcatttacttaaggcccaattaatataagtggaatcatcatcgtttgtttaaggaatacccagagattgctgctgttctatttattttacagaaaggnnnnnnnnnnnnnnnnnnnnnnnnnnnnnnnnnnnnnnnnnnnnnnnnnnnnnnnnnnnnnnnngcattattctcatgtcataatgagaataatcatttacatacttggcataataaatgcctaaaagacattttattttctgaatctattttttttcttgctataatggggatattgtaaattatgcatttgtattaatggtatttcttaaagcattctgtgtaactgtaaaccaatctacaaactattgtaggcatttgtaaattctgttgtaggtattataaactttgttgaagtcttaatcagcagattatgttgtgaatatatttgtacattgttaaaatagtttttaagattatttgtttaattgaataagtgtcttattggagtgatagctttgaaggtgcaaaa

SEQ ID NO: 5336 - DNA, 733 bp, Macaca Fascicularis
gtcatgcccggggagccaccagcccctcactgggttcggaggagagtcaggaagggccacgacaaagcagaaacatcggatttggggaacgcgtcaatccctcgtgccgcagggctgggcgggagagactgttctgttccttgtgtaactgtgttgctgaaagactacctcgttcttgtcttgatgtgtcaccggggcaactgcctgggggcggggatgggggcagggtggaagcggctccccattttataccaaaggtgctacatatatgtgatggggtggggagggaatcactggtgctatagaaattgagatgcccccccaggccagcaaatgttcctttttgttcaaagtctatttttattccttgatatttttcttttttttttttttgtggatggggacttgtgaatttttctaaaggtgctatttaacatgggaggagagcgtgtgcggctccagcccagcccgttgctcactttccaccctctctctacccgcttctggcttctcaggcctctgctctctgaccgctctcctctgaaaccctcctccacagctgcagcccatcctcccggctctctcctagtctgtcctgcgtcctctctccccgggtttcagagacaacttcccaaagcacaaagcagtttttccccctaggggtgggaggaagcaaaagactctgtacctattttgtatgtgtataataatttgagatgtttttaaatagcac

SEQ ID NO: 5337 - DNA, 712 bp, Macaca Fascicularis
  misc_feature (1)...(712): n = A,T,C or G
tatatgcaggaatcctttgaaaatgtgatnnnnttgatgggagaaagggcaaattattttaatattttgtattttcaactttataaagataaaatatcctcaggggtggagaagagttgttttcataatttgctgaatttcaggcattttgttctacatgaggactcgtatatttaagccttttgtgtaataagaaagtataaagtcacttccagtgttggctgtgtgacagaatcttgtatttgggccacggtgtttccatttctcaatcagtgcagtgataaacgtactccagagggaccgggtggacccccgagtcaactggagcaagaaggaaggagacagactgatgttgattccctctcagccgggactctccccctttcaaggagagtgaacgtaaaggcctcatctcctttattgcagttcaaatcctcaccatccacagcaagatgaattttgtcagccatgttttggttgtaaatgctagtgtgatttcctacagaaatactgctctgaatattttgtaataaaggtctttgcacatgtgaccacatacgtgttaggaggctgcatgctccggaagcctggactcttaagctggagctctcggaagagctcttcggtttctgagcataatgctcccatctcctgatttctctgaacagaaaacaaaagagagaatgagggaaattgctattttatttgtatc

SEQ ID NO: 5338 - DNA, 1767 bp, Macaca Fascicularis
  misc_feature (1)...(1767): n = A,T,C or G
ttttaataaaatattttgtcagggagcatgtaattaacataagaaatcattaatgagatattccacattttctttctttttttattttttgatactaagtcattaatatctggtgtgtattttacacctataacatatctcaatttggatgctaaattttcattggaaacatttgaattccaatgaaatcaacacaataaatactatgtttatattttataaaatgtacagtaaaaaaatgtagattacatacccaagttgttatgaacatatctgcatatctggaagatttctaacatctgagtcaagtaccaaaaagtcatttccttttctattctcatccaaattgttaaaattgcttgaatttaacatttttaatttcactttcaatcaattaaaatagagttaaaattttaatttctaacgttgccctagccacatttcaagcctcagtagccacatgtggctgtggctgccgtgctggacagcataggtctaagcactttactactgtgaggtaggtgctgttattatcttcacttcattctcagcaaactaacaaaagaacagaaaaccaaacgccgcatgttctcaccacattgttcaagtgggagttgaacaatgagaacacatggacacagggaggggaacatcacacaccggggcttgtcagcggggggctaggggagggacagcattaggagaaatacctaatgtagatgatgggttgatggttgcagcaaaccatcatggcatgtgtatacctatgtaaaaaacctacatgttctgcacatgtaccccagaacttaaagtataatttaaaaaaaaaagaaaagaaaagaaacagaggcacagagagtcgtaatttgcattagtgcactcagctgacgaactgaattgtttcatttgtcagaatgctttcatttgctcagaatggttgatttgtccaaggtgactttgctaataagggttagaaccaggagttgaactcaggattgtttatgttcatagcctaagtttttgctatggtgctcattgctctacacatttaattgctcactattatcctaaaatccttcattgatgctggtcttttttgtcagactgttacctctgtctgtattgccttgcaaggtccattttaagtatcattcattcacccatttattcagtcagtaagttaatttctttttccagcaaatactgttagccatttttcaaatatctgccatgtagacaatagctgtgaacaaggcacacatggcctctgcccacacataacttttagtttaacagcacttctcgaacttttaaatctccagaccctataacactctaaaacttgttgaggaccccagagagcttttggctatgtaggttatagctatcaatatttattgtaatagaaattaaaactaggacattttcaaaacatttatttatccattcatttaaagataacataatatggcnnnnnnnnnnnnnnnnnnnnnnnnnnnnnnnnnnnnnnnnnnnnnnnnnnnnnnnnnnnnnnnnnnnnnnnnnnnnnnnnnnnnnnnnnnnnnnnnnnnnnnnnnnnnnnnnnnnnnnnnnnnnnnnnnnnnnnnnnnnnnnnnnnnnnnnnnnnnnnnnnnnnnnnnnnnnnnnnnnnnnnnnnnnnnnnnnnnnnnnnnnnnnnnnnnnnnnnnnnnnnnnnnnnnnnnnnnnnnnnnnnnnnnnnnnnnnnnnnnnnnnnnnnnnnnnnnnnncaaaaaaaaaaaaaaaaaa

SEQ ID NO: 5339 - DNA, 769 bp, Macaca Fascicularis
  misc_feature (1)...(769): n = A,T,C or G
agaaatgggcacagcatgtgccagnnatgtggcaaacattcctaacaatctcacttctgggctgggaatagttctnnnnnnnnnnncactatacaatagtgtagctttatctccattgggctccagacctacnnnnnnnnnnnnnnnnnnnnnnnnnnnnnnnnnnnnnnnnnnnnnnnnnnnnttcagttgacnnnnnnnnnnnnnnnnnnnnnnnnngatctatcctagtatttgggacataatatgtcnnnnnnnntgcaaataaaaagcataatttaacttgagatgaaaaaaagtgagaaaaaaatttaatttaatacagaaataaaataaaacattccaaacaagcaatttgtaagaaaatgaaacttatcttttaacaggtttgtgagtaaaacccttctaaaattttgatatctctctgccttcttaaatggagtattcaaagcacagttnnnnnnnnnnnnnnnnnnnnnnnnnnnnnnnnnnnnnnnnnnnnnnnnnnnnnnnnnnnnnnnnnnnnnnnnnnnnnnnnnnnntacttctaaataaactgatccacaacccctcattcaggnnnnnnnnnnnnnnnnnnnnnnnnnnnnnnnnnnnnnnnnnnnnnnnnnnnnnnnnnnnnnnnnnnnnnnnnnnnnnnnnatgtacttctatcgacatgcctaatatgtctatgtatttatgtgttgtgtacacaatgtttcagtaccactttaaaaagctctaattaattggcttaagaaaataaaag

SEQ ID NO: 5340 - DNA, 839 bp, Macaca Fascicularis
  misc_feature (1)...(839): n = A,T,C or G
gcgctggtgatgctgggnnnnnnnnnnnnnnnnnnnnnnnnnnnnnnnnnnnnnnnnnnngagggccagagcgagggcagctannngctgcaccacctgccctggcttgtaggcagcctgggcgtgctgctgctcgacaccatcatctccatcnnnnnnnnnnnnnnnnnnnncagcgccgccgcctcggagcttgagcccctcctcctccccagctgaccgaggccggctgagcgcaggaggacggggaccaccggaagccacaccaggcagggggaggtgtgggcagtgatggtnnnnnnnnnnnnnntcagtgtgtgggcggcctctggatcccccatggaccgaaccgtcccctcnnnnnnnnnnnnnnnnnnngtagaccctgaagcctcgaggccgggactggagcggagaccccagacaaccgagtaaacactgcccctcctaccacctacctcattctgcctactcaccccagggnnnnnnnnnnnnnnntgcgggactcaggactgtcctgtcaaccccagacaactgagtaaacaggccnnnnnnnnnnnnnnnnnnnnnnnnnnnnnnnnnnnnnnnnnnnnnnnnnnnnnnnnnnnnnnnnnnnnnnnnnnnnnnnnnnnnnnnnnnnnnnnnnnnnnnnnnnnnnnnnnnnnnnnnnnnnnnnnnnnnnnnnnnnnnnnnnnnnnnnnnnnnnnnnnnnnnnnnnncaaaaaaataaaacaggagaattgtttgaacccgggagacaggggttgcagtgagctgagatcgtgtcactgcacttcagcctggggacagannnnnnnnnnnnnnncaaaaaaataaaa

SEQ ID NO: 5341 - DNA, 697 bp, Macaca Fascicularis
caaggcacttcactatgcctcagtttccttatttttaaatggaggtaatcatagtacctacctcagtgttgtgaagatttaatgagataataacctgcagagcacttgacagagtctcaagaaatatgagctcttataacattattgctattataaaacattgctattgcttctgccccaattggcagtttcagaaaattgagaaggaatatcactgaatctttaatgccagttacacagagctcagtaggtgtccgcaaagccctttagatgcacgtagcctatttgatcttcatatcagccctgtaaggttgggcttaagaatgacccatcatggaactactcttgggaccacaggggaagtgacagtccttgtaagctgtttgtcagtgggccttagcaaccaggccccaagtggacagaaagacagggttctgtgagcatccattccaagggtcactttaggagttcaatcttctgggctctgagaatggattcatagcagtacctctatctgggaaatacctttgctttgtccaagtaacctcctcccacacagagtacccgaatcaactcagatttttttttcttaatattggcaacacttaatgctacttctttgttcgtaacatttcatttaattatttaaaaatctgcaaatgttgtgtatattttaccgcaatttttaaacaatctc

SEQ ID NO: 5342 - DNA, 561 bp, Macaca Fascicularis
  misc_feature (1)...(561): n = A,T,C or G
aaaaggggaaaaaatannnnagaggtgggaacaccatctcgtacaaagaaacggtaaaggtctttataagtccagagcccagagtttgctgtttaaatccaagtaattcaatcagggcacccaaataccagcccagaacaagacaaaaagcctacattataacatggttaaactgctatttaaagacaatgcattctatgtaattatctatgactcagttgatcagctatgatgcnnnnnnnnnnnnnnnnnnnnnnnnnnngttgtcttgtgtgaagggcagcatatcaacagaatattatcaaggacagtatcccttgaatnnnnnnnnnnnnnnnnnnnnnnnnnnnnnnnnnnnnnnnnnnnnnnnnnnnnnnnnnnngatattacttcaagcacttttttagcaccagaaatcttgaagttcttaaagccaaagtatgcttgaatgtttgtctataaaacattatgttaaaatatttataaagaaaaacagtgccgggcacggtggctcacccctgtaatcccagcactttaggaggccaaggcagggatatcacg

SEQ ID NO: 5343 - DNA, 616 bp, Macaca Fascicularis
  misc_feature (1)...(616): n = A,T,C or G
tatctgatatatgaggtacgcccgcaaggtgtaccttcctttggtgagagatggctgttggggcaaagacgggctttgattcagaacaagcattcccacctgttccacggaatttccccgaagtgagcacaaaggttcccttggctccctgaatgtttattcccactccttttaggatggtgatacacctcacacacaaacacctaatgcaatgtctttgaaaattttccaagttggaagggagcatcttcgggaaatttcaatttaaaacccattaatgtgctgaacacttttttttttttcccaacaacaccttggacctttgtgttggggtttgattgacctcaagatgatattgttgaaccttgtgcagctttgataacccatgcaagagtctaggcagggccagtggggcccaaatcttgttgctcttttacttttaggcactgcccctgcagactcgcctttctccacccgccctggagaaaggtagggtgctgggcctgccccttgcaaatggggttcancngntttcatttatttgactctactgccacactgaaaagagcaaacagctcttgggttgcaagcctctttgacattaggaaatgctgac

SEQ ID NO: 5344 - DNA, 639 bp, Macaca Fascicularis
  misc_feature (1)...(639): n = A,T,C or G
aattatcttcctgattctttattnnnnnnnnnnnnnnntcctcttctatgttctgtagtgacagaatgctaacttttcttacaccctggcagaggacaggagtctggtctaggatggggaactgaatttttgaacgaaaagggaagagaaaggataaagaaacaaacaaaacgcacaatcatgtttcttagtcattttgattggccgtttgaacagtctacaagtttaacgttatttctagtgaagtaagatgcctgccctagcaatacatgtttcttcaaaagcgtaaatgtgctttagtgacctaaagctaaattctgttataagtactgcacttaatacaaagctatttctcagttgtgttatttttgagccaaattcttcttcaccatttaacttcttgttggtagctttttgttttgtaaaaattgagagatggcaatgcttatgtcaaccagattatccatctgcagaattaaggtnnnnnnnnnnnnnnnnnnagacaaatgctccagtttgtctttctcagcctttgagttcttaacctttgagttaaaacctagcctaaatagtgggaatgtcgtggnnnnnnnnnnnnttttcttgggaaggatcttggttttgtgatctatttgtgaa

SEQ ID NO: 5345 - DNA, 1028 bp, Macaca Fascicularis
  misc_feature (1)...(1028): n = A,T,C or G
gagaaatcactctnngtggagaaccactgacccaactgaatnntaaaccaatcaaaagtgtgggaagccctccctgtctcccaaaaaaaaaaaaaagtagaaaagcacttgaagaatattctcaatattcccagtcagcagtatcaagcctgacttgtgttcgtgtggaatcattataaattctataaatgaattattccccttcagtattcaaaaatatatttcctcataaacatatgagttttgtggaaaggatggagtttacaaagataccattcttgagtcatggatttctctgctcacagaagggtgtggcatttggaaactggaataaacaaaannnnnnnnnnnnnnnactgagtgaaggaagagagagagaggagccaagggctttagacagtcctccttcaatatgcaattacagagaaagatgcgccttatccaagttaatatctgtaaggtgagagccttattagagtcacgtttgttgcaaatttcacatactctgttattttccatctatccccctgagtcagttggttgaagggagttattttttcaagtggaattcaaacaaagctcaaaccagaactgtaaatagtggttgcaggaattcttctctaaactgctttgccctttcctctcactgccttttatannnnnnnnnnnnnnntctttgcacaccttttgttgtggttttatatnnnnnnnnnnnnnnnnnnnnaaactattgtatttaaagtaaggtttcatattatgtcagcaagtaattaacttatgtttaaaaggtgaccatatcatgnnnnnnnnnnnnnnnnnnnnnnnnnnnnnnnnnnnnnnntaggagtttgcatgacttcacactttttgttgcgtagtttgttctgttgtatgatggcgtgtgtgtgtgtcttgggtactactgtgtactactgtgtgcctagattccatgcactctcattgtgtttgaagtaaatattggagacgggacggtaactcataaaaaaaaaaaaaaaaaaaaaaaaaag

SEQ ID NO: 5346 - DNA, 749 bp, Macaca Fascicularis
  misc_feature (1)...(749): n = A,T,C or G
ccttttcactgcaattngnnncatgtaaannntnnccattaaactctataacttttaataactatatattatatatgggataaaatatatggactgaattgtgagaatataaannnnnnnnnnnnnnnnnnnnnnnnnnnnnnnnnnnnataaggctggagatggtcccagatccaagatgtcccaaaagccttttgtatcagtttctctatttttggtattttgcataatgcatggatccttagttcaaatgagggacacagtttctcagccccacttctttctttccaactcctacctttcccttgcagaggaggtagtagagattctgaattatctattatgaattctattattttgtccatggcatctctaatgaaaacaggttctagaataaaggagttgattagtctgaacagtactaattaactacaaaaatgtnnnnnnnnnnnnnnnnnnnnnataaacgatgaccaattagatgtttccataattccatgtattatgtatagtacactctataaatgtaaatgtaatgcttgtctaaaaagtgcaatttattgtacattgtcccaacaaatgtttacttttataattgttacgaacttgaattggattagtattttgtttttatgtgtgaatgaagccttgtgaaataaacaaatgcaactgagaaggtaacaaggtgactgtttttgtgagccagtgatgttttcaatgctttgtgttgcccctttggccccataagc

SEQ ID NO: 5347 - DNA, 1950 bp, Macaca Fascicularis
  misc_feature (1)...(1950): n = A,T,C or G
tcatgaacagggtaggttggttcttgtggtagagaaatcattaatccaagtaagaagtcacccagctgggtattctggaacacagaaggtaagactcttttgtggagagctgtgtaaacaaatgcctaactcctaacataaatgtaagatgggccagctaaatgccctttgttgacttaatacaggagctaagagccagtgactgccatcccgattccactggggcctaaactccaggaaagtagcagtagaggttacaaaattatattctaatggaaatgttgcatttccctgtagtgaatccatacaagtagggcaaaaagtgaagtgtcttttattgtagctggaattatattacctcaatccaaacagtataatttattccataaaagacaaaattagcttaacaaatgaactttacttggttatcaaagtattttaaaatatggagaccttggggataaattaatacaggaagttcttggtggtaaaaggtggagaccatcattgtggaatctcgcattttctattaaggtttgtaatagtcctacaaacttagacataaatttttaatatttgataaggaacattcactgaagaattgataatagactcaaaaatataactgttatcgattaatacatgatctgtccttgaacacatattcgccattatctaaatctcacattatttagtttatttattccgcagataccaatagacatgttttcacattgtggcatctcccaaatcaaaatacttctaaaaattggtagtatgtcagcnnnnnnnnnnnnnnnnnnnnnnnnnnnnnnnnnnnnnnnnnnnnnnnnnnnnnnnnnnnnnnnnnnnnnnnnnnnnnnnnnnnnnnnnnnnnnnnnnnnnnnnnnnnnnnnnnnnnnnnnnnnnnnnnnnnnnnnnnnnnnnnnnnnnnnnnnnnnnnnnnnnnnnnnnnnnnnnnnnnnnnnnnnnnnnnnnnnnnnnnnnnnnnnnnnnnnnnnnnnnnnnnnnnnnnnnnnnnnnnnnnnnnnnnnnnnnnnnnnnnnnnnnnnnnnnnnnnnnncaaaaatagaaaactggtagtatgtgtcacagtttgcagaaatttttcctactgctacataaaattaagatattttacaatctatggcatcttgtatttgacgaaacatggtgatttgagtaacaactatatgccagtcactttgaagctttggagcttataattgtgaccaagatagactgagtccctgttaacaagtttatactgtagcagggaacatagacagtagctatagataaatcttgattattgtaagattctgtaatattagagtggggtagtcaggaaatttttttttaaggagcatttcagacatacaaaaataaaatagggtaataaacctccatatacccatcactcatcttcagtatttatccgttcatggctaatctcacttccacctatattcctacccatttatccatgccaaattattacgaagttcattccagacattatattttatctgtaaatcagtatatcttaaaaagatgaccacagcatcatcacacgcacacatcaaaataatcgggaaaggacttctgattccaaaagatggagtaaacatacttttctctattcttccttctaagctcatttaaaaagccctgaacattatatgtaaaacagacaagaacactttgaaaggtggaaaaaagaaggcagaatcgctagagaccttgggaatcaaggaataaaatagtggtgagttccctggattttcttactgccttgtgtatcccatacttactaccggttactggagaacccaacaacctggaaaggctgcatacagacaaaggttcgagaacagcccgttcgctgtagctaaaggaccaggaaagtgcaaccaaaagcaatgacacattgtctacaagcaaaccaag

SEQ ID NO: 5348 - DNA, 658 bp, Macaca Fascicularis
  misc_feature (1)...(658): n = A,T,C or G
gaaaaaaaaaaaaaaaagaaaacaatatttccttgttctggattatctgggtggcattttagtttttctactttgttgcctatataggcataatctgaggcaaatgtgaagagagaatttcagttggggaatggtcttctnnnnnnnnnnnnnnnctaatcccaatctccagctttgtgcttttaagaggatattttaaagacagtcagaaacctccatctttagcnnnnnnnnnnnnnnnnnnctgtgacttggacctaaatcctagggagaacatctggactccagtttcctatttccaatcttgagtcggagttagaggctaaatgggtttaagaacccaatcagctttaaaaaggcaatttgaatatagataaaatagcaagcttatnnnnnnnnnnnnnnnnnaggactgagagagattgatgagcaatgcggattcacccaggttcagacacctcacattcaactagatcacatttcttacaactgtgatgttagaaagtctgtttggtcattctgttttgaaattccttgtagaaaaggaagattcagggaataaagaaggcgtgtgaaagtattaaaaaggagaggtaataggaatataatttgttggcttgaaatgaattctggcgctagacctggatatgcggagtga

SEQ ID NO: 5349 - DNA, 709 bp, Macaca Fascicularis
  misc_feature (1)...(709): n = A,T,C or G
acaataaacgctgaaaggccagtgccgagtccacannnnnccagctgatacgttgaagcaaactcttactgcctttctcctggtttcatgacagtgttactcctttttctataaatatatttttaggaannnnnnnnnnnnnnnnaattgtatcacattataagaaagcactctgtggatcaacctaagtgggtacacaagaatttttttttcttggtgtatgtaagcacatttgttcctttatatctgtttacaaaactgtgaatcaaaaagacaaaactttcttcctagtttttgtaattttttttttgaattagcatgactgtagggttgagctacagtcaacaaaaattgggctaagtcacttttccccaggaaagaatatttccctctcctgcatcaagtctgcgtggccatcctccccccaccatccaagactattaggttttgtcccagcactcctcactggcatcctcannnnnnnnnnnnnnnnnnnnnacagtacaccttagtatgtataactggctttaccaaattgaatgaagaggagcttgtgcaaaaaaatttaaaaatggatgtcaagatgttatgtaagagattagtgtaattgtgaaatgttctatacactatcaaatatataaagctttctatattgaatgtacattatacagatcattcatatgtgtacataaaatttaaaaataaaggg

SEQ ID NO: 5350 - DNA, 684 bp, Macaca Fascicularis
tgacagagcaagacactatctctaaaaataaatatatgtgtgtgtgtgtgtgtgtgtatgtatatatatatatatatataagtatcttcctctattataatttaactgattaagccatttatttagatggaaacttggccccctgacatgtgccatgaaacaaatagaaacctagaaatttagtgcatattcaaatattaagacagacactggtgtggtgacttttgtctctcccttcattgggatgttttttctttctgatcaacttaatgaaggtataattaactgtaattaagtgtagccatttttactgtagagttcaatgatctttgatgaatgtgtacacccatgtaaccaccacccccaatcaaagtaaagaacattttcttaccagaataaatttcctctccctttgcagtcattctccccagccctaggtcaccactgatccaccttctgttactggaaggttagttttcttccctgatttagaatttcatataaattaaatcagatagtatatactcttgtgtttagtttctttagcttagcatgtttagagatacatgctgttgcgtatgtctgtagctttttgtttttattgctggctggtatttcattgtaatataccacaattggtttatgtatttgctgatggatatttgtgttatttctggtgtggga

SEQ ID NO: 5351 - DNA, 650 bp, Macaca Fascicularis
  misc_feature (1)...(650): n = A,T,C or G
tttggctcaggaaatgactnnnnnnnnnnnnnnnnnnnnnnnnnnnnnnnnnnnnnnnnnnnnnnnnnnnnnnnnnnnnnnnnnnnnnnnnnnnnnnnnnttataataatagtatttgtactaaatatcaaaagtattttgacaagtttctttttaagatagtttctaaagccttaccctggctagagatgttttgtacaaattatatagagccagccttatctaccaacnnnnnnnnnnnnnnnacaatcaacaatgtggggaaagtcagggcagtgaaagtggatgcgctctttttatgttgagggcttaaaccaaattgtcttggaatgaaagctgtatttctgcagctttcagcacagagaaaaagaggtaannnnnnnnnnnnnnnnnnnnnnnnnnnnnnnnncacaacatgtttaagaaaagatagatgaagtcatttgcataaaggtacagcattgaaatactacgttgtgtttgtttttacatttttgcattaaagaaaaaacatgcagtaaaagccaagttacatttcacattaaagcaagttctagtatatgtgttgagttcctggtaatcacatacttattcacatctacatcatacttcatagtatgatttgtcaggggagggactgtggggtcaca

SEQ ID NO: 5352 - DNA, 671 bp, Macaca Fascicularis
  misc_feature (1)...(671): n = A,T,C or G
gatggggatggcnnnnnncnncatgacagaggcactgccgggccccgggtctgtgggggctgtgctctcggggcgtgtgtgggatgccagctgcgcacacctgctcagagcacggctcctcacgggggtgaaggggcagaccaacgaaaccagacgagaccaaggaaaccagacgagacacgcttgcagacactgttgtttaggaaatgtggttccctccatccgaaatctaatccatccacctgcnnnnnnnnnnngttgtgttnnnnnnnnnnnnnnnnnnnnnnnnnnnnngcaccccggagattctcctgcaccttcctcacgctgcacactgctcatccgtctccgtgtgtgtttagatccacgccattcactgactcactaacacccgcagaatcattaaaggaggaaagctgaagggcacgaccannnnnnnnnnnnnnnnnnnnnnnnnnnannnnnnnnnnnnnnnnnnnnnnnnnnnnnnnnnnnnnnnnnnnnnnnnnnnnnnnnnnnnnnagtaatatataatgtataaattctgcactgagtcgtggcggagcggggcagcccctcggttagagtggnnnnnnnnnnnnnnnnccaggggtcacacctcatctggtttccttcccatctcacagcttagcttgtgcttctcaacacca

SEQ ID NO: 5353 - DNA, 2276 bp, Macaca Fascicularis
  misc_feature (1)...(2276): n = A,T,C or G
gttctgtgcatgatgaactcactgagggcactggacacaggctcacacagggtctgtattatggtgctaatttgggccactatacctcgagagaattaacttactttaaactccactgcagacatttataaaatgaagagtaagacaccatgtattcataggatttttttttaaaaacactttattaattccgtttctcttatcttcatctcttttttcttctccttttctctctttgttttcttttcagtcagttcaacaattaattggtgttctcctacaatgtgcaaagcagtatgctacggttcacaggggaatgcaaagaggatgctgcttatagcttgttgtggcgaggaacttttcttctctcttttctgttctccatttttctccattcttctcttcttcctaccttctttttcctctgatgttcaagtagccctcatcatttccataaatttccaaggcttcagctttggtcaaagggaaggcactcagcccagggccagtgaacgagtttaacattcttacggtcctttgcatctgcacacccagggctcataaatactcaatataaaagctttgggggttttgctctgtgacagctggggactccatgtaatttaatgcatgatacagcacttttggctaactctgtatgagagactactcaaataggaataaaatatcactttgcaaaatacatttaaattattttccttctaaaactttgtgactttaaagccttaaaatctattttttgaaagtcaaaaaataacagatgttggcgaggctgtggagaaaagggaatgcttatacactgttgttagaaatttaaattagtttagccactgtggaaagcagtttggagatttctcaaagaacttaaagcagaactaccattcgacccagcaatcccattactggctatatacctaaaggaaaagtaatcatcctaccaaaaagacacatgtgctcactgttcatcttagtactatttacaggagtaaagacatggaatcaacataggtgcctatcagcagtggagtagataaagaaaatgtggtacatatacaccatggaatactacatagtcataaaaaaaatgaaatcatgtcctttgtaacaacatgggtgcaactgaagaccattatcctaagtgaattaatgcagaaacagaaaaccaaatatcacatgttcttacttgtaagtgagagctaactcttgggtactcatggacacagagatgggagcaatagatactgggaactctagaaggagagggggagggggacaagggctataaaacctcctgttgggcactatgttcactctctgggtgttgggatcaatagaagctcaaacctcagcatcatgcaatatatccttgtaacaaacctgcacatgcatctcctgaatctaaaataaaaaaatttttttttttttttttgagatggagtctcactctgttgcctgggcaggagggcagtggtgcaatcttggctcactgcaactctgcctctcgaattcaagcaattctcctgcctcagcctcccaagtagctgggattacaggtgtgccaacatgccagctaatttttgtatttttagtagagatggggtctactatgttggccaagctggtcttgaactcctgacctcatgacccgcccgcctcggcctctcaaaatgctgggattagaggtgtgagccaccatgcccagccagcgaaatggctatttctagtgggagagcaatatccaaagattcgtttgtattctttacagttattacaaagtatattggcccactttcttcctgaggtttttttatatttccttgtcaatgttcagtggcatgctgggacgtgaggccggagggcaagatagagtctagtatttttcagaaagccttcaatatgtgagaaggacaggatttgctcctttaaagaatttggaaacatattggccgggcgtggtggctcatgcctgtaatcctagcactttgggaggccgaggagagtggttcacctgaggtcagnnnnnnnnnnnnnnnnnnnnnnnnnnnnnnnnnnnnnnnnnnnnnnnnnnnnnnnnnnnnnnnnnnnnnnnnnnnnnnnnnnnnnnnnnnnnnnnnnnnnnnnnnnnnnnnnnnnnnnnnnnnnnnnnnnnnnnnnnnnnnnnnnnnnnnnnnnnnnnnnnnnnnnnnnnnnnnnnnnnnnnnnnnnnnnnnnnnnnnnnnnntcaaaaaaaaaaaaaaaaaaaaaaaaaaaaaaaa

SEQ ID NO: 5354 - DNA, 752 bp, Macaca Fascicularis
  misc_feature (1)...(752): n = A,T,C or G
attcttcacagcgcccttgtatgtggcnnnnnncagctggggctgtttagctttccagctcactctcagtcatagaatgtgtagctaaaggaagtagtgggaaggggttcatgttctccttacaatgcagtggcaaaaggttccgaaagtcttttaaactcgaaccagtgggggaaagatggatcttgaaaataaccctgcagagagcttgataaaggccaggggttgccttctaaattatggtaatacagaagtgaagagtttcagagcatcagattaagtgaagagtttcagagcatcagattgagtgaacagttgtcagattctgtattttttaacaatcttcaataatgtaaagattacttttaaaatatttaagttaaaactacttgaatagtattttnnnnnnnnnnnnnnnnnnnnnnnnnnnnnnnttttatactgtccannnnnnnnnnnnnnnnnnnnnncccagagtgggcagaagcatcaagagcatgacaggaaatcctaagactgctcccgcctcagaggcgtcctggctccaacttgcgtgccctgtcgtcagtgaggcctggctgtcaccgcacaccatgtccatgtcttcaaggggttcatttctttttacacgtcgcgtgtacccatagcactcttgtgtttctgttttcccagtatgcatgtttaaaatagaagtgacaagaatcacatcnnngttgtgtgctgtgggacggtcagaggcagaatctacttac

SEQ ID NO: 5355 - DNA, 714 bp, Macaca Fascicularis
  misc_feature (1)...(714): n = A,T,C or G
acgaccccccgnnatcccgccccctggnnnnnctggctgtgtgtcaggaagggctctttctttccattgttctctttccatttgcctcccccncttcagccccggcctggcctcccacagcctgactctggttccccaactccctgttctggctcctgggtggggaccccatctctcagggaccctcccagctcccaagctgctgcactgcctctcctgggggcaaaaggggcaggtggcagtttctttttcagcctcaggactggtttaccttgatcctggggggtccttggacctagaagagaacaactgatggggataaacccagccctttgcccacttccctctggccttccctggggtcagtgagagaaacgggaatggtagctacttgggtcaacagagcagagtcgaagaagagctgtccctggtgtgggtggggcccacgaggcaggcaggtggactctggcacaggggccttggtttctgggggcagggggctggggaactcttggtcgccacggtttacctgccataggtcctttttcagccctgcctcccccaagttccatcaacacaaactcccagggggtcctccatacctggcctggcgctctccttggtgctgatgagacacaactctggctccggccacgggccattgaggggccatggtgcttgtggggcttcctctatcccccaggcctgcccaag

SEQ ID NO: 5356 - DNA, 2215 bp, Macaca Fascicularis
gacactgacaagagcggccacggaaacgaggagttcacttctctcgctcctcgcctctgctctcacccaaagctttgtttcaggacgcctgtgtcccttccccgctcaagccccttcctggcccctcggctctgagctgcgggaggaaggtggacggggaggggacaaactgtccctcccgtgcccgcagccccgtccgtctcgggcgcgggagggacactgtgtgctcggcgcctgggtggacgcgcctcctggccgcctgctgcaatccccaacgccgtctgcctggactccgtctcctcctccccggcctgcgggttctggtctttaaacgccccacttcaaactggacggcggcggcaacggcagctgcagctgagagccggggctgtcccctcttcctccttggcccgcgcctggctacccccggacccccgagccggtaagaagtgtggagcctccccggcgaccccttccctccttgcctttcggcgccgtagctgtccagagacacgcgtgtgcgcgggtcccactccacacgcacgcagcccagtgtgtgtggggagccccggcggggagtgggatcgctgaaacagctcgctcccgaagaaggagcaacccagcgcgcaggcctccgagaggtggaaacgcaacaattaccgtcaagacaaatccacacccgctctcccctcccgcccgactcggggaggccgcgggacgccgcagcagcactagcaggaggaggagaccgctcgctggacaccccacccctgtggcacacacaggacccaggctcggggcggggcgggggcggggccgcgcgccgctgggccaatgccgcacacccgcgcactgcccgacagcgggtgcagccaatgggcgggaggcgtccgtcctcctcgcgctgccgccccgtccacgtcctccacagtacacaatggccccagaggaaggcccgctcgcagcacgtcagaaaggaattggactcggagagaaatgaggggcctggactcgcccgggaacgaaagtggaaacgggaaaggaaatggaagaagggatgcaaggcacgaaggagctaaccaataaggggtggcaggtgggcgtgagcgtcgggaacgggagccaaagccgtctggggctgaaaggcgggacttcctgcttcgcttaccttcctagtcttttgtttcgtagcaacagagtagtggctggaagggtgttgcttctctgctctgggcgggtccaacgctggagaaattcatctccctagggctgccaaacccttctacacaggacagcagccaaacaggtctatgacgttgcttcttgttggctatcaaaaagagcaacagccagcgagcttctaaaatgcagaatatagctcacagagagtaggctaagggtgacaccagcctgccaactaaaacttcctaagtttctgagtttctcttttgctgttagttttagaggggttgcagaccaaacatcaggctgacgaaaaagcaaatagttgccaacggtggccaagtagtctctgctaatcatgccagagcaataaaagtaccagataatgggaattgctgataaagaccttgcacctttttacttagtgcaagtgtctgcctaaatgactgaggaggagacagctgttatgttttgtcggagtcacctttatatagatttctatccatttaaaaacaaccttactgtagctaccgttctctaccagcgttgttatctctttctgtggttccattctttgtgctcttaagaaggccaacatctggctagtctttaaaagagaaagctactgtgctgggacttgtctttcaacaagatcgtagattaaacaaatgccttccatttatttcagtttacttcaatcccaccactcatgctaccaacaattgctctgtatttcgtactttggaacgaactttccactacagttgatagcgtgtattacactttacagcttggacatctcaggtgttctgatattttacaatgagttttttgtttttgattttgttttttcaaatctttctctaaccacgtaacctgataaaatgtttctcaatggttctaaccactttctagcaaataagaattttaatactgtaattattactgtgaaggatcctgagttgtcctttacagccttgaatttacatggttaagattttaatttgacgaaaacagaaaaaaaaaaaaaaaa

SEQ ID NO: 5357 - DNA, 726 bp, Macaca Fascicularis
  misc_feature (1)...(726): n = A,T,C or G
agtgctgggatnnnnnnnnnnnnnnnnnnnnncccatcaagagtggagtgttaaattacgattgtctcccctcttattaacagtttcagttacccgaggtcaaccgcagtccaaaaatactaactggagaaaagagttagtatttttgcttcagactaggcagagagagagcagccctctcctgtctctggacgagcctgtttcacatgctagagagctggcttagcatttgctacagtgtgcgtttcctgcttgttgggggcagggcacgaagcttgggcttgggtttcatnnnnnnnnnnnnnnnnnnnnnnnnnnnnnnnnnnnnnnnnnnnnnnnnnnnnnnnnnnctcagtccaggccgtctgagtttcttgtcctccttccttccaggactgggacatagtgtccagagggcacagcattggagtaggagtttgggaagcagatttctcatccctacccgatatggttagggtttgggtccccacccagaatctcatcttgaattgtaatcccataatccccaagtgtcaaggtggggtaatcggatcatgggggcagtttcccccattctgctctcgtgaaagtgagtgagtcttgaggtatatgatggttttataannnnnnnnnnnnnnnnnnnnnnnnnnnnnnnnnnnnnnnnnnnnnnnnnnnnnnnnnnnnnnnnnnnnnnnnnnnnnnnnnnnnnnnnnnnnnnctctgagg

SEQ ID NO: 5358 - DNA, 676 bp, Macaca Fascicularis
ccagcctgcagcgaaatgtattggcttcccgcccccattgacatcctcagataccctaaaattgatgctagccattttttttcttaatttaattcaattagaactaacttgatgaaggttatcttgcattaaaaaacaataagcctctgctacaagcacttaattttttcctcgccattttggagcatttcccaggctgcgcgggagagggtggagggggaagagcggggtattgttactttttatgatgaaatgtctccatctagtggaacttcagagcagtaaatgctgtcaatatattaaagtgaagattatgtctccgaagccatttccttaaacacatacagtgtttaaagaaaaaaataaacttccacatatgttcttagatgatatccttacaactgtatgtattccttttggaaggcatagaagtgagaccagtacaaactgttaagatattaacatttttaatgtcatgatttgaacctgagagaggtgcttacagtaggggagcagcacagtgcagatcccacccagttggtaacgatctagctcttaagttgggcagtgggttcacggggttcgtatgtgctgtacctatgttcttccggtgtgtgtaaatatttcctaacaaagatctagacatgaactaaatttaagattatgaataaatcta

SEQ ID NO: 5359 - DNA, 750 bp, Macaca Fascicularis
  misc_feature (1)...(750): n = A,T,C or G
cnnnnnnnnnnnnnnnnnnnnnnnnnnnnnnnnnnntggtgacagagccaganncngtctcaaaaacaacaacaacaaaaattacaacagaagacatctgccctaatcagaagtgaaagacgacatgtttgtgaatgactgtacagtgtgacacttcatcagacattttacaaagcattttacagtttcttgctagaaattccatttctagttataaaccttagatatgtaaagaaacagacaaaatactcattttagtgttgtttgtattcgcaaaaagttggaaaaaacaaatgtcagcaggaggatggatttttcagacaaggaggagcacactgcagttatcataagaacagtagaactgcctgtatccacacagataaaccccagagcacaacttggagggaaaaggtgcggcaggaaccgtccagtgggttccctgcaaaagcagcagccggcctcggtgtaggcttatgtgtaatgtgagcgtcaaagcaccgagaggaatgaagagccccaaaatcagatcgaagctgaggaggaaccagagcagggtggggcttatataaggggcttcaaccattatgtaatttttaaatgttaaaattctaaagcaaatatggcaaaatgaacagatggtggatgtgtgtgtattctccttcatgcttttctgtgtgcttgaaaaattttaaaggaaacattagctattgctaatttgttataaaatgatatggttagaaaatattttct

SEQ ID NO: 5360 - DNA, 729 bp, Macaca Fascicularis
tcccagagagagggcagtgaggatctctatccggcctgggggttgtgagcataggtagccggggcagggccctgggtgggactgtggcctccactggcctcaccaaagtgcctgggccccgatccctgtccgtgcccagggcccccaggtgggctgggtctctggcctgttcctcagccctactcatggggacattcaggggcctccaggaagtgggcgggggaacatccacccctgctagccagcagctgtggccctgaccaaatcaggggctggggagggaaagtgggtccgctgagatgtccctgctccatcagccccctacaggacttatgttcatcacagtggggggggctcccactgtctcccgccctccctcatgctccctctgctgcagggaaagggttccaagatcacaaattgtcaacaacgctggcctcctggaccagaccccgaggctctaacaatgcactctgagatccctacccttgctgttggtctctgtcgctgactcgaggcacctaacatccgttcacacccaactcaggccagcgaattctggggctcagccacagacatgatttgtcactgttgagcttctgttcctagagaaccctagaggcttgattggcccaggctgctgtgtgtgctggaggtgaagaatcccgaccttctgggggtggaaggaaatgaaaatggaaagttcttgtggtgcaaggcctgacgtgg

SEQ ID NO: 5361 - DNA, 762 bp, Macaca Fascicularis
  misc_feature (1)...(762): n = A,T,C or G
agatgaaacatgtgaaatatnnttnngtttccttacaattatgagctcagaagtagctagaggctttctatccaaaggatgccaaagtatagcagggcaggcctggagctggggccttcacatggtggtagcaagtatctcaaatctaatacaagcaagtacaatacttcctattaatgcttctgtggacctggcatgaaagatccctagattgaaagaaataatacctccatgtctcctgtatgttgagtttagaattgctgtgttgttcttagaagcagtcttggggcaacaactcgaaaggaaaaaaaactacgaaaacttaacattgctataggccaagtcagggagaaagtagagaagctttcatgccacagacttctttagtggaggtcatttcctttttaatttcgttcaggttgcccttcagccatggatacagtccggtacccttaaacatttaagggctgtttttttctttacatgatgttcagcttggtgttgactaaccttaaattttttttctagaagtattaaaatttagttaaagcaaaatgaagtcttttcccatgaatgtgtccccttatctcattatagcttatgctcagtttcactttcttggaaaggttaaaacaaattagcctnnnnnnnnnnnnnnnttgaaaataactctcacccttctggctgccttccatccactctcaccctccacctttttttaatatatatacacccttacagattttcnncaaccaaataaaa

SEQ ID NO: 5362 - DNA, 598 bp, Macaca Fascicularis
  misc_feature (1)...(598): n = A,T,C or G
ggtcccacaaatgcttggttgngtggggnnnnnatcannnctgagatagagttggcagnngaagcctatataantttcttgctttcatacccacatccacacacacatacacacacacacacaannnnnnctgctnnnnnnnnnnnnnnnnnnnnnnnnnnnnnnnnnnnnnnnnnnnnnnnnnnnnnnnnnnnnnnnnnaccacatcactcccccaagttcccaccannnnnnnnncctccaacctttttccatcacaaccagttagaaccctacaggcaacannnnnnnnnnnnnnnnnnnnnnnnnnnnnnnnnnnnnnnnnnnnnnnnnnnnnnnnnnnnnnnnnnnnnnccagaaggagctgcccatactaatttcttatgagcatgctcagtatggcatatggacatgtaatttcacatctttgtggagtgtgattttctttttttacatatttgtatgcagtagagggcctgttgtagaaaacgctccctgtatcttgctgtactgttaaagaaagctgaattccacattgccaacaaaagcgtgaaaatgttcatgaaccttcctccaggaaaagccattcaagcctgat

SEQ ID NO: 5363 - DNA, 765 bp, Macaca Fascicularis
  misc_feature (1)...(765): n = A,T,C or G
aggtattttggatgagataaacannngaatcagaagactaagtnanacagatagtcctnnnnnatgtgggtgagnnncctccaatcatttgaagacatgagtagaataaaaaggctgaccttcccccaggtaagagaattcctcttgcctgactggcttcaaattgggacatcagccttttcctgccttcagacannnnnnnnnnnnnnnnnnnnnnnnnnnnnnnnnnntggccttcagactggacctaaaccatcagctctcccaagtcttaggcctttggattcagactggaattatacctttagctctcctgggtctccagcttgccaatttaccctgcagatcttgggacttgtaagccttcataattgtgtgagcaattccttatgactctttctctctctatatatatttatatatacatatatgtgtatatataatatatacatattatatgtaatatatatgtgtatatataatatatacatatatatacacatacacacatgtacatgtttatatgtatatatgtgtatgtgtatatatgtacacatatatgtgtatacatacatcctattggttctctttctctggataaccctaattcagatgtagannnnnnnngagcaggaggaatgttagaattctctagaagaatcatctgggatgttnnnnnnnnnnnnnnnnnnnnctgttgctgctagtcaatggccccaccaccacccatctgcccaccctgatactgagggaaatatacaccca

SEQ ID NO: 5364 - DNA, 741 bp, Macaca Fascicularis
  misc_feature (1)...(741): n = A,T,C or G
cacagttattnatttttgacgtnantgaaagcagactgttaggagcagtattgagtggccgtcatactttgaggcaactaaaaaggcttcaaacgttttgatcagtttcttttcaggaaacattgtgctctaacagtatgcctattctttcccctgctcttaaacagtgtgatgtgtgttatcctaggaaatgagagttggcaaacagcttctcattttgaatagagtttgtgtgtacctctccatatttaatttatatgataaaataggtggggagagtttgacccttaactgtcatatgttttgttgtnnnnnnnnnnnnnnnataaagtttacttgtaaaattttagaggccattattccaattatgttgcatgtacactcattnnnnnnnnnngcagactcactgtatgtataagaatattctgacggtgggtgacccggagtctccggnnnnnnnnnnnnnnnnnnnnnnnnnnncgagcagtcagttttttcctaaaggtttacaagtatttagaactcttnnnnnnnnnnnnaaatgttcatgaagttattcctcttaaacatggtcaggaagctgatgacattattgattttgtctggattatctttctggaataataacaagctatttgagttttgacttggcaaggcaaaacatgacagtggattctctttacaaatggaaaaaaaaatccttattttgtataaaggacttccctttttgtaaactaattc

SEQ ID NO: 5365 - DNA, 755 bp, Macaca Fascicularis
  misc_feature (1)...(755): n = A,T,C or G
gataaatgtgacatctgagatgcaaaatcaagacaagctgctcatatttcntnnnnataagaataatcacaacatcctgccctgatgctctccagggagaatgaacttctgttcctctttttattaccctcttcctcttctctaatgtttcttcatccacacttcgcattctcctctctgccaccctcttatcttccgcataactgtccattttgggtggacatggtgactgcattttgttcccaaattaacatatttagtaatattttccaaagagaaagaggtttatattcaggtgccagggaccctgcagggacatggctgtcccggaatggattctttttagagaaaaccacgctgccttggcttctgtgcacattcatttggcaaagaaaattcacacagcatttgattgtggagcgagctgatgagacagggtcctgagcccagcgagccgaagtgcttgaggagaaagggagcatcccaggtgtttgggagagagaacgctgcttttcctcatgaccatctagtgaaggggatgaagaaaaacaacctctggtcagactggagaagtccacaagcctcttcctgttctaaaggatttctgcagtttagaactctcctgtctcccgtctctcctttgatttaagtctaactattttgttgccgattatttgtctgttgctttgtcctgccccagggttaaatacccagcctgtgaaagtcatctgttcacacattgcatgatactccac

SEQ ID NO: 5366 - DNA, 984 bp, Macaca Fascicularis
atcttcggggcctccccagtgtgggggcatgtatccacacctgtgctgacaagggcagtgggggcccgatctgcatagcagcaggataaaaaccagcctctggcaccactggattcttccctggtagaaactctcccaggtggccgtcccacgggtggaagcactgaccgtatccagaagttgcggaaagagtattatcaggctcggagggaaggtttccctttatatgaagacagcgaaggaagagcaaggccgtctgattatgaccttctctgggtgcctggaaagggtccagatgggaatgcacacaacctccgctttgaagggatggagaggcagtacgcatccttacccaggggaggacccgcagatgctgtagactatctgccagcagcacctcgagggctctacaaggaaagggagcttccctattatccaggggctcatcctatgcaccctcccaaagggagctatccccgccccacagagctgagggtggcagatctccggtatcctcagcactacccacctccgcctgcttcccagcacaaaggaccctttcgacaagacgtcccgccttcccctccccagcaccaaagaatgccagcctatcaggaaacgggcagaccagcgccccgcgggggcagcccagaccagtacccttaccgaacccaggattcccggcagaagaaccccatgactgcagccgtatagctgagtgccaccgaggccaacccagcccagaaaggaaggtgtctacactacttttgccctttctagacctgaagacctccttggtgttaggaattctccacgggactgattagcgttttctcactgacgttgtaacgcttgactgctaatcagaggggaaaagaaggggaaggggattggggaggaaaaaaatcagaaggaagatgaaagatggggctataaaaacaaaactacctgctagttgaaacaaaaaaaaaaaaaaaaaaaaaa

SEQ ID NO: 5367 - DNA, 777 bp, Macaca Fascicularis
  misc_feature (1)...(777): n = A,T,C or G
gacagaggaatgnnttnctnnnnnnnnnnnnnnnnnnnnnnnnnnnnnnnnnnnnnnnnnnnnnnnnnnnnnnnnnnnntacaaaggaacgaannnnnnnnnnnnnnnnnntgaaccaccnnnnnnnnnnnnnnntgggcacaggggctcccaaacccagtggcttctgtctgtcctcagcccttgtccnnnnnnnnnnnnnnnnnnnnnnnnnnnnnnnnnnnnnnnnnnnnnnnnnnnnnnnnnnnnnnnnnnnnnnnnnnnnnnnnnnnnnnnnnnnnnnnnnnnnnnctagcgtcttctcagtgcagtgccaggtcctggtgccacactagctgagcgctcaggagagccaggtcctggtgccacactatccgatcccacagggtctnnnnnnnnnnnnnnnnnnnnnncagtttagacgccctaaacttctgtagctcaggaacataactggtatatttgtttttttgtttgtttgcttggcgtcttgcaagagcacgcgggggtgnnnnnnnnnnnnnnnnnnnnnnnntgtnnnnnnnnnnnnnnnnnnnntgatgatgannnnnnnnnnnnnnnnnnnnnnnnnnnnnnttttcccccttannnnnnnnnnnnnntttattttaaaaacacatagcttgaaaatttnnnnnnnnnnnnnnnnnngtttggatgtgccacttttggcaccaaatgtgtatgtcatttttatttccattttataaacatgtaaataatagtgataacttgttaataatagtaaacctttat

SEQ ID NO: 5368 - DNA, 714 bp, Macaca Fascicularis
  misc_feature (1)...(714): n = A,T,C or G
gaggtgggtgcctcccctnnnnnttgtcactttggtttcctataaatatgtatgtatcgtatgtgcatctttgctattgtaaataactttgaccttttttgttcctgttcctgaagtgctggaggcagttatagggaagaagctgcttagggaagagggggttcacttttatctcctagttaacaacccagctcgaggatcgagcctaaagggggagccaggcctgagtgtccctgtcgctgtgagtgggaaggtcttctggctccccgtcccacctggctccagagcctgccctccacagcttgctgccgggctactccctccctccctggacttctcatctgcacaagatggggaccatggggagtttcttaccccacctatgtccctccttccccaccctgtccctgtagaaaaccagtgaagcaggtacggagctgaagactgggcccaggaggtggggatagcgggtctgaatgctgagtccctgaattcacccaggaccatccaaggggccaccacagcattagccccatcaccatgtcctcacccaactctccctgatgaatagaatatacacactgtgctaggtgtatatatacatatatatatataaatatatatataatatataaaatatagatatggaaatgactgttttgctgttaagataatgtatactcttttattttcttcctttcatggttaagattt

SEQ ID NO: 5369 - DNA, 741 bp, Macaca Fascicularis
  misc_feature (1)...(741): n = A,T,C or G
gtagctgctgaataatttgttggccgagacgtcatannnnnntcnnngctgctttctccctgtggcaatgtactgttctcacannnnnnnnnnnnnnnnnnnnnnnnnnnnnnnnnnnnnnnnnnnnnnnnnnngagctaagaagtacattgctcaaaaaaatattgtactttattgataatgaccaaaaagaatattttttaaaccccatcaaaatagatttccattgactgtttcccctacatcttttgagccacagtcgcccattgaataagcacatttgtttttgagaataaactggtaaccaatttatgatgactctcagaaaccttttggctgggatacagtagagtgtctaagttcccagacagccatctcataattagttggtgagccagaggctcgacagagctgttacttatgtgtgagggctttattctcatgcagtagtttattcatcatttggtaagccccgccccacaatcttctaatttaaacaggtagtgaaggcttagcttaaactgagtagtactttagactaggcatttatttttgatagagcagaggtaaaatattttgatggaaggaaatcaattttctgtaactgatgatgtgaaaattttattttctgggaaattatatagccattcaaaattcaaagtatgttattatgattggttacaagagaataatgttacacgtttaattgtaatatttgtctcctatcattttcttcccttc

SEQ ID NO: 5370 - DNA, 732 bp, Macaca Fascicularis
  misc_feature (1)...(732): n = A,T,C or G
ggtagtgatgagatatcannnnnnntagtgttnnntttnnggaaatgaggcactatttttaaaaaaaaagacaacnnnnnnnnnnnnnnnnnnnnacagtttgtctctccagttttctggcctatactctggttagctctgagccaagtttacaggacagcagccttgctttaagccatgtcctgttgtgggcacgataatnnnnnnnnnnnnnnnncagcctaccagcaggctggtagcacctccagggtctcttggctatagcagatttcttagcagctgactaggacttcagtcattgggaagcctgtgaggcctttacatttttggtgtgagacagggaagaaacataaaatgccactttataacttcaataatagcctgtaatttatatttactgtgtgaatttttagtcctatattttaataatttgtaaattgatctcttattccaagaatcctttgaacttatannnnnnnnnnnnnnnnnnnnnnctgtcctcttcctgatccctgctttatggactgtttaaatcctctttgggatggatcagagagtctagagaggccactcatagttccagctgctggcctcctgactctccaaagccttcactggaattgggacatttgctccagccctagctgtgaacatgaccagagacattatttataattcagccatttaagatatacctgtactcaaaaagtcctgtatattttttaaaagttt

SEQ ID NO: 5371 - DNA, 721 bp, Macaca Fascicularis
  misc_feature (1)...(721): n = A,T,C or G
ttcaaagtgctcaacttattgnnnactgtctttttcctagtaatcttaaaataatttgcctcacagaaatannnnnnnnnnnnnnnnnnnnnnnnttcactgtttttggtaattcattggtcttcaggagttaagattttacattgccacattttaatttttaagcctatttttcatctctgaaactttccttttctgcttggttctctnnnnnnnnnnnnnnnnnnnnnnnnnnnnnnnatcatgtccaaaacagcttggcctgggagaggtaggccttattttttcagcctagcaatgtcccatgcacatgctctttgtagcattcaagtgtttaacattgaatacagtaaggtcaagaatgttattgaaacttcaaggtctcaaaaggaaatgatggggacatagaacaactgttggtgtaccaaaaaaaaggtacagaggtgcaccatttgtattgtcacatcagccttgtatagtttagaatgatcagaacaaaaacaccactctttagtgggtctctttcttggctaggagtctttcctcagtttttgttgactatcatacactgatttgtgggtgacagaagggggctagagatacttttttctgtactttggtagaggatgaaggagtcagagagggaaaagaaaaagtgagagagtggcctgctgaaataatagcctgcctctaaaagttgtgaccagaaagtatgattcat

SEQ ID NO: 5372 - DNA, 687 bp, Macaca Fascicularis
  misc_feature (1)...(687): n = A,T,C or G
tgtgctttgatgaagacccacgtggctggcaacagctcttaccttttgtctctgggtcctggcctgggtaggattcctgggtgttctgttggatcatttggggccatcagtccacnnnnnnnnnnnnnnngtctgctctgcctccaccaatcggaaacccttccaaggaacagtgagagccaaagccaagagaagccttcctccctatttggtgattgtgtgaccgtgggtgaaatcctctctcagaactagaaagaactcagtgcttttactctatagtgagtaatgtcagggctgacccatcctgaagtctatcttgccatgcttttacagcgttggaggcttctccatttggtactggcagtcagcaagtcttaatgatgactgtatatgggatatgagtttataaagcaatgcaacataagcaattgtaggccaggcgcgnnnnnnnnnnnnnnnnnnnnnnnnnnnnnnnnnnnnnnnnnnnnnnnnnnnnnnnnnnnnnnnnnnnnnnnnnnnnnnnnnnnnnnnnnnnnnnnnnnnnnnnnnnnnnnnnnnnnnnnnnnnnnnnnnnnnnnnnnnnnnnnnnnnnnnnnnnnnnnnnnnnnnnnnnnnnnncaggagaatcgctgaacccgggaggcagaggttgcagtgaactgggattgtaccactgcactgcagcct

SEQ ID NO: 5373 - DNA, 977 bp, Macaca Fascicularis
  misc_feature (1)...(977): n = A,T,C or G
ttctgttcattcaggtctttacaataataacttaactctttcaattaattgcccatcagaaaatcgttgactccacctgtgacctggacacctcccacctccatccctggaattgtgtcacctttctggaccaaaccactggacaccttacacgtatcgactggcaacgtgtacacctccacacactgctaaatgacaaagccgaattttgaaatacgatgccgtgaggtgtttggagannnnnnnnnnnnnnnnnnnnnnnnnnnnnnnnnnnnnnnnnnnnngcccttttctttttttctgcctgtaacttctgtccccctaaaatgcataaaatcaagctggaatccagccaccttatgcaccagttcttacgacctcctggggttgtgtcaccaatcatggtcctcatatttggctcagaataaatctcatcaaatattttacaaatttgactctttttgttgacaagtctgtcgcaccgttttttnnnnnnnnnngtgtgtaatgttttctttagcaactgtggcaaaattaaaccttcttcgaaataaagagaaaaagaacccattatagaaaactgtctttctgctgatgtgggcattcactgtgttcatttctttttccaaaaagtgtatctttcttaaaaactgaaaaatattgagccacaaaacacagtgccgatggcttgcatgtgggacactcgggatatcatactaaagggctctgatgctgtcttgatgatctctacgcagggtgttacttctgctggctgtgtgaccttggagaggttgcttaacctctctgagccacaagtgtaaaaggatgnnnttggtccctaaagtctccaccagcattaaagctagatgatcctgaatcttctgctatttgaggatcagacaaacaacagtggacagggttattcctgttgaaaatgnnnnnnnnnnnnnnnnnnncataattatcttggtacccaa

SEQ ID NO: 5374 - DNA, 861 bp, Macaca Fascicularis
  misc_feature (1)...(861): n = A,T,C or G
cgtgggggggctgnnnnnntactggggtgggcttttaatttcctcccctcgctggttnctatgagtcnntcagacaagaccttaaatgatttctnnctgctcnnnnnnnnnnnnnnnntgggcccccgtccccgatccgcaccctccttcctcagggcacttactaagggaggggtctccctctccatctccccaatggcctccctgcctccaaccctgcctgccgccccctgcccgccccacatctcctggccactgagacacaaacctatttatttctaggcctggagaaaggagatcggactggggttcccggtggggcnnnnnnnnnnctcctgggggggctcccgccgccttccttcacggcacttacaaccggcgggacccccagggaccacccctcagggcgccccccaccccagcccggtccacctagacccccacgtttggagattcaaaacttctgtcttcgtcctctcccccgagccccgtctcccaaatttttaaagcacttttttgatttttttttctctttcctccttaaaaacaaaatttatatatagagatatatatatatatatataaataatatacttttcctcagaggagcaggcaacagtgtgggataaacagagttatgatcagaggaaccccagggtctggtgatggcagggacagggggagagagagaaaatccacaaattccaatgtcacaaaagcaataaaacaaactagaaaaaaaaaaaaaaaaagattttacaaaacgaaaggaaggaaaaaaaaaggcaaccaaccacattagaagtcttggcactttgtaacggaacgggtactacactttatcttaattcttaatttaaa

SEQ ID NO: 5375 - DNA, 931 bp, Macaca Fascicularis
  misc_feature (1)...(931): n = A,T,C or G
gaagagtgtgctgataaacccaccagcacctattgagcaatgtctattatagtaattttgcatacatttttatttaagggaaaaaaatttaggtagtgtgaaatattttgctaatctcgtagaaaagnnnnnnnnnnnnnnnttatttaaagggaaaagtaaatttaacagttaccttttttcttaatgtcagggcagatcttattttacagtacagtgggggaaatagaaacatgtgaaaggcaaaaggcaggctcctaaattaatgtcagtaaagttcagggtgggcaaatgagtgtgtgtgaggtataggaaatgctgatgacttcttnnnnnnnnnnnnnnnnnnnnnnnnnnnnnnnnnnnnnnnnnnnnnnnnnnnnnnnnnnnnnnnnnnnnnnnnnnnnnnttggatgggggcaaagttgnnnnnnnnnnnnnnnnnnnnnnnnnnnnnnnnnnnnnnnnnnnnnnnnnnnnnnnccaggttctcactctgtttacagaagggagttgagtannnnnnnnnnnnnnnnnnnnnnnaaaaaatgctaaatattttatccatgaaaatgacttccaggaaaggaagaatatgaattccagaccgaaggggaaaagatagttaaaatagtattatctaacctggttggtatttgtaatgaatggtgattttaattagtcattagccataatgatgtttatttacagtataactcctgaatgctacttaaataaaccaggattcaaactgcaagccaannnnnnnnnnnnnnntttaaaacattttaatcggggcttccgggcagaaggtggagcggcagggtgtgtgtatctggattgatgggcgggacctgtcttgannnnnnnnnntttataatcgagggccaggagggcccgggttgtcctctccgttgcacttgtacataac

SEQ ID NO: 5376 - DNA, 2090 bp, Macaca Fascicularis
tgaaaacaaatatgaaatactcttgcttatctaatagttgacaaatcactttcaattgaaaataccaaatgttgagagaacgcaaaatattgggaaccctcatacacagctggtgtaaatgttactttttttgttatctactcaagctgaagacaacttatcctccatgatttcaatctcggggatatactttaaaaaaatgggtacacacatgccccaggattattgtagcctgtaattgtgcaaatctgggatacccatcctgcatagaatggaaaaactatggcatattcatacaatggtatgctatgcaataatgaaaatgaacaagctacatagataagtttaacaaacatatattgaaccaaagaagccagacacaaaaatatgaatccatatccataaaagttaaaaaatgagcattgtgggggattcatttataagcggtaaagttaaaaaggaaacaaggaaatcacaatgatagtccctccagaagaacaggagggagttttgatggagagaagctcatggactgctggccattatattggtatttatttttataattatttccactaactacaaaatgtatgtatatatacttttcctgtgtgtttgttgtataataaatgaaacaaaaatagtacaaaatcaaggatgtgtacacaaatatttagttataaagtattaactataactatgtctattatagggggaaactccaaactttgaatcactgctttggattatgtaaaagaatgaatcaaatacttcactgcacacagaagagagtttacacagcctctagaaattgtagaatatttcatggcttctaaagataattgagatatatatttaggtgggagatgatgtttatcatacattatgcacagatatttcaatgttttaaaacaaactttgaatgctaatacatgaaaaacaattgggagaaacacattataatgttaactatgattctatttgggtggtgactttatgagcaatttttgttttctttgttttgctcatttgtatagttttaattttgagcaatgaatatggattacttttgaaggaaataaaaggagacaatatattctattgggaaacaataatgaaaaaagagcctagagatctcaaaatggaaataagaaatgtggtattcgttaatatgtgtatttggaaaacacctggaatcctaccagctgcgatgagcccatttgaatataacttttccctacgagtggccacccacttggttctcctttcccagcaggcgtagctctgatagtgaaatcaaattctggctgtctgctttggaagtaagtagggcagtggggtgggggaaggtgaagggatcctctgagaacagcctgctcctaattgaaaggaagtgaaaatcctccacatgtttcagggagaactggtagatcatccctcagttctcctccatctgttctgctgcctcttatagaaaccaagacaggaaaaatgaaatgtacctaacacaggaaatgagggtagtcatttgaatgatacagtatcagaaccctggaaagtgttttgggcaaggtgggcagtgaaacaaaaggcaccaatcatagtgctcagatctgatctcacactgggaaaaagtaggtacctaaagaccccaaacgatggagagtggggaggactccagagtcagcgcactcacattcccaacagccaggtgggtttaaccgctgcatacctgttaactcctcagggtggaatttcccagctgctgagccatggcacgctggttttccctatgctactgatcccatcagccctagaggtaatggtctcacctccgggccagcagttctgacagcaggcacttcataaattagtgaaatagaggaattcacagaatacttctatagcaggtaaagaaagtaagaaaacattaagtggaaaaaggatgttaatagccattagcatgcaactactatgatttttattatccttttccatgtgtgtcatgacatataaagacctgggaagcattagaactaccataggtcatcccctcattaaataaagtacaaaaaaaaaaaaaaaaaaaa

SEQ ID NO: 5377 - DNA, 2637 bp, Macaca Fascicularis
aaaagccacgggctaaccgtggcggcgctcgcctgcagattgaaaagaaatgctgagaaatacataaagttttcctcttctgccttggatatttataatgggtatcgggaagtctaaaatagattcttgccctctttctctctcttggggtaaaaggcacagtgtggatacaagtccaggatatcatgagtcagattccaagaagtctgaagacctatccttgtgtaatgttgctgagcacagcaatataacagaggggtcaacaagaaagcaggagggagctcaaagcgtggaagagatgcttgaagaagaagctgaagaagaggtgttcctcaaatttgtgatattgctgagatgccatgtggcagacagcatttacagaatttagatgatgccgtaaatgggtctgcatggacaatcttattactgactgaaaactttttaagagatacctggtgtaatttccagttctatacgtccctaatgaactctgttaacaggcagcataaatacaactctgttatacccatgcggcccctgaacaacccgcttccccgagagaggactccctttgccctccaaaccatcaatgccttagaggaagaaagtcgtggctttcctacacaagtagaaagaatttttcaggagtctgtgtataagacacaacaaactatatggaaagagacaagaaatatggtacaaagacaatttattgcctgagacgaaacatataacatgtggctgggtcctgttttgtaaaccaaatgattaatcttcacttgagaaagcagtttctaggaaatgtttaaatagaagagagtcttagtcttaaagaaacctatggagcacaagaaagataaatttctgcaggacaatctataaaattgtggtactttttgatgtttcggtaaacttgacattgtgagtttcaaggacttttctttcacaattttcctagttcatggatatgaaaaaggaattctcaatccatattcctcgtactgaaccttgaacaagaacttgtatgacagacattttttaaaatgtgacaacacttttattctctgaattttgatctcaaaggacacagaaaaaaaatgaccccaggagatctgatcacacttcctcctgagacgcgtctcaaggatgttgcaataagcttttgggtactgtcacctagaaatatgaattgccagaatagaacatttagcatattgagtgttgatgcatatgaaatcagaaatagatgtgagaatggtggaactttctaaaagaacccagtcaaatgtattttctgctgaaatctgcatattcagaggcatttcccaccaccgattcacagcccatttgatagtgtggtagtcagggacttcatggagtggtgttcggacatcccctggggcttaaagctcttcatattagtcatcatctgtaactatggctttatttgcagagcttctaaaaggcgtataactgtgtgagtggccagatactcacttttaaaatcaataacctctcttatggaagctttaaagaagtttccctcacacacaatcctcttctcaggaagtatttctcatttaggtcttcaaagtagcctgactgtgtgcatgtgtgtgtgtaatgggttatttgtaaagactttggatagaaggagatgtattttattacctcctgttctagagccccatgcttctaacaagccagagaggccccaaacaggattgtttcttttcaccacagcccttctgcccatctgagactgagggagtatcgtccacttgcgatcagggatggggtggagaatgagtcatgtcatgtaatgagaaaagcactcttcgatcatgagacctggttctagtccaatctctgccactgaggatgaatgtaactgtgggcaagctatttaccctcctttatatgtgaaatgaaagggttgaattgatggatctctgaaggcctttgtcctctatgaggatgtgaaaaactaggaaccacaaaagggacaagcaaaaaagttcggatttgataaagtgatatataatagttgcagaaggctttatatatgcttaaaatgaaaatatcttttttgtatattgacagcataattgatttttagtgctgtcattacacttttaaagtcacagaaaaaaatatacatgcttactcaggttttcttaaaaataaatgtttatagagatccttgagtaaagacattttgcttaatttctttcttcttatccccacttgtatatcccctaccagtactgggatctgcacacatctttctgcagttacctcttcatagccatgaaccaaagcgttctatggggagcatgcaagtaagtcaagcctcctattctgttagcacttactagaggaggagattgttttcattgcatggcgacattttcttagccttagtgttctgatagtagctgactactcacttctctttttcagttttcataataagtattcatttttttgccataatgcttcctgtaaagccaattttatatactaataaaacatgaactgcccactcttcatgtctgccaaacttggggcaattgatgctaaatggtatttttaaaataaatgtttttatttactcttgaaaaaaaaaaaaaaaaa

SEQ ID NO: 5378 - DNA, 737 bp, Macaca Fascicularis
  misc_feature (1)...(737): n = A,T,C or G
ctgtacttagtgtagccagttcncttgaaggagaattgctgcctcataaatgcaatgtagtaatagtcccaaactgaaaagaattcatgacatcactagctggtaaatgaacaaactgtggtgtatccatacaatggcatattaccaaacaattaaactgttgtattaatacacacaacaagataaatctcaaaagcatgcaaagtgaaagaacccaaacatcaaatttaagttattgtatgatgttatttatatgaaatcctaaaaaagagaaagctatagtatttgaaagcacatccgtggaagccagggcccaggagagggagaaaaggatgaactgcaaagggcataaggaaatgtgaagggtgatggaaacgccctttacatatcatgatcacggtggtggttacacaactgactgcaacnnnnnnnnnnnnnnnaattgtatgcttaaaatttgtaacttactagatggaaattataacnnnnnnnnnnnnnnnnnnnnnnnnnnnnnnnnnnnnnnnnnnnnnnnnnnnnnnnnntcttctaagcacaatggaactgtgctgtcaaacatgtagccacatatggctattcagcatttgaagtgtggttactcagaaaaggggtgttttagatacaaaacacacattggattttgaagatttagtttaaaaaaattaaagtagtttattaattttttaatattgatcacatgtcctaatnnnnnnnnnnnt

SEQ ID NO: 5379 - DNA, 786 bp, Macaca Fascicularis
  misc_feature (1)...(786): n = A,T,C or G
agacatgtgcagtagtcaggaatgaggaactgctgtaacacccaatgactgcacactggaatgcagaaaagttaaacnnnctatgcctaaatgcctaaaatagacaaactggatagttatctttttagagcaatacttcatttttttagagtagtatgaattcctagatcagtcagacacacatgttatttagtttgttccttagtacattgttaactggcctaactccaatggctgacgtggtaaagattcaccacttctagcatactgggcactttttggttttgacttgattacattaactttttgaaactatnnnnnnnnnnnnnnnnncaatcttatgaggtacatctgagttgttctagatgctagagggtagtataacaggaaaaagccccagctctcatggtgagacatacagtaagtatacaataccactttgcaaatagtagtgtgaatggtaaaagataaagtagggaaaagggtgggaggacctgaggtttgatagaatgcccacggtggtatatgcagattaatactttcaattaatcctcctagttgcctataacattaacatttcaagataaattcttgaatgtatcttgattattaatgagatgtgctttaagtagagacctaaatgaagataattttttctctagtactcaactagcactatacaagtggattgcatatgggcagaatcaatgtgcaataattaagaatattaatttgcaattatgtttgatagttaaatggtttatgaatgttgatctggagtgtcaa

SEQ ID NO: 5380 - DNA, 3061 bp, Macaca Fascicularis
  misc_feature (1)...(3061): n = A,T,C or G
acagagatgctgctcaagagacccttcaggaacaacgtgttcctccctccactcaccattcaagttcctggactgagtaattcacatactaggtaaacgttacttgtggaatgatgcattaaaagcctccttttctagctgtcttaagcctctggccaccagcaccactactgtacatagctctaattcaggccctcctcatttcattgcttatctcccttactctctcagcctctctctgcctcctctacctctcccaccaccatccccgtgaaatgcagatctaactggtcactccattttctccagtagattgccagagtcgtggatgggaatgtgagttttttagtgtcacatgcagaatctcccttcctgtgtggaaccttgcctgcctctttggtgcacacccttgagctcaggttcctgggctccctgggccccatacgcagtcaggtctgtttccacagatttttaatgtcatggaccgtgtgtttttcagatgtgtttggaatgtggtagaggcttaataaatatatgatgaatgagtaagtaggaatctcaaagtggtttctaaaatttctctttttcccaattatgaaagtaagtacttagaggagaatcatataacccaagaagatattaaaatagaaattaatctttggagcttttgcttcattgacgtctaacccttactgtaatcaggaggaaatgttcttgtatgctgggcatccagctgttactccccaagctatatcagattactttctttccaggctggactgcagagtgaacgcagaagagaagtagtgggggctctgacccatccaaaccatttcctcaccgggagagcttaggaatgttacttaacctctctgtgccttcatttcttcacttagtaaaagaaactaaagacttccctctttagggtaggtagtacatgagatagcatatgacataaaatgcctggaatgtagtcattaatttagtaagtatttattgagggctgggcacagtggtgnnnnnnnnnnnnnnnnnnnnnnnnnnnnnnnnnnnnnnnnnnnnnnnnnnnnnnnnnnnnnnnnnnnnnnnnnnnnnnnnnnnnnnnnnnnnnnnnnnnnnnnnnnnnnnnnnnnnnaacagagtgagactccgtaaaaaaaaaaaaaaaaaaacacacacaactcagatgttttactatcaaattaatgcattttatacaaatattccaaaggtttttgttttatgtaccgttgttggaaaacatgacataaagtggccactgtagttaaataggaaatgtgaatttaaaaattcttcctgtactggcccaaactctatatactatcaaatagtaggtactcagtatgtatttgcagaagtgtctgcgtggatgactagcacattcattggatacagtaacatcagccctgcgtcttagcaggagccccagtaagctctgtttttctatttgcattgtagcattggttgtttaatgttgatttgagtggaacatcctctcaaaagtaaggtaacagattcctggctgcaagaaaagacattttcttggagatctccgttttcaaatatttctttatcacatatacatgccaactggaaatgagtccttttattaaaatggttgggagatacagtgataaatgtttgacaaaaaaattaataaaatgattgggagggttaagggaattcagtcatccactctagaatgaattacttccgttagataatcgctacttatcttcttcggtgtctgaaggatcatgcaagggatgtgagagctttagttgtggccacagagtagtaagtttggggtttggaacgtgcatctggagggaaaatgagggaactggccatttaagggcagtaagaaccagaaaaggcaaaacagtaaagccatattttgactgactttgtaagttttccaagggcttgtcttgacagaaacagtgtgataagtgagaagagatttgttcagaattcagctttggcatttattttttgtgaaacataggttagtttacttcaccttcctgatccttggttacctcatttatgaaatgggtttgggaacagtacctaactcacagagtcattgcaaaaattaaataatagaattcatataatgtacctagcagtttaggtgctcagttttttaaaaaactgttacctttttatctgtctggaaggtcaaaagccaatagtcttgattgctaaaattctggagataagatctctctgcagtggtaagtgttcagcaggtaccttaatttcttgccagggggttgttgaggttattgatcgtatgccaaaaatgtatgtccctgtagggcacagtaggtgtctaaatatttattgaatgaaaactttgaaatgaccgtaatggtctgagcagctctgctttcaggcactagcataggaagtgaagagagctttgtcatttttacctctctccactcgtcagcctcatcctggatgggtcaggcctattttccaagtacttaattatgttcacttcttgtttgtaaagcagagcaattcagtaagatgatgggaggaaataatttcatttctgggtactaattccagtagcagctgttttctgctaactgagaaatatgcctgtgctaacaactttacacttccagcaacaacactggaaccatgatgcacactaagctgtctaaagacaaatgtgcggtgtttattttcttttacgaaacacagaaacattaattggaattaatgtattctgtttctgcatgcatttctgcttacacgtttgatgattttcctagctgaacatctactttttattatgtcagagggatatcttcatcacttctcttcatgaaatgtacccagagctttcctgattgaaacattttcaaaaatcagaaacttgaataggttttccttttgtctgagggtgtgtgggggagggggtgtaaaatgaagacatctgtgtatattgttaattgggaaaaacagtttacaaaacagtatatacaagttgaaccaacatatgtcaaaaaaaaaaaaaaaa

SEQ ID NO: 5381 - DNA, 801 bp, Macaca Fascicularis
  misc_feature (1)...(801): n = A,T,C or G
ctatcannncnnnnnntgtttccagcatgcccttnnnnnnnnnnncccttagttcacagatcttttcaattaaaacctatagcaaaaaaggtgtttgcactccaattttggcttgtattgttttcttttccttaatattacattttgaccatttaagggcattaaattggcttgttttggtcaggtgcggtggctgctcatgcctgtaataccagcacattgggaggctaaggtgagagaatcactagaacccaggagttcaagtccagcctgnnnnnnnnnnnnnnnnnccccagctctatttctaaaataataaattcggttattttgaagctttttcagtttgaggatgctataaaaactcagacttgcttgaatcttccatactagtatgtaggagtaatttctctaaacagcattttaagttatttgtgggtttttaaaatgtcaacaatatgcatggcaatatttattttttatatcttcatataaaattaataaattatagcattatgaacattttagaaccatgcaggagaagttatagagaaagtaatttatggtaattttcataaagctttaaaatattttcatttgggctgtaacaaaatgagtgcaaaggaacaatatttagcctggaggggcttttgttatttaaatgtcagatttctttaatacattcttaaaataatccttgtgctgcctctacgttccctgttactgtgtttcttgaagagattccaattagttttcaattatttaatcaattagttttcattattgtattgctgttacatattt

SEQ ID NO: 5382 - DNA, 696 bp, Macaca Fascicularis
  misc_feature (1)...(696): n = A,T,C or G
cagctaacacattnctgntttnnnnnnnnnnnnnnnaattgtagctgttactctaatttgtgacatggaactaactcatgcttcaatccttgatagagcaaaagtcagaacaggttatataaaaatannnnnnnnnnnnnntttgttaaatcacctgctttgccacagaaaatggaggctttcacaagggtttgatcagaattaaaaccccgaccccgccctctgttaactgagcaggggtggtctttgtaactttactgaacaagagggaagcaactgtgatgggaagagattacctagccttactaacaagaagcattctaatagataaactagtaccatcatgtaaggaaaatgaagccatgttgcatccacatgttcctgtttgcagaaacctcacaggacagtacgaatatctggcatttttaagttcattaaagcagcaaattccttctcgcctttaagggctatggttgtagtgtaacctgtggctaacctgctttcannnnnnnnnnnnnnntagcagagcttnnnnnnnnnnnnnnnnnaaattgaataaccatgtgaaataatttgggcttaaaagtgaacataaattatagagtggaaggtaagggacaaaagccttttatctttaattttcctggagaattatataaaggttttcttagnnnnnnnnnnnnnnnnnnnctgaag

SEQ ID NO: 5383 - DNA, 123 bp, Macaca Fascicularis
gggcgcgagtacccactgtttgagttatatcttctcccatattcacgcactctcgtggagaaaagttaatccaaatacacacttaaaaatagtgtgggtctctattttgatatgagtatttta

SEQ ID NO: 5384 - DNA, 755 bp, Macaca Fascicularis
  misc_feature (1)...(755): n = A,T,C or G
gccatagtgagnnnccgatgcnnnnnnncccacacagcctgcactccaaccgtaccctttatgagannngcattgaannttggctctcttgaggatatattcaggggtccccaggaactcttcagtccagagaccaagtggtggccttggaaagcagatgtcaggctttggtnnnnnnnnnnnnnnnnnnnnnctcccatattatcccccaccaacctggcctcccagaacccccttcttctgctcctccgtgaatgacaagtccaggcctcccctacctcatgtcttctcatttgggggattgctccgtgctctccctttctctcaaggccgaagttgggaattgagaaaccatgtttttaacttgtggctgcttttgctgctgctgctcctccgtatctggctgtatgggaggagaacccacgcctgcccaccacaggggnnnnnnnnnnnnnnnnnnnnnnnnnnnnnngcttctcttctccccatgttcccttttttctctgaagtcccctgtcatcagccctcctgacccctaagagagatgacccatgagagtggggttctgaggctcccctatggggacagttccatttttgaagtgtcagtgttggggaatatctgtggcctatgaggcccatctcaggtttggggatcccccagtccctatgatcagtgttggagtacccccctgggagagcccagtttctttgaggccccaggccctcttttaactacccttgaatgggtgtaac

SEQ ID NO: 5385 - DNA, 746 bp, Macaca Fascicularis
  misc_feature (1)...(746): n = A,T,C or G
agcctgccgagtagctgggattacaggcactcaccatgcccggctactttttgtatttttaagtagatacnnnnnnnnnnnntggccaggcttgtttcaaactcctggcgtcaggtggtccacctgcctcggcctcccaaagtgttgggattacaggcgtgagccaccatgcctggcctctcttttttannnnnnnnnnnnnnnnnnnnnnnnnnnnnnnnnnnnnnnnnnnnnnnnnntggtgtcttggtgatctcacataaccaagatgccatcccgtggagaaccacatccccctggatgccctccagtcttggtttgggctggcgtcagagcctgtatacagtattttgaatttgtatgccactggtttgcattgctggtcaagaactccagtgctttgcatagccctggtttagaatcctgttacagcagttcttggaaagaactgtgcagaggaaactagaagacccagcaatcattccattgccctgccaaggtacacctcagtactccccttcccaactgaggttgtgtggggctagctctttccagaagcattgaagtttggtttctgatgtgactcagaagttaggaaccagaagctacatcaaataagctctgaaaatctgagtagtattgtaggaaaggttatgctcatcannnnnnnnnnnnnnngcttaacaaaggttaccaaagccacaattcataaccactcactcatccggttcaactagannnnatcc

SEQ ID NO: 5386 - DNA, 713 bp, Macaca Fascicularis
cgcccattggcgcggaggtccccgacgtcaccgcgagccccgcgaggctgcttttctttgcgcccacccgccgcgcggggccgcttgaggagatggaagccccggccgccgacgccatcatgtcgcccgaagaggagctggacgggtacgagccggagcctctcgggaagcggccggctgtcctgcccctgctggagttggtcggggaatctggtaatagccccagtacggatgggtcactaccctcgacgccgccgccagcagaggaggaggaggacgagttgtaccggcagtcgctggagattatctctcggtaccttcgggagcaggccaccggcgccaaggacacaaagccaatgggcaggtctggggccaccagcaggaaggctctggagaccttacgacgggttggggatggcgtgcagcgcaaccacgagacggccttccaaggcatgcttcggaaactggacatcaaaaacgaagacgatgtcaaatctttgtctcgagtgatggtccatgttttcagcgacggcgtaacaaactggggcaggattgtgactctcatttcttttggtgcctttgtggcgaaacacttgaagaccataaaccaagaaagctgcatcgaaccattagcagaaagtatcacagacgttctcgtaaggacaaaacgggactggctagttaaacaaagaggctgggatgggtttgtggag

SEQ ID NO: 5387 - DNA, 722 bp, Macaca Fascicularis
  misc_feature (1)...(722): n = A,T,C or G
taaacatagtacttggactagggtacannntacaaaataaataaacagttttaaaaatgtttagacacagatatttggaattagctatcntagtgccaactgctttttatttttttacttcatcaaggtgatgtaagtgactcacctttaaagtttttttaacgttattttttgtcactactctgggaaatggtttatcttcaaaatgcaatgcttttcttaggannnnnnnnnnnnnnnnnnnnnnnnnnnnnnnnnncttgtacaagaaaaggcagtattagaggaagaaaatttaaagaaaagctagaggaaaaaagcaattttttttaatacttactagaagcaaactgcccttgcatggaaaactgtttatttttttcagtgaaaaggaattctgctttcgtattttttgggaaagcaggaactgagttcattacatctttaatttggcagaaattagcctttctgtgaaccagaagtggtttggggcagatctgtagtaaacaatggtgattttatttatttttactctctggaaaaggagataataccattccagaaagtgaactcatatttctaaggttaagattcccttttattgcacctagaatagtgctatgcacagagtgggtgcctgagttgttgtcattctttttaaaaaaaaaaaaaaatgtaaactggtaaattttgtgcttatcttcaaggctggcttaagtata

SEQ ID NO: 5388 - DNA, 2284 bp, Macaca Fascicularis
ggtaccatggcgtgcaggcagagaggaggctcttggagaccctcgggctggttcaatgcaggctggagtacttacaggtcgatttctctcttctttgcccttgtgacttcagtgaactccatagatgtttttcagttggtaagtcctgcttttccaggcactgtcatttgcgatggaaggggaataacagtggagttcccaagcagtcctggcaccaagaaatggcatgcatctgtggtggatccccttggtctcgacgtgccgaactgcacttacatcctgaacccagaaaagttcaccctgagggttacctatgaaaactgtaccaggagagtgcatggtggataccagatgaccatcagagtcatgaatgacagtgctgctctaagacatggagctgtcatgtatcagttcttctgtccagctatgcaagtagaagagacccaggggctttcagcatctacaatctgcaagaaggatttcatgtctttttccttgccacgggccttctccggcttggctgatgacaataaggtgaccaaacttaagatgggatggagcattgaggttggtgatggtgcaagagtcaagactctaaccctgccagaggccatgaaggaaggcttcagtctcttgattgacaaccacaggatgatcttccacgtgccattcaatgccactggagtgactcactatgtgcaaggtaacagtcatctctacatggtgtctctgaagcttacatttatatctcctggacagaaggtgatcttctcctcacaagctatttgtgcaccagatcccgtgaactgcaatgccacacacatgactctcaccataccagagtttcctgggaagcttaagtctgtgagctttgaaaaccagaacattgatgtgagccagctgcatgacaatggaattgatctagaagcaacaaatggcacaaaattgcatttcagcaaaactctgctcaaaacaaaattatctgaaaaatgcctactccatcagttctacttagcttcactcaggctgacctttctccttcagtcggacgaagtatccatggtgatctatcctgagtgtgtctgtgagtcaccagtttccatagttacaggggagctgtgtacccaggatgggtttatggacttcgaggtctacagctaccaaacacaaccagctcttgacctggatactctgagggtgggaaactcatcctgccagcctgtcttccaggctcagtctcaggggctggtacggttccacatacccctgaatggatgtggaccgagatataagtttgaagacgataaagtcatctatgaaaatgaaatacatgctctctggacggatcttcctccaagcaaaatatctagagacagtgagttcagaatgacagtgaagtgttcttacagcaggaatgacatgctactaaacatcaacgttgaaagccttactcctccagtggcctcggtgaagttgggtccatttaccttgatcctgcaaagctacccagacaattcctaccaacaaccttatggggaaaacgagtaccctctagtgagattcctccgtcaaccaatttacatggaagtgagagtcataaacagggatgaccccaacatcaagctggtcttagatgactgctgggcgacgtccaccatggatccagactctttcccccagtggaacattgttgtggatggctgtgcatatgagctggacaactaccagaccaccttccatccagtcggctcctctgtgacccatcctgatcactatcagaggtttgacatgaaggcttttgcctttgtatcagaggcccatgtgctctctagcctggtctacttccactgcagtgccttaatctgcaatcgactctctccagactcccctctgtgttctgtgacctgccctgtgtcatctaggcacaggcgagccacaggggccactgaagcagagaaaatgacagtcagcctcccaggacccattctcctgttgtcagacgactcctcattcagaggtgttggctcatctgatctaaaagcaagtgggagcagtggggagaacagtaggagcgaaacaggggaggaggttggctcacgagatgttatggacaccaaagggcacaggactgctggagatgttggttccaaagctgtggctgctgtggctgccttggcaggtgtggtggcaactctaggcttcatctgttacctgtataagaaaaggactgtgtcaaatcactaaatgggcttctaaataaagcagtcaaaataaaaaaaaaaaa

SEQ ID NO: 5389 - DNA, 631 bp, Macaca Fascicularis
  misc_feature (1)...(631): n = A,T,C or G
gagcacaaggatgcnnnnnngagagatnnnnncagtgtgtgtgtgtatttatttacagtacagtgtgtgtgtgtgtgtgtgtgtgtgtactcgcacgtgtgggtgagtgcgtcttctgagtgagttctgttcagttcnnnnnnnnnnnnaggctcctccgctctggacacaacccttttatagattaatttctctgccaattaacttgtcattttcagtacatattttactattccacaccaaccataattataacaagggatttttcttatgcactcctatgcatgtgaataacatgtggtgtaattctgcttcttacagaagtattactgaaggtattatttccaatattatttggtttattatgcggatcttttttatnnnnnnnnnnnnnnnccttctgtgccaatcaatgccatccagacatggtttttccctccaggggcctttctccagagggcacttctgctgcctctgcttcctctcgttcgnnnnnnnnnnnnnnnnnnnnnnataggttccgttctgggcggtggttctcgagcctgccattcaaaaccaaagtgaattagagcatttctcataacatggtattgaagttcctttttgttctcaaannnnnnnnnnnnga

SEQ ID NO: 5390 - DNA, 625 bp, Macaca Fascicularis
  misc_feature (1)...(625): n = A,T,C or G
tgcacatacttccatagaaagtcccaggaggacttctgtggtctcgaacactcaacagaattatagattctaatctgagtgagttactgagctttggtccactaaaataagatgagaaatacacgactgactctataactctggtctttaagaaagatgccttttcacttttagacaaaatattttcaatgctgaaatgtacataatctggttctgctaccataatgtatatgcagcttccccaggatgaatgctgtgtttaaatttcataaagtaaatttgtcactctagcactttgaaagaatagttttcactttttaaattattcacgttctctacaataatgacatcccggttcacggaggcaaaaaacaagtttcttgttatcccgaaacttttctatgctcagtgaaaagtatctgccagatgcagcacgaggcccgtgaagggtgactgctgaagnnnnnnnnnnnnnnnnacccctggttctgttctgcctccaacacgtataattttatttgaaatacataatcttttcactatgcttttgtggaggtttttttaagtatgtgtaaaaatgtgatgttcagataagtacacttatatcagttcagtgttaaaatgc

SEQ ID NO: 5391 - DNA, 1692 bp, Macaca Fascicularis
ataatcaaaaagattccagcacattctttcagtgtgtttcagtgataattttgtgggggagtagaggtacacataccctctttgctgaccatattgttgaaattatgatcttaagcaacactgttagaaatgcttgcataaaatatcttctctagtattaatgaatcgattcactttgaatttaaggttcaaaaaatatgcactaaacaaatatttttatatctgtggtgttttcctattaactgctattagtgaacacgtgaccatatacctgacatcattaaaaaggaaaatgacctaaatgaaacgttaaaagtggaggtatttataaagtcttctgccaaagaccattgtttaatgatctgtaaaatgtagattatcttcttttattatgaatgtgattgtaagaaacactcaccctaacattatcttttgaaaatgaatattttgtatttctaaggaccaaggaaaatattttttaagtcaatgtagtacacagaagccttgaaaatgagaagtacaatgatttggatcaactgcataatgctagattagaattccaacaattgataatacacttatcaatctttcctgtaattcttatactgcactaaattacattttggaaatttcagctaatcttttcaaattaaaggcaccaacattaatgacagatcttgtctaacatgaaaaacatcaaaacattccttttcaagcattttgaatggatgaaaattgccataaaattttcccacctacctaatcattccatgtaagttaactcagcggtctaacaatgttgtacagaaggttgacagactatgtgcaccaagaatatttaagttgtgcagttagcaagaactaaccatttcaaaatatactcaaatgttttgtaaataaaaattttgactcctatagttttgttcaaactgctgtcttttaaaataattagattttatttgaattttaaaagtaatctgttataaattagatgttactttgttgactctgtgattcaatatacactcagccatattcctgtggggaaatatcaatcttattgactttcatggcatgagccagagattcatagtttcctttaggactataagtatgaagacaaaacacaccaaaatgaaatgctagtgaagaaattagaaacctattgtataaaatgtatttttaaaatcttaagatatatgtgatttacactgcctgttaatctagtctctttgtgattaaaaaaaacataatatttgttaagactctgaaacaccaaatatttgtgatgtttgtatagcaccattgttatatgtgatttcaaagggtaagcatctctgttgtaatcatgtgagcccacagaagaataaattcctgctattacgtacaaccaactctcagaattcagacttcctgcagctgctgtatcaccaataaatgagaattgtgaaaaacaatttttaaagaattgagtttatgatcactgtgcattttgttaatgaatgatttcagagttttatttttaccagaaatgctctcagccagtaaacacaactgctgatttcaaccatgctatcatttcaatggtttctatattcttgatctaactaccaaaaactggaagcttgttgcaaggtgtgtcctaacaaacatccaataaatgacttttcctgcaaaaaaaaaaaaaaaaaa

SEQ ID NO: 5392 - DNA, 719 bp, Macaca Fascicularis
  misc_feature (1)...(719): n = A,T,C or G
tgcattccttttatatgtgcctggctctagtaaggatggccagggatttttacaatttgggtgcaaggcacttaagccacttttaaacttaatgggtggtttggggtcgtgttaaacgactcnnnnnnnnnnnnnnnnnncactttaggcatcagtagcattgggccatattggaatcctaaagtgtgaattattttaaggagagcattcatttttgtaatttttttcatcaaaaatatttctggtaagcagaagactttttaaaaaaactgatctggtcnnnnnnnaggttttaatattgcccaacataatgctgtaatagcattaaaaaaaagtatttgtgaactctgtttcttaggggcttgtacatctctctgctatggacatatataaaattaattgtaattatactcagctcaactgctacagttatgtctaggcagtggcttgggtttttatcgagcaacaacttagacatgtgactgtaatatgctgcaactgtgtgtactgaaaatatgtgaaaatggttgaatgtggactgtgtatatatgtatgtaaaaatttctgtgagatgctgctgtcgccacttaacattaaatatgttctagtggattttaatcctagtggccagttctnnnnnnnnnnnnnnnnnnnnnnnnnnnnnnnnnnnnnnagactgtttagtgaatatttgttaaattttattgttgtggccagag

SEQ ID NO: 5393 - DNA, 120 bp, Macaca Fascicularis
cttttactgtatctttcccatgtctgctaatatttatccttttggaatctgaaggctaattattttctatgagttagacagtgtatctcttgtttttttctttgtcatgtcaagcaatgg

SEQ ID NO: 5394 - DNA, 892 bp, Macaca Fascicularis
  misc_feature (1)...(892): n = A,T,C or G
aggagtggagggatgnggaggtatnnnnnnnnnnnnnnnnnncaaggtgcaagtgtttatttttcaaacctataagtacatagatccaccattttggcacaagacaaaatactcatgctaagcaaaggaagagaannnnnnnnnnnnnnnnnnnnnnnnnnnnnnnnnnacaaataattctccaaagaagggnnntgaaaatgctagnnnnntaagcacttatgactatcaagttgttccctgcttaaattcatacccatagttttgagtcggtatgaccccgctgcagtgtgannnnnnnnnnnnnnngtgccatgcaaggaccaccttgggatactnnnnnnnnnnnnnnnnnnnnnnnnnnnnnnnnnnnnnnacacgctgcccagcccacagcagttgcacgcacccgatgggctcggactcttagctggcaggctaggacacacagtgaacataaatgtactgtgaatnnnnnnnnnnnnnnnaataaaacattgtgaccaaacaatcagcttattcacttatcaggaatcgactgttctgctaatttgctgttgttgtttttcatctctgttgtagttcactatttttgctgtgttctgttctctcatgcttgggcaaatcactgggaatattatcttcatgtgaccatgaaacgtttctattgagtgaaaatgatatcttaacaaaatctatgcacttgctatcaggaacacaatactggatgtgtcttatatatattgaactatatagtactcgatttcttaaataaagcttaagaaaggacttgtgtgtaaagttaatgtgattatttttcaaagcagtgtttctaaggggtatttttgttcttttaagtcttgagtgatacaggatatttttcattaaaatt

SEQ ID NO: 5395 - DNA, 746 bp, Macaca Fascicularis
  misc_feature (1)...(746): n = A,T,C or G
acnnnnnnnnnnnnnnnnnnnnnnngcgagaggnnnnnnnnnnnnnnnnnnnnnnnnnnnnnnnnnnnnnnncgcnnncctggctgggcctgcccaacaacgccgagagagtcctccttaccacacagggtgagtgatgagggtcctccccacacgcgggggggtggcgagggtgcccacacatggggtgggtggcgagggtcctcccctnnnnnnnnnnnngtggcaagggtccccacacacagggtgagtgtgcgctgctgtcccagggccctccctggttatgctgggtgtggctctgtcagcctcggcctccctgcnnnnnnnnnnnnnctcctannnnnnnnnnnnnnggaggcaggggaaagaattggctctaacagnnnnnnnnnnnnnnnnnnnnnnnnnnnnnnnnnnnnnnnnnnnnnnnnnnnngtaaatgagcctagaaataacatttagattttcatctcatattgnnnnnnnnnnnnnnnnnnnnnnnnnnnnnnnnnnnnnnnnnnnnnnnnnnnnnnnnnnnnnnnnnnnnnnnnnnnnnnnnnnnnnnnnnnnnnnnnnnnnnnnnnnnnnnnnnnnnnnnnnnnnnnnctactaaaaatacaaaaattaggtgggcatggtggcgggcacctgtaatcgcagctactcaggagactgagacaggagaatcatttgaaccnggaggtggaggttgcggttagccgagatcacgtcacttactctagcct

SEQ ID NO: 5396 - DNA, 769 bp, Macaca Fascicularis
gagtacttggattgggataaagggcttgtactatgcacttttattaatgaataaatagaaaatattagtaacactctttgttttctgtttggcttttgtgggaagagaagcatcttttgcttagtaggtgttaacatcctatattaaacagtttctttttaagacctaactaaagacattcctaagagagaacttaagttttaagaaaagttgtgagaaaaatatttataaaatacgtagtatggggccagtattcagaagtagagcttctctcttggaaattagattgcagtcacatttctttgtttattttctttctctgtctctctctctcttcctagaataccagataaaatagacatttgctttgagggactaatatccaatagtgttaattatttaagcagatatatcttgctgaaaaggagctagacatgtcactgtaccaaaaaacacacaaaagtgaaaatttgcttctgttctgtgacctagaatgtgtccagacattaaagatcatgaatactcataaacatgtaaaagtagtaacattgctctggcatgattttgatgtcagtgtgtatgtaataacttaagtgttatttaaaatagataaatttgtgaaataatttcttgtagacagtcaactttttatgattcaatctaaagattgttatgtacatgtcaaaggatagctgaatcctcagtgaaactgtaagttttcattaaatgactgctgcaatactagtttcttctcagaaagtggaatcaa

SEQ ID NO: 5397 - DNA, 122 bp, Macaca Fascicularis
ggaggaaatgtgagcggcacgtgcagatacaatgctctcgagaggacagcattttccacaggagggggtttctttccctggggcacttatataagagacggtctcttttggatacagagaaa

SEQ ID NO: 5398 - DNA, 2518 bp, Macaca Fascicularis
aataatgtggaaataactctagataaaattcagtctgataacctcaaatgaaaaagctttaaattcattcttgggcgtttctcttttaaaacttcactaatacagcattgtgtgatcagcactaagcagtcagtcccttgggggaatgtggcataatttggctataaatgtagcagtgcttggaaaggtggtcatcaaatgagactatttgaggggactatttgaaatgattcctgtgtttcttttggcgtcttccttcctgtacattggagtgatggaaagtctggtattaaaacctttcttacttttaaacatggttttacagactctggcaataagccttccaaaattctgcgccttttctgttatcaccaaacaagattttaagtggctttccttggcatctacagagagaaaattctatagccctccttcctaggtgttaccattcactgaatcttctcacagagggagatgagcaattgtcagtcaggagaattctgtttgctaaatgttgcctttatgctttcaaactgaattaaacccattgtgaggttgacactgggaggggctagaagattggtgggcagcagactaaagagttatgttggatagttttatttttgtggctgaaaataaaatcttgtctagcacagttaaagtcattaaaaataaaaatgacagctttagcacaattttaagaaaatgcccctctctattaccacattttctcttattaacagtatctcagaataattttctttccttagaaacctgagacaacgctagtcataactgtactagttactatgaaaatggaaataattatcttagaatattttcaaagtagagcgtgagcatgtatttttagtgagagagctctgatagttgttgggaatatataatttactggacctcagcccaaatcaagatgcttaaaattgtacttgtggagcttcactcaaaccaatgtgtcagataacgtattgaatatttatgaaaagagagactatatttatattcttagatagtttgttccacaatttttcatttcatgcttccatatatattaccctgaactttctatcaccacagataaagattttgttttgccctgcaaataaaaagacaattccttattgtctgaatgtaatacagtcttcattgtactattcaaccctttgtttatttctttttcattttgtgaaaaactccgggttagtcctcttggatgactgcttatttatgtgtaacataaatcccacatattctaatgacaacttctttaatccttccgggtcatatattatatttccatagtatcacatactattatttagttgtttacaagactcaaatttgaattcaggattacagtgctccttttattctttcaaacagataccatataaaagttctgttaccctcattctatacaacctatagatttcgtgtgttataatgtcagtttccagaataaaagtgagggaaatcagatctttattgataaagttagggagattgatgcaataggacaatttccagtttaatttagatcatctaatttttctgcctggacaacctgttttccgggttactgataacccctacaattttctactgaatttcaaaacctgttatgtgttatctatcacataacaggaccatgtttttaacatactgtcaagagcctgtattttgagttattccaacagaaatgatggattcctgtagaagtagtggtgggtgacctatggttacgtggcacagcaaagcaagtagctcttatgggactctaatatatgctaacgctggtcctcttagctctgtgctctcaccagtcaatgaatgaactatgaaagatttggtcaacagaaactattttagggtatgtttagttggtaaatgcttcatgttcatggatgatgcaatgtttttgcaaaaaaaaaccctgaaactattctttggcttggtgtccatggccctataccgccatcttacatgaaagccacagagttaagtgaccttaggtaacataatggtgatggttggcgatttgagcctttgtaacctaggaaacacaaaggtctgattcagattgtgtgggggatttttaacatatttgaaactcagggggaagatgattaataacacaaactgttagctacacatgaaggtttacttgagcttttgtgattcaaagctcaggggtggtaaggactctaaaaccagggaagagggagaattaatatattgtgcaaatgctggtatttcttacgtgactgtttgcctttgttgctagatgaacggaaactaacaatagctctatttctctgccaatataaaatctacctttcatataatgctacattgaaggcacagaatttgctagcatctctctctccccctacctacctatctatctacaatttaaataaagaactgctgtgtatgacttactctcaataaaagtttgtctctaaaaaaaaaaaaaaaaaaaaaaaaaaaaaaaaaaaaa

SEQ ID NO: 5399 - DNA, 676 bp, Macaca Fascicularis
  misc_feature (1)...(676): n = A,T,C or G
tggacatcgagannnnnnnnnnnnnnnnnnctcctgnnnnncgaggagcagaggttgtgtgagggcgttggtgctgtaaatgtctgtgtcagcagctcccgcggcggggtcgtgtgcggggacctctgcgtgtcgtgctcccggccggtgaccggcagcgtcttcagtgccccctgcagcgggaacgtggcagtgagcaccggcctgtgtgctccctgcggccagacctgcagcagcagccgctccgtgcgcttcgcctgagcgccctgctttgtaccgacgcccccacgccagcagacgtcccagcctcctgagacaggccggagctcccagggtcctcagacgtggggaaggagggcttcggggcccagcttccccacaggcccccacaccgcaccttcccgtctcgcttcccctcccgctagtcccttcactgcttctgggagcacagggctcctagcccacagctctccccacctccgcatctaaaggactgtgtcctcgcagccctaggcaaagacccgggtcctgaggcctggatgcctgtggcttctgagggacagatgggcctggagcccctcggtgtggacgtgctgtgccttctaatccactgtcttctaatacacgtgtgggacaggccacctctcccgccnngctgccgggctccctccctctc

SEQ ID NO: 5400 - DNA, 1517 bp, Macaca Fascicularis
atgtttcattcatttcaccaagacatatttattgagcatcaactacattttaagtgccagggatgtagcagtgaacaagacagacctgtccttcgtgaagtttatatcacagtgaggaaagaggctatttaaaaaaaaaagtgtacaaataaacaagcaaaatattggattgtgatggatgagtagtgagatcccatattagtttattatgtttatactctgtgcacaatgaaaacatctcaaaggacataaacactatgaacaattctaggtatctcttttggaaattttgtaagttactgtttcttttatcttatgtgtactttattatttgccttttactttgaaaaggatatcctggaaaacccctgaccactggatccctaaaaaccgaagtaggaggttctcagtcttcgtaggtttatctcccaacctctgaagtgcatgtgtcttaccaaagtttccaacgtgctagccacctcttgctcatcctgcctgattagcataatgtcattggtgaaatagatggatgtgatgtgctctggaatttccaggtgatccagctcgttttggactgtgcagagagccattatgtcattctcctggatccacctgatttccaaaggggccagactggcaatttaaatagagatatgacagggatgaccaaccacccttgtatacttcaggtctttaattatggcattaatctccaccatcatctcactatcccctccgatgaaatatcggttttgatttgttatcttgacttggaaagaaggacagcttcagaggcttcccattggctttccgcaccatgataactcaagaccaaggaccttgaacttcttatcaatgtggagattgctccagctgcctaatatgtactcccaattatgcactcaggaactaaggaaatgactgctggatgggtccatgtatttctggacccactgtaagctggacattatccaggactctgcttattacctgatccccgtaagcccccacacttagagaggagccatgtgtgttacacactttgggtgtctgggtaacacctgtgaaatgtctgggtattcctctttcctcaacatatattcagtcaagaaaatggccacgggacacagaccaaagagtaatcattaattacagtaaatatttgtttcagtattgaagaccctgtttctctagctgtgcagctgcaaggtcactagacagataaactcaagccataaaacatgtttttacttgaaaagttagaaatgatgtaatgcatgtctcaattaattaaataactgtctttgtttctcgcttctgtaacatgcttctccccacacagatctcccccagccccatgaaatgtttaaaaggtaacttgactctttgttcagggctcagtcctttggatgttaatccaactgggccagtgcacctaaataataaatcctcctcaaccaaaaaaaaaaaaaaaaaaaaaaaaaaaaaaaaaaaaaaaaaaaaaaaaaaaggccaca

SEQ ID NO: 5401 - DNA, 663 bp, Macaca Fascicularis
  misc_feature (1)...(663): n = A,T,C or G
gcaggttgaagttgggatgnnnnaggtagggactgtgnnngggcttttggggcttgggatggaggaaggaatgaagaaccactcttnnngggctgaagggacctactgagtggccctgcatggaagtttggaccaggggccttcttccattgagnnnnnnnnnnnnnnnnnaatgattcagtggtggctggtggcggggccattgagatggnnnnnnnnnnnnnnnnnnnnnnnnnctcaaggactattccaggaaaacagcagctgttgattggggcgtatgccaaggccttggagattatcccannnnnnnnnnnnnnnnnnnnngnnnnnnnnnnnnnnnacattctcaacaaactgcgggctcggcatgcccaggggggcacgtggtatggggtggacatcaacaacgaggacattgctgacaacnnnnnnnnnnnnnnnnnnnnnnnnnnnnnnnnnnnnnnnnnnnnnnnnnnnnnnnnnnnnnnnnnnnnnnnnnnnnnngnnnnnnnnnnnnnnnnnnnnnnnnnnnnnnnnncaactgtggatgctcccccagcagcaggccggggccgtggtcgtggccgcccgcactgagaggcaccccacctgtcacatgactggctggctgctgggtgcacctactctccttggcttggt

SEQ ID NO: 5402 - DNA, 759 bp, Macaca Fascicularis
  misc_feature (1)...(759): n = A,T,C or G
atgnnnnnnngangtaccagagtgtgannnnnnnnnnnnnnnnnnctgcacgannnnnnnnnngcacgaggcctcttcattcgctgtgggatcttcctcatcctggagaagctgaagatcatcacctacaggaacctctttaagaaagtgtatttgttactgaaaacacaccagctgtctctgnnnnnnnnnnnnnnnnnnnnnnnnnnnnnnnnnnnnnnnnncgnnnnnnnnnnnnnnnnnnnnnnnnnnnnnnnnnnnnnnnnnnncatgggccacatcaaaggctacatatcgcatcagcatnnnnnnnnnnnnnnnnnnnnnnnnnnnnnnnnnnnnnnnnnnnnnnnnnnnnnnnnnnnnnnnnnnnagccctgaggacgggtgagcagttgtttctttctgttctggttgtgccgatgagaccggnnnnnnnnnnnnnnnnnnnnnnnnnnnnnnnnnnnnntnnnnnnnnnnnnnnnnnnnnnnnnnnnnnnnnnnnnnnnnnncacacccgagtcagtctcctccgtttgtaactaatttcagcctgatgaaaacctggaattcctttttcacaaaactcggctggttctggagtctttgtgaaacttctttgaaggannnnnnnnnnnnnnnnnnnnnnnnnnnncttttcctnnnnnnnnnnnnnnnnnnnnnnnnttgtaactttttgtagttctttgtataaaaagggtattctgaatttatnnnnnnnnnnnnnnnnnnattata

SEQ ID NO: 5403 - DNA, 762 bp, Macaca Fascicularis
cctcagaaacttacaatcatggtggaaggagaagcagacacgtcttactggcagcaggtgagagagagagtgtgtacaggaggaaatgccaaacaattataaaaccatcagatctcatgagaactctctcactatcatgagaacagcatgggggaaaccacccccatgatccaatcacctccctccctggacacgtggggattacaggcttccccctccacatgtgaggattacaatttgagatgaaatttgggtggggacacagagccaaaccatatcacacacatctgctaagtctcctcctgtctttctggagcaagactccgctgttcacccacaacaggcttccagcgtcagctgctctggtgggaggccagaaatgtccaacccctccccctccaggaaaccttaaagaccagaaaccttaaaagactttcagtatcttacctctcatggacctggctgggattctgtctcttttacacaaaacttcctgcactgccctgacccctaacacccatgacagattaaagatgccacgttcgttagcctacacttgtgccagtcaccaagttttggctgatcaaatgtaaccaaataagacaaacacaaacctatacccaatccagctgtttctgttcctcacttctgttttctgtacatcactttcctttttctgtccaaaaatcttcttccaccacgtggctgctctggagtctcacagctgatgaggctgtccgatatgtgaatcattcattgctc

SEQ ID NO: 5404 - DNA, 715 bp, Macaca Fascicularis
  misc_feature (1)...(715): n = A,T,C or G
tnnntaattaagtcaaaataccaagagaaaaattgctactaaaacttacattttgagccacactgatgtgcagcacaaaatgaaatagttttcacctccattccattttttaaaaattcacggtccacactgaaacttgctgggttttagcaggagacgaaggtgccacccacgctgtcctgatcctgctttctccaacccagtgacctccagcacatgatcactgcagccagtcccggccatgccgatcccgccacctcccggccacacacacttgcagacccacaannnnnnnnnnnnnnnnnagaatttcagttcaggttggaaaaatgcnnnnnnnnnnnnnnnnnnnntttcagtaagtaggcaacaagtggaaactgtataattttcatcacctattctgctgttctatctgagtgtacctttggtttgtgaactgggcccttgtttgtgccacatccttcaaagatgtttcctgtcaggacacctgtggtcccgcccctcctcagataccttcccnnnnnnnnnnnnnnnnnnnnnnnnnnnnnnnnnnnnnnnnnnnnnnnnnnnnnnnnnnnnnnnaaattacacggtttccagacattaaactttttatattatgaaatttaccatgtaaaaagaacttcatatnnnnnnnnnnnnnnnnnnnnnnnnnnnnnnngctcctttgtntttcagtgtctataaagca

SEQ ID NO: 5405 - DNA, 530 bp, Macaca Fascicularis
aagccggccccccagaggaggcagccaagggccgagaggcacagcaggtatgaggcgcaggacagggcgccctggccctgcaggaagatgctgaacacagctcttgggagctggggcaccccgggggagaggaagagggaagcactccgttaagagccctccgcatgacggccatgtggttgctggtggcttgcgccattgtcactgagcagtgtggcaaactctccagcacggcgaccgtgtgagggcaaggagtggcctccctgcacctcacatgctcatccccgtgcacatgtgggttttcacacacgagcccagcccctggtctattcccctggcatctgaggctggtgcaccctgacctgggcctactgctgcccaggccacaagccctctccactatgacgagagaacaaggcttggtggcacccagcctggctctcctggctcccctggctccctgtcacccctcagggcctggcctccctctccagctgcaggctttcacctcttgcctgggctggattccc

SEQ ID NO: 5406 - DNA, 786 bp, Macaca Fascicularis
  misc_feature (1)...(786): n = A,T,C or G
agatgcatatcctaactggatgctnntcaaggcctcactgcatatttgtgttagttgcaccggggccatttgtagtttgggcaaccaaatgccttaattggaaaaaaggcattgtggtttcccctatgatctaaattgttacattttaccatttcatttagaaattggtttcactttataaaatgaagatttagttttcatattgcatacatagctgtatagatttcaaaattagcttgttaatttgtggcacttactattttggtgttggtaatgcttaaatgcatacttaaaaatgaagtactgttatctaagctactgtgtttagaaaatgttaagaaggagcatccagaaatttttatagaaaagtgtaaatggaagaagagataagatactgtgaataggctctcaaacttaaaaaagaaaaaactttgccagttttaaggacatattttgattctttcagtattcttaacacctttttaaacaaagttcttgaaagtacccaatattattgggtttgttttatgccattattgattcttgatattcaagcatttacaatgtagcatatttgatttttcttttttctttctttttattttttggcatcattaacatttcatttgaaatgcatattgttcttgaagtactttgtttttagcataaatgttgtgcattttatcttagtgtttggatgaaacatttgtgttgtttagctttctttcatttgctttgtatatttaataatgtacctaaaaaatccagcaagaacacatttgcatc

SEQ ID NO: 5407 - DNA, 772 bp, Macaca Fascicularis
  misc_feature (1)...(772): n = A,T,C or G
cagtgatgatgagaaggaatgcntcagctgaagagagccannnatgccagtacagatcagccatcctggatggaacttgccagaaagaaatctcaagcctggagtgacatgccccagattataaaataggtnnnnnnnnnnnnnnnnnnnnnnnnnnnnnnnnnnnnnnngccacttagttaaaaaannnnnnnnnnnnnnnnnnnnnnagaccgtgaaacttaaagattgattttatcatnnnnnnnnnncgaacttggggaagaggaaggaaccaggcaaaacaaagaggatcaacacacagccatactcctgggccagagggcccagaaacaagaacaacactgaaagatnnnnnnnnnnnnnnntgtgcccaaaggtatgcgtgtgtcttttagannnnnnnnnnnnnnnnnnnctcagacaagaaagaaaacagaaatgaagttggacgcgtaagtaggacacccagcaaaggccagaagagaagcccttctaggcgaagggacatctgtgcttccnnnnnnnnnnnnnnnnnnnnnnnnnncgctgtcttgcctgtggatcctgtcttctctcatgtttactacgaggcatgacattcatggcaaaacagagatgccgtttccaagagcannnnnnnnnnnnnnnnnnnnnnnnnnnnnnnnnnnnnnnngaaggagatgaaggaacatggcagggttcatcaatnnntagactgtttcccnaaaataatttttaaacttttccacnnaggcatnnngtgtcttta

SEQ ID NO: 5408 - DNA, 217 bp, Macaca Fascicularis
aaatctgggaggaggtcccgatcccactccagatatccacacaggtgtcttaaaaagtctaagagaaacacacactgaggtaaatttttaagaggcggtcacatattggaaatgcgatttgttttgtgcgcgaacggtctgtttttttaaaaaacacaaacacaaaatctaatgagagagcgctcttgggggtttttgtttgtttgtttgtgtatgc

SEQ ID NO: 5409 - DNA, 777 bp, Macaca Fascicularis
  misc_feature (1)...(777): n = A,T,C or G
gctatacagacagtantcnnnnncccacacnnnnngctaatagccagacatgggtgattgcttagagtaatgcactctaagcagttgtggctacttttaagagaactttcttgtcaggtgagatgtatttaaaccagggacagnnnnnnnnnnnnnnnnnnnnnnnnnnnnnnnnnnnnnnnnnnnnnnnnnnnnnnnnnnnnnnnnnnnnttaattcaataaatatgcgagttttttaaatcatatgccaagcattgttcataatgaacaggacaaaaactcaaaactttgcctttttggagactacagtctcgagtaagaagagagaaacaacagcatgccagaaggtctacagaaaatagtgtaaaggggattaaggaatgctgaggggggtggtggttcaattttaagaggaaaattannnnnnnnnnnnnnnnnnggtgacatttaaacaaagactgcttttgtgtgtatgagtgcatgtgtaatgtctttttaaacagcaaaaagttaaaagtctnnnnnnnnnnnnnnnnnnnnnnnnnatagggaaattagcactattaagcttttttnnnnnnnnnnnnnnnnactgtatctactaaaactaaatatgcnnnnnnnnnnnnnnnnnntaattggctgtaaagaaacaacacaaatgtaaaaaagaatgttcattaaagcatcgtgttgaatagcaaaatgttcagcaatagataaagctaactaaatgtnnnnnnnnagatcaaaggttaaataaatcatggaacatc

SEQ ID NO: 5410 - DNA, 733 bp, Macaca Fascicularis
  misc_feature (1)...(733): n = A,T,C or G
cagttcttnannnatggactaaatggctggtgtcacagcttacaaaagtatcttgaccttgatggagcttacattgagaaataaaaatgttgctttgttgttgtcgttgttggtggttttaagagacaggannnnnnnnnnnnnnnnnnnnnnnnnnnnnnnnnnnnnnnnnnnnnnnnnnnnnnnnnnnnnnnnnnggggtcaagtgatcctcctgcatatgcctnncaagnnnttgggnnnacaggcatgcactactatacctggctaatttcttgaactcctggtctcaagcagtcctccnnnntcagcctcccaaagtactgggattacaaacataagccactgtgcccaaccaagaaataaagtttttattttttatgttttacttcaatatttccacaaatcttttgaagtcccttcatataatgactggtaatttcattcactgaagagacagttctgaggctcatatgaagagctttttattatctgagacagacatgagaaattaagaacctgcctaaaacatcatttccaggcagggaaacaaacagctcgcagctggggttttgaatggagaggcaaagtgggaatggctaagaattaacatattttctagttgcacccacagtcccatcattcaagtacagtgagagtcgtgtgactgtcagcactgggcctctnnnnnnnnnnnnnnnnnnnnnnnnnnnnnnnnnnnngcacagacggt

SEQ ID NO: 5411 - DNA, 731 bp, Macaca Fascicularis
  misc_feature (1)...(731): n = A,T,C or G
cacagagagcacgtccngttnnntattccnnnccgcgtcctacgcaggctgccctggcagctgccttcaagggtaggccgagctccccgccatggagcccctgagggcagcccctgagcactcctctctctccactctctctgtccctgccctgnnnnnnnnnnnnnnnnnnnnncagcagggtcctggcccctccagagcagtgggacatctggggactgtttttgtttgtaggggaaaaaattctgctgcactctgcttgggccttgaggtctgtggcagggcccctctggcctgcagtggcctggatctatctgggccatgagtgacgggcagtgaccagagggactggaggccagcggtgtccacccttgccctcagcaagagagaatgcattcttaaaagaaagcnnnnnnnnnnnnnnnnnnnnnnnnnnnnnnnnnggctctagcctcaggctccagccccagtggggtannnnnnnnnnnnnnnaagaggaattttaaagannnnnnnnnnnnaaaaatgaaggcagtgggaaagcnnnnnnnnnnnnnnntggagaaagtggccggagcctccctggagcggagcagccctgaagtcccctgacctgcgggccgctgttttggtttgacatgacaaggaaaggacttcctgctgactctgagagcctccggggnnnnnnnnnnnnnnggggcatgcatgattgtgctagcgtttagtctgag

SEQ ID NO: 5412 - DNA, 753 bp, Macaca Fascicularis
  misc_feature (1)...(753): n = A,T,C or G
aatgtgagaattgtatggcatgcaaatatgaatgannnnnnnnnnnnnnnnataccannnnnnnnnnnnnnntcaataaagattagagattcaaaatttggtttagctcttgtcatagaaagctctcagcagagtggtggatatgttcttggctttaaaatagatcctgtggaaaaactacaagaatcagttaaggaaatcaattcacttcacaaagtctattctgccagtcccatatttggagttgattatgagatggaagaaaagccccagccacttgaagctctgacagtcgaacaaattcaagatgatgtagaaatagactctgatgatcatacggatgcttttgtggctnnnnnnnnnnnnnnnnntaagcaacaagatcgtgaaccagtattttcagaagaactggggcttgcaatagagaaattgaaggatggattnnnnnnnnnnnnnnnnnnngaagtaatgagttgattgatcttgagttgagatggatttctattaaagatatctctagtttaaatatactagtcacctgccataagtcatggaatagtttttatacttacagcttttatatttaaaacttgtaagagtttttttaatgattgaggaaaaagtcatttagaaaacttcagttttctaaaaattatatttaaaattgtcatcaaaatgtacctagtttataaatgtttattttgtacttaatacctgtaaagtcttagttttcagatattaagtgactgtatc

SEQ ID NO: 5413 - DNA, 2044 bp, Macaca Fascicularis
tagtttgaaatattcacagaaatttaattagtcaattgcttaaacaatgcttaaaatttaggagaattttactcactagatttctatccttttccttattgaaaaatatttaagagaatttgattaaacgtaaaattggtgtttaaaagtttaggaaagtttgatctgctaaattaatgagctaatgagaatttaacaaagaacaagtgaagaaagtattatttcaaaataaaattattagatctataatcattataacggttaacatgtagaatttggtatatactattataagaatattagatatattattactccttaccacaattctctgaggcaggtactgttattcctattctacagctgagaaaatcaaggtacagacaagtgagtaactgctttatcaagggtgttagtttcttggggttgccataatgaagtatcacaaactggatggctgaaaataacagaattttattgtctcacagttctggaggctagaagtctgaagtcaaggtaccagtgggcccatactttctctgaaggctctacaggagaattcttccctgcctcttcctacctcttagtggttgccagcaatccttggcttatagctgcatcactacaattcctgcctccattgtcacatggcagtctcctgtatgtccctctatgtctttatatgaccttcttataaggacactagtcatgggatttggtgcctaccctgatccagcataagctcatcttaacatgttatctgcaaataacttatttccaaataaggtgacattctgatgttcggcgtagatataaattttgggaggacactattcaaaccagtaccccatagtcaccaatatccagcatattgataagcccaatgtcagtttgtaatcctcattttgtttacatcttatttgtcacatctgggcattccctctttctggaaacaatttctttcttgccttctaggataccacaccctcttggttttcttactatttcaatgacttgctccttctcagtctatcagtttctcttcttttctctacctttaaatagaatgtcccagttcttagtcctgggacctcttctctttactatttatatctcatccatttttatagcctgatctttctctggaactctagattcctgcatctaactgctattttatgttttcctatggatatccaatagttgcttcaaacttattaggtccaactcctgatcatcccacataggtgctctacctgcagtcttcctgagctcacttaatggcagctctgtctttccatggtcaaccttggaatcatcctttacttctctctctcatacactacagaaaaccctactgggtctcccttcaaaatatacccagaatgtaatcgtttctcaccacgttccctgcttctacactgtccaagtctctgttattgccatctggattatagcagtagactcctaatgggtattctcatgtccaaccttgtctttatctagtctattctcaacacagcagcagagagatcagtgataactttggatcatgtcacatctctcttaaaaattgccatcttggcaaatgagccaaagtacttttgaagctctactgggttcaggtaacctgagctctacccactgttacctttctgatctcatcccctacttctttctcttttttctctcctgcatcccctacattgctctcctcactattcctcttgtgaacttccttaagacctttgtattggcagttcccttagcctgtatttctgcatggccacagggcttgctccctcatctccttcaagggtttgctcaaatattccaattgtttgtgagccctaccattacctccattaaaattaaccccctgtaaaaagtaaacaatctatatcacacttctgatccccattacatgctctattaaattaaattaattaattaattaattaattttttgagatggagtctcactccagcctgggtgacagagcaagaatctgtctcaaaaaaaaaaaaaaaaaaaaaaaaaaaa

SEQ ID NO: 5414 - DNA, 201 bp, Macaca Fascicularis
acaccatttcaaaaagaaaaaacagttgactttcgggatgcaattgaggcaggagaagagggtacggaggccatttcacactttcttcctggaattaggaagtcttactccctaagcaaacccccaattcagcatggcagatgggaaatcgaaagtacctgtgattggatttttataatcaatcagaatttgcataggact

SEQ ID NO: 5415 - DNA, 757 bp, Macaca Fascicularis
  misc_feature (1)...(757): n = A,T,C or G
gagatgcagcaaaatgcatcactagnnnnngaaacaaatgaaacacatgagggcagtggggagagctgggagctagaaaaaaaaataggaagtgaaagagggaagtctctccatccttactttctgttgccatgaggacgggcagtttctttcttttttgttcctcactttcctcttcttaaacataaagagatttcccttcttcctgcagttctggatggacaaggaaaaagaggaaagaatgaaagaaaccctgcagataagaaggttaggcgagccagaggnnnnnnnnnnnnnnntgtctttcctgtgctctgaagatgccagctacatcactggggagacagtggtggtgggtggaggaaccccatcccgcctctgaggacccggagacagcccacggggcagttttgggctttagctcctggtgctgtttctgcattcataaactggccttttccacctctgctcaccttactgttcacctcacaaaatgaattctgccctgtgacaagatccagccttccctgccgtcaagttggcgtcttactcaggattcctgctgttgctgtgcccttgggtaaaggcctcccctgagaacacaggacaggcctgctaaggctgagtctaccttggcaaagaccaacagatattttttgcccgggccactggggaatttgaggggagatgggagagaaggaagctggagtggaaggagcagagttgcaaattaacaacttgcaaatgaggcgcaaat

SEQ ID NO: 5416 - DNA, 779 bp, Macaca Fascicularis
  misc_feature (1)...(779): n = A,T,C or G
gggctgtagcgttactgaaacagtcacagnnnancctgggtcaataattccactgttgggcctcacacagtaccggtgaggcgctgtagtcttcagtttgaaacacacttttctatccgatggatttcgcaatttaagatttatagtgactacatctgtgaaggggcctttgaatttgaggtctgtgggcaggtcgaggannnnnnnnnnnnnnnnnnncgccatggccccggaggtggacgccatcagagagacagcacagagcagcgaggcggtttgctcgctgggggcgggggacgatggcgaggggggagggggagcgagtttgcatctctccttttcctggttagtctctgttcaaccacattctnnnnnnnnnnnnnnnnnnnnnnnnnnnnnnnnnnnnnaaccatcactttcacattcctaattctgattttgttttgttttgttttgtttgggtttctgaaacttaannnnnnnnnnnnnnnnnnnnntattnnnnnnnnnnnnnnnnnnnnnnntctgtgctgctggatctttgggggggaaatacaggatccttcagcattgaggtgtttaagatttgcnnnnnnnnnnnnnnnnnnttctaaatatggggatatttacctttaataagaaattatactaaacaatgatgtccttgatcattttatgtgctcatattactttcgattctactatgattgtgtggtggtgaacaaagatcattacaaacaaaaactgtaattttgttatataatatacaatggaattac

SEQ ID NO: 5417 - DNA, 714 bp, Macaca Fascicularis
  misc_feature (1)...(714): n = A,T,C or G
gccccaacactatatttagtttgtaagaaattaccattatcgcacttcctgtttgtcttgggaaggttgtcctatctcacaccacatagtagggaattgtgaacaacannnnnnnnnnnnnnnnnnnnnnnnnnnnnntactcttcattcctataaaccttgggtaagttgcagaattctctctgagcttccggtttctgcttcctttccctcccacaaggtgataatcctaatccgtgagcttcttaaagtttttgaaagcatgtaaccagataagtgtatttttacaatggaggagttacagtcatcttggtatttgtgggagatnnnnnnnnnnnnnnnnnnnnntaccaaaatccaaggatgctcaagtcccttatataaaatgtgtagtgtatttgcatataacccatacacatcctcccatatacttttaatcacctctggattacttataatacctaatacaatgtaaatggtatgtaactagttatactgtattggttttttatttatattttttgttattttttaaaatatatttttaatccatggttggttaaatctgtagatatagagggccaactgtactgttagacacaggggtctcaaggcttgcagatagagacagtgaataaccctctccatggtgatcccttagagttcccccaatatgcttttttctttacatgtacatgcaaatatgtatctcca

SEQ ID NO: 5418 - DNA, 639 bp, Macaca Fascicularis
  misc_feature (1)...(639): n = A,T,C or G
ttcacaaatagatcacaaaaccaagatccttcccaagaaaannnnnnnnnnnnccacgacattcccactatttaggctaggttttaactcaaaggttaagaactcaaaggctgagaaagacaaactggagcatttgtctnnnnnnnnnnnnnnnnnnaccttaattctgcagatggataatctggttgacataagcattgccatctctcaatttttacaaaacaaaaagctaccaacaagaagttaaatggtgaagaagaatttggctcaaaaataacacaactgagaaatagctttgtattaagtgcagtacttataacagaatttagctttaggtcactaaagcacatttacgcttttgaagaaacatgtattgctagggcaggcatcttacttcactagaaataacgttaaacttgtagactgttcaaacggccaatcaaaatgactaagaaacatgattgtgcgttttgtttgtttctttatcctttctcttcccttttcgttcaaaaattcagttccccatcctagaccagactcctgtcctctgccagggtgtaagaaaagttagcattctgtcactacagaacatagaagaggannnnnnnnnnnnnnnaataaagaatcaggaagataatt

SEQ ID NO: 5419 - DNA, 719 bp, Macaca Fascicularis
  misc_feature (1)...(719): n = A,T,C or G
aagctgtgtaatgacaatnnnnnnnnnnnagtctttccatnnttaactttttgttgcacaagtatttggacagaagtcgaactgtgaatgagatactgaaatgcactaaattgtattaaattaaactggagttacttgatacaatgaagaaatgcatctgatctacttgtatttattgtctcagaattgtacgttgtgacaatcaaatgttacttgcctaaatgccaggaaattcaactggcttcttaatcaccaagatcgccagcaagtnnnnnnnnnnnnnnnnnnnnnnnnnnnnnnnnnnnnnnnnnnnnnnnnnnnnnnnnnnnnnnnnnnnnnnnnnnnnnnnnnnnnnnnnnnnnnnnnnnnnnnnnnnnnnnnnnnnnnnnnnnnnnnnnnnnnnnnnnntgtatacagggtgcaaatgtattatatggatgtttccttttgtacgcttcatttttacaagttttgctactcacaagctttatgtagtggaggatagaggtatttttggtctttagaagcttgttggggtgagggctgctaacttactcttcgaaggcctgtgtcccgaaggcctggctgcgtttgccgtgctgtgcgaggacctgtgtacacaggcaggtgtgcgcctgcccaagcgcgagtagctcttgtgtactggtgnnnnnnnnnnnnnntctgtttattaaatttgctgctgtgaaagagaggga

SEQ ID NO: 5420 - DNA, 719 bp, Macaca Fascicularis
  misc_feature (1)...(719): n = A,T,C or G
gaaggaaatccagagcacactggagggagaccgcgggtgaggcaccacccaggctggctggggtgggcccgaggctctgccagggggctcgggagcgctgggagtggaggccccctgaggtcatgactcccctgtctgcccatgcaggagcctcaactggcattcacatcgagcggccatggggcgnnnnnnnnnnnnnnnnnnnngtgggggctctgggcttgagtgcagttgccagatgtgctgggaagggatgggaggaagagccctggtcccactcccctggattccacagggccgtacacgtgcnnnnnnnnnnnnnnnnnnnnnnnnnnnnggctcagtgtgggcggctggggcactccgtcctgcccagggcgatcctgagctgtccctctgtgtccttcagcagagtgagtggctgagcggccaggctgcacgatgagcacacacnnnnnnnnnnnnctttttggaggtccctgccccagccggagaggccggtgcacagggccacaccaggggataggggcgccccggcttccacaatgcagctgctccaggcctcgggagaggagaggccccggcccctggggctgccctttccgggtctcgtctgtctgggtcctttggtcaatgttgcacagtttttattgcccccatccctttttgtagtgggctggggtttaagttatacatggtaactgcctctggggaaaaag

SEQ ID NO: 5421 - DNA, 764 bp, Macaca Fascicularis
  misc_feature (1)...(764): n = A,T,C or G
ttgaataagtagtttnnntgttttcaatatgcagttttgaaaatgaggattcacctagacttttttagatttactactnnnnnnnnnnnnnnntatgaataaccatttatatgtgttttgcttaaagtattccaatgcctatttccaagcacagttctgcccccggttgacttttatgccacgtgtgcttcatgatagaacttttaggtcagttcctattaaatgagctcttctgcagatagcacattcagtagccttattttgttgatggaatactgtatcatatgctcaaatctgaaaaccttgaacacggccaaaatccacaaagattataaaagcaaactaagttgtgaacctctagtacatgtaggcatttagttaaatatagcaattcnnnnnnnnnnnnnnnnntccaaaacaaattcctccttcaaccttatttttacttgaaatttgctagaagaaatagcaaaccgaaatttgttttatgcatgagttaataccactggctcagcaaatacaagttagtttgctttaggcaggagactttttttgtaatggaagaaatgcactacaaagttaagacagatttttgctaagtgcaggaggccnnnnnnnnnnnnnnnnnnnnnnnnnnnnnnnnnnnnnnnnnnnnnntacattctcccttactgaaatctacatgacatgatgcttcttgctgggtttttgtacatgtaaacattgtcaagctgtgaaagaaaatggctggaggtgtgctttgt

SEQ ID NO: 5422 - DNA, 717 bp, Macaca Fascicularis
  misc_feature (1)...(717): n = A,T,C or G
ctgcagtcatcattcttgtacacttctcattgcccactggtatatttctatagggtggaggcctagannnnnnnnnnnnnnncatagtgtttacacagcttttatttcattccattttctttccttcttgctttattagctataacccttttcttatttcagtggctgctttagggtttctgggatacatctttaatttctcacagtctgctttcaattgtcattatacctccccttctggcctttatcctagtattatgtatttttatgcattataagctttgggattcattattattacttttatttattacgtcaaatattttttaaaagatttaaattataagaaaannnnnnnnnnntgctttctaaatgccatttccaatattggtttctttgtataggtccacaattttatcaaggatccttttgcttctgcctggaggactcttaagatttcttgtagcgtggtttggtgaattcttttagcttttgtatgtttttcaatgtccttatttcactcacagttttgaaattttatttttgcatagaattctgggttaactttttttgtctaggtactnnnnnnnnnnnnnnnnnnnnnnnnnnnnnncatttaaaatatcatctttctttcctgtgtttgtaaatatggcataaagccggtttcttgtgctggttatataattttcannnnnngtgtatttaaatttaaaa

SEQ ID NO: 5423 - DNA, 718 bp, Macaca Fascicularis
  misc_feature (1)...(718): n = A,T,C or G
caggtcntnatcataaagannncnatcaactcacaaaagtannnnnnnnnnnnnnnnnnnnnnnnggtcatttgagttaaaaaaaaaaattacatgggtgtcagattcataggcatcctgtccatctaannnnnnnnnnnnnnnnnnnnnnnnnnnnnnnnnagcccctttcctcttagccatnnnnnnnnnnnnnnnnnnnnnnnnnnnnnnnnnnnnnnnnnnnnnnnnnnnnnnnnnnnnnnnnnnnnnnnnnnnnnnnnnnnnnnnnnnnnnnntggggtgctgacatatagtttgggtaagnnnnnnnnnnnnnnnnnnnnnnnnnnnnnnnnnnnnnnnnnnnnnnnnnnnnnnnnnnnnnnnnnnnnnnnnnnnnnnnnnnnnnnnnnntaatattttcaataggtgtttttttaagaacactagatttttggaataatatatttctaattaggactatactttttttcaatggtctgttaaaacatcatacagaatatttatttagtttattgtcatgtattggctaactttcaggggcctcagattccgtgtgtcttcagtggattgatgaatatcaggttaatttgtgcctgccccagccatctctactctattctgaggtattccacaatcctcttgttgcannnnnnnnnnnnnnngaatctcaaaattgtgtaccaatattttctttgactgtaaaaaatcatct

SEQ ID NO: 5424 - DNA, 756 bp, Macaca Fascicularis
  misc_feature (1)...(756): n = A,T,C or G
ttatatgttaagtacaaaagagacataaaattgtatatacagtagaataatgactatgtaaacacaccaaaaatctatgcacagaaatgtnnnnnnnnnnnntnnnnnnnnnnnnnnnnnnnnnnnnnnnnnnnnnnnnnnnnnnnnnnnnnnnnnntaaaattcccaaaatttccttaataagcagtaattataattgcaacaggaaataatttctttaagtatttctttaagtacccagtgcagtnnnnnnnnnnnnnnnnnnnnnnnnnnnntggccctgattcctaaggtagcaaatgccactgccccactccccatccatccccagtagggctcgagcacnnnnnnnnnnnnnnnnnnnnnnnntgcagccccagccctcagcatctcttccactcacttccagctatatcttttccctttcctccttaactcaggannnnnnnnnnnnnnnnnnnnnnnnnnnnnnnnnnnncatgaggtggcatgttttgtttgtttttgagatggcattttgctcttgctgcccaggccagagtgcaatggcacgatctcaactcaccacaacctccacctcccaggttcaagcgattctcctgcctcagcctcccgggtagctgtcattacaggcatgtgccaccacacccggctaattctgtatttttagtagagatggggtttctccatgttggtcaggctggtctnnnnctcccgacctccagtgatcctcccgnnnnnngctcccaagtgctg

SEQ ID NO: 5425 - DNA, 199 bp, Macaca Fascicularis
atctggcatgggtgccctggatatgggcaaggagggggtttctccctgtgtccctaggagagggtggcttggagacagagatgtgccacactgacccccggaggctgcatcttctccatagaatgggctgttgtcctgcccccacttggcccacagcgggccagacccccccctacccccgcccagagatcagcagcca

SEQ ID NO: 5426 - DNA, 714 bp, Macaca Fascicularis
  misc_feature (1)...(714): n = A,T,C or G
atggattccctcgttaaaatcgatcatttannnnnnnnnnnnnnnnnnnnnnnnnnnnnggcttctgctcgcatacctgacaggcagcttgatgtgactgctcgcggagtttatgccccagaagatgtgtacaggttcctgccgactagtgtaggggaatcacggacactcaaagtcaatctgcgaaataattcttttattacacactcgctgaagtttttgagtcccagagagccattctatgtcaaacattccaagtactctctgagagcccagcattacatcaacatgcccgtgcagttcaaaccgaagtccgcaggcaaatttgaagctttgcttgtcattcaaacagatgaaggcaagagtattgctattcgactaattggtgaagctcttggaaaaaattaactagaatacatttttgtgtaaagtaaattacataagttgtattttgttaactttatctttctacactacaattatgcctttgtatatatattttgtatgataaattggatatctataattgtagattttttttacaagctaatactgaagacttgactgaaatatcatgtatctagcctacagtattgtacttaactgttannnnnnnnnnnnnnnnnnnnnnnnnnnnnnnnnnnnnnnnnnnnnaataaatatggaatatattttaatgtatatccagannntttttcagtaagcttgtctttt

SEQ ID NO: 5427 - DNA, 731 bp, Macaca Fascicularis
  misc_feature (1)...(731): n = A,T,C or G
gcagcatcagatgacagtaggcgcacgctgagggttcagggcagtgactactctgccaccaggtgacttggcacaagcagaccgctgagcctggctggggtggggtggggactgggaggccaggagccagcctctccagggccccactcctgtccttgcccaggaactagacacagtccggtggaaggttgatgctgtagacgtgtcnnnnnnnnnnnnnnntgaccccacaaaagatggatgggcttctcagacccacagaaagcacatgggccctgagatccctggggttggttggggacggtaggaacctctccctgtccacaccctgagctcccagagccctgaacgctggagaccacacgtactgacttctctagagcaggctctgggtgactgggcctcgttcgcctgtgctggagggaattctagagggaccccaggactccctaccctccatgttcctgtccccagctgtctccctcctttcccaccacacctgagatttgctgaccacatgcctatctgtctgtctgtctttccatttcagagagcgcaggctggattaccaggagggagccccgggagnnnnnnnnnnnnnntggtctgtggagctgtagttctgatggaaggagctgtgtccagcctgtacgcttggctgcccccttgcaactgcagggccgcttctggggcctggaccaccatgggggggaaaagnncccactcataca

SEQ ID NO: 5428 - DNA, 730 bp, Macaca Fascicularis
  misc_feature (1)...(730): n = A,T,C or G
aatggggcccagggaccctcaggacacagggaccggctcaaggtaccactcagcccggccaggatccccagccttgcttttgttcttggtctctttgtgatagagaannnnnnnnnnnnnnnnnnnnnnnnnnnnnnnnnnnnnnnctttggaaaaaccattccagcctttctgtcaaatgctcttattttcagtattatgaagtatgtatttgaaatattcacatttctgttatttcttgtttttaagctctgaattattccagttttctgtcctgcatgctttcaacagtgtgcttnnnnnnnnnnnnnnnnnnnnnnnnnnnnnnnnnnnnnnnnnnnnnnnnnggtcctgnnnnnnnnnnnnnnnnnnnnnnnnnnnnnnnnnnnnnnnnnnnnnnnnnnnnnnnnnnnnnatgctgtcttgctttgctgctcagccgcctccctctgaggccaacttaggccaacctacctgggactccatctgaagtcagacgccagagaaactgagtggtgaccacgggtctgcttttctctctgatcctaggggacttgttgacatgggagtatctgttcccacatggaaggatgtgtgtttnnnnnnnnnnnnnnnnnagatgtaatgtatgacaagtctagtgtccatggtttaaaatgttgctttgaggattctccatcctgtataagaagaatgactttcttcagattataatcgttattaaagttgt
